United States Patent Application Publication US 2018/0305689 A1 - sequence listing, part 106

SEQ ID NO: 1560142 - DNA, 4001 bp, Homo sapiens
agaagagaaagtgtttcttcccctctcttctgatacataaccccacggggttctcttgctggagagggtgaccccagatcacagcggggccaccatgtggccctgcaggatgtccacgaggtcctgagcccctctctgcagtgccagctccaagggtgtgagacccctggcgtccctgcgatggagatcagattcagctgccagaaagctgaccacagcagtgtgaccctcttgaactgccagatggattggaagtgccccggtgccatcaggcacgttgacatcagccccgtgctccactaggaccttcagggtgtccaggaatccagtgcgggctgcgtcatggactggactggtaccggaggtgtcctggacattggggctggcaccttgcttcagcagctccagggcgatggcggtgctgccaaacatcatgacctgtgtgagggacagaggatcaggaggtcctcaagggaggaggttccacaaaaggggtcactggaaagagaagggtcatccagaaagaggcatctcccagaaacaggaaatgctagaggaggggtcctctagtgaacggagaagctgcataagcccccaggaaagttcttctgggaatagggaccccccccaaaagctggtcactcccttaagaatgagaccccccaacccagagaacagccccccatggaaactttcaaggaacctaagactctcccccaagggaccaaagacgcccccagatatgggcaatcaccaggaaacagaaaatcccctccaggaaatgggcccccagagatggagaactacccccaaagaattgatagtcctcataagggaaaaaagatgtcaaaggaaagcgaaccccttctccaggaaatagcctcctcctacataatggtgatgtcacctcagagtacctgagagctcctttcaagaagcgggattccaaaagtaataataaaagagaaacgagacttccctgtaaaatgtctcccagggaatatagggatgtcttgcaatctgacattgttcctccattggggcccccatactatatcaaggatccgcataacctttaggaatgaagaccccacccccaagtaaccagatttgtctcagagagccccctacaaaatgaggaacccctagagacaggacctctccttccagagatcggatctccccatagaagccccaagaaacgtgagccgtccccatggaaacggcatccaaaggagctgaacccgcacccacggaataagaacctccccagggaaagtgaatccccggcactcagagaaccaggaatcctcccagagaagatgctaaaaagctctcccctccccccacaacctagcctcacccaccacccaccttcgaagggggactgtgggggaacaatgaaagcctagagaagaaggaccggttcccagtgggtcaccaccagggccaggagaccagagaggagctctggggtctcgatcctcatcccgcttagccgccccgccccaacctggaccggcccggcctcacctgcagcgccgtcttgccgaagcggttgagggcgtcgggatgcaccagctcccggtgcagaaggcggcgcacctcctgcacgtcgccccgggccgccgccccactcagccggtcgccggcgcgaacctcctccagcagcatgtcgacactggcggcctgcaaagccccccgccccgccccagcccggcgctgtcagcgcggagcagccggcgggcgctggcccgaacagccctcccggggcgcggccgcggtgcacccggctgcgctgctctcccgtcccggctccccagcccgagaccccggccctcccggcgggctcctccccctgtcagccggaggacggcgaggggctgggagccgggcccaaccctcggccgcccgcggggccctgcccggcgcccgccccttgggggccgggtctccccctaactcaccctccctcctcctcgccgggcggggtctgctctgagcctgcgccgccgccgccgctgaggcagccgccagggggcggagccaacgtgctcccggccacgccccgaacgcaactgatttgttttcttacaaactcgctactgtgtagcggcaccgcgttgcccggcgcgcgaccttacggcgttccgcccacagggcctgcataaccagtggctgcgcgtcgccggggaaacttcgggctcggcgtgaaacgcgtcgctcctgattggtcagagtgtggcaaccggtggaccgccggcaatggcggggttttcggttttcaaatgaacccggcaggcgggaaagaaggctggtttaactgacccagggagaaaggtcaggggcagggtcgcgcgggctgctctgggacctcggcgcctcctgagggaagggaggcagggctggagccacccaatccgaggttccactactaatagacattcattggcccttactacgagctgggcgctttatttcattcatttattcattcactgtgtgcagggagcgtcctgggagctggacgcgcacattcaaacaaccaaataatattagatagtgtcaagcaccgtgaagaaagggaaacggagagacggagtggatgaggaagggatcaccctgccgggctcagactgagccagcaggaaaggagcctgcagctgccacgtgggaaggcctgagaggacatagtcgcagccagacagggactcagaggtcttcgttcaaatatttacttagcacctcctagaggggcccgagtggagagcacgccagtcggcccctgctgcagggacacctatggtctggggccagagacaatagttaatttttatttatatatgtatttatttttgagtcagggtctcactcctgtcacccgggccggcgtgcagtggcgcgatcacagctcactgcagcctcgacttcccgggctcaagtgatcctcctgcctcagcctcccgagtagctgggactacagggcgcaccaccacgcccggctaatttgtgtttttagtagatatgaggtttcactatgttgcccaggctggtgttttttgtttgttatttgtgtttggcttttaaatacagatttttttttttatgttggggttcttgctttgttgcccaggctggtcccgaattcctgggctcaacggatccttctgccttggcctccaaaagtgctgggattacaggcgtgagctcctgctctccgccaatagttaaatctttttagagtggtagaggactgaccagatgagccattgaaacggaaaggcaaaaagccgggcgcggtggctcacacctgtaatcccagcactctgggaggctgaggtgggcggatcacgaggtcaggagttcaagaccagcctgaccaacatggtgaaaccccgtctctaccaaaaatataaaaaattagccgggcgaggtggcgggcgcctgtagtcccagctactcgggaggctgaggcaggagaatggcgtgaaccccagggggcggagcctgcagtgagccgagattgcgccactgcactccagcctgggcgacagcgagactccgtctcaaaaaaaaaaaaaaaaaaaaaaaaattagctgcgcctggtggcacgcacctgtaatcccagctactcaggaggctgagacaggagaatcgcttgaacccaggaggcggaggtcgcaggagccgagatcgcgccattgtactccagcctgggcaacagagtgagactctgtctcaaaaaaaaaaaaaaaagaaaagaaaagaaaagaaaaagaaacgcaaaggcagggagggcctccctgaagaggtgacatttgatttgagacctaaaggtgagggagggagacttgtggttatatggggaaaagcacaccagctgggaggcacagcagatgctaaggcccagaggtgagagcgtgcctggtgtggtacagagcaggggagagcaggtaggtggggtatcaggatggcaattgtgcaaatcaagccatggctt

SEQ ID NO: 1560143 - DNA, 4001 bp, Homo sapiens
ggctggttaccagctccaggagccacagccctcggatagctcaaattcttgttcctagtcagccctgcccaggaggccacaatctagccctggcccaggctcctcagggtcaccaggagttgagaaccttgggatagtgttttggagcaggggattcccagggctgagcttgtctgtgaggatcccagaaggcccttcaggccagaccctgactgagtcctactgggtctttcttagggacatgttcaccaggagggtcccggggggctagattgagactggtctcccctcgataagttacccacatcagattgtccttcctctgaagcaaatgtctgcaggatcaggactccagagtaagacattcggtattttgatgtctgtcccatagtgtgtcctgcactagatgctcaaaccttaacatggggtataatgcagaggaggacacaggcacagcccaggcctgacaatcccatgtgtgggaagtagaactaaccccccaacacccagaggtcatggggaaatactcacggtatacatggaactgtccagttgcttcttcattcacaagatctgactttatgacttgtagggtgtagaatcctgtgtcattctgggtgacgttctggatcagcagggatgcattggggtatattgtctctcgaccgctgtttgcgggccctggggtagcttgttgagttcctattgcatatcctacaatttgacggttgccatccactctttcccctttgtaccagctgtagccaaaaagttgctggggcagattgtggacaaggagaagaacctccttcccctctgcaacattgaatggcatggattcagtagtgagctgggcagtggtgggcgggttccagaaggttagaagtgaggctaggagagaggagagagcatcagtcaatattgggacctatgcattagggtagaaaaatggggccttgggtcctgagcaggtgtcttcacccctccaccttggagtgtgtgtgtgtgtgtgtgtgtgtgtgtgtgtgtgtgtgtgtgtcctactgggtcaaggtcagcagtgtgactcccattcccttagtgcctctgaccttgtcatttctctggaatgcccttccccagggatccgcatggctccctccccactgccctcagatcttgatcacatcagggtgctcttgggagatcctttccctgacacctcccctagagaccctgggtattccctttctgacctttttctgctctgttccctccagggctcttgtcaacacctgacctcacattctagatctctttgcttgtctgtcttccccacccatgagagcgtgagctccgtgagggcagggatttgtgtgatgttggttgcaccccagtgcctgggataggctgcagactcctgtggatgagttagtgagcattcccagggctcttcatgtcctggggtttatttgccaatatctgaggttggtggctcagggctctgtttaatgccccttttaaaatgttttccttaattgtcacgctgacttaaattgtgattattgtcagcagtttttgaaatttattgctcattgatgattcagttggaaaaggtaaaaaatgggagattgtttattcactaacagtttcagatcactgagactttccttttatgatctctatccctttcatgtcctctctcctatttggctccaagagaagccctctgtcccctcttagagctccatcctccccagaggaccctagccattctctgtgcgccctctttccgccccttcccagggtgtcctcccctcacctgtgagcagaagcccctgccagggtacacgcactctgtgaagtggggctgagaggtgccccatggtgtctcctgctggccctgtcttcacctgtggaggagagcttgggctccaggaacgcttcgagcacggctgctctgtcacctctgctgttttccactctctgtgctgagcctcctccctggggcccagagctttgtctgatcatgtgtgctggggcggggtttgtccaggaagctctgtttcctctcctctcattcctacctttgtccttactttctctttcctttctgtctacattttggtttcccagaccacactttgagaatcaaggctgatgagacctctgtccccatcaggggaggaggatcccccctctccagcactgacctctattgtgtcctggctatgggtctgtcagcagcacacagagaaccctggcatatccaaatgtggtaattattttctttgcaacacagtgagctgccaggtctccccatgctcttcagtgtgctgggaaggtaggaagacacccagcaggaaggtgacagaggtggctctgggggatggaaaggggctcactgggggatgactggggagggaccagccctctgtctctagtgtcaccagcctggcctctaacccagggacagagacccaagtccaggggtctcaggtggagctgcagctcccggatatggagggggaggtgtcctgtgtgtcctgggaagagaggactgtgatagagggaggtgggtggctctgggctctactgtccttggggaagacttcagggggaccctccctcccttgagctgaggctcaaggcctgtccatgttctccctgaccatcctgggtggtctctgtcctctgcgaggctgattgtcctgtggtcaccgcaccttccccacaggtggtgccaggagggaatggggagctgcacagggacccctcacagaacagggtcctcagaggacccaggaagggacagagcaggtacatgggagggcctggaagggtgttttggagcaagggatggaaagtgggctctaccttcacctccttagcaaagccaggttcatgaccaggggaatgtttcctgagtgttgtctgtgtgcaatgtctccccctggagggcaagacaaggcctgcagccttgtcaagggctgccccagggatgctgaccagggtctacatgatgtgagctggccctgacccctgggcagatgtgggctctgacctccaggcttcaaggtcaagtcaccccaggtcctgttcactgcgggtccccaggctgcccagctccatgcggtgcaggatgagcccagggagaggacgtgagttgtccagaggacttctgtcaagattggagagaactgtccaccagggggatgggctgccttagaaggagccatctgtcccagaggtttgaaaaacaaaagcaaaaacaaaacaaaacaaaaaaacaaaggcccagtgaggtgcctttgggggcttgagaatgaaatcctgtcacatgtggcaacatgaatggaagtgggctaggaacagaaagttaaacatcacatgttcttactaatatgtggaacctaaaaacagttgatctcatggaaggaaaaagtagaacagagcataccagaggctgggaagggtagaggaagggagggacagggaaagatgtgttaaaggatataaaattacagctagataggccgggcacagtggctcatgcctgtaatcccagcactttgggaggccgaggcgggtggatcatgaggtcaagagattgagaccatcctggccaacatggtgaaaccccgtctctactaaaaatacaaaaaattagccaggtgtggtcgtgggcacctgtagtcccagctacttggaggctgaggcaggagaatcactggaacccgggaggcagaggttgcaatgagccaagattgcaccattgcacttcagtgtggcgacagagtgagactccatcttaaaaaaaaataaggccaggcgcggtggctcacgcctgtaatcccagcactttgggaggccgaggcgggtggatcatgaggtcaggagatcgagaccatcctggctaacaaggtgaaaccccgtctctactaaaaatacaaaaaattagccgggcgcggtggcgggcgcctgtagtcccagctactcgggaggctgaggcaggagaatgg

SEQ ID NO: 1560144 - DNA, 4001 bp, Homo sapiens
cgaggagaagagaggaaaagtaggggaaggttttcgggtagttcttaccaaccacccaggcccgtggcctcctcagagagcctgggagtcaccaaggaagaaaatcagtaaaaggtgactgcacctttcccagccccacccagtgcaggggacctacaggtgttgtctcagcggatggcaaaacaaccctgtaaagtgggcacctttaggacccccctttgcagatggagatgagctaggtggggactcccacttgtccgggttcctgcagggagaggggatttgagccctgctctgtgtgcaaacccagacagaagggcaggaaactgtatggccacatgctttctttggggctctccttcttgttggcttcctgcaaagtgctcagaagttcacattctctttctcccacttcggaggccttgttttcccctctctgtcaaatgggcgtattcggaggctttggggccaaggagagctgagttttgacaccagctctgcacttacccaaagtggggctggggacagtcccttgttgagtctccatttattattctgataaatagagatgatggccgggtgcactggctcatgcctgtcatcccagcacttcgggaggccaaggcaggcggatcatttgaggtcaggagttcgagatcagcctggccaacatggcgaaaccccatctctactaaaaataataataataaaaatagccaggcgtggtggcaggtgcctgtagtcccagcactttgggaggctgagatgggcagatcacctgaggtgaggagtttgcaaccagcctgaccaacatggcgaaaccccgtctctattaaaaatataagttagctgggtgtggtggctaacgcctgtaatcccaacactttgggaggccaaggcaggtggctcacgaggtcaggagttcgagaccagcctggccaatatggtgaaacctcgtatgtactaaaaatataaaaaattagctgggtgtggtggtgtgcacctgtagtcccagctactcgagaggctgaggcaggagaatctcttgaacccaggaggtggaggttgcagcgagctgagatcacaccactgcactccagcctgggtgacagagtgagactctatctcaaaaaacaaaagcaaaaacaaaaaataaaagttagccggtcatggtggcacatgcctgtaatcccagctactagggaggctgaggtaggagaatcgcttgaatccaggaggtagaggttgcagtgagccgagatcctgccactgcactccagcctgggtgacagagcaagactccatttcaaaaacaaacaaaaaaatagagatgatatggaccctacttcaggtttgttgacagcagttagtgagaggctacaagtcagggatttaagccagagcctggtggacgtgggtctgattggtatgcctgttattaaaagtataggctctggccgggcgtggtggctcatggccggacgcagtggctcatgcctgtagtcctagcactttgggaggccgaggtgggtggatcaactgaggtcaggagttcaagaccagcctggccagcatggtgaaaccctgtctctactaaaaatacaaaaattagctgggtgtggtcgcgggcacctgtaatcccagctacttgggaggctgaagcaggagaattgcttgaaccctgggcaaaagagtgaaactccatctcaaaaaaaaaaaagtataggctctggacatagttccactgtttcctacctccaggaccctgggcaatttatggactctgccaagcctcagtttccttatttgtaaaatagggaaaacaatagtactcacatcacagggctgttgaaaggattaagtagatacacatgtgaagtacagtacttaccacgactggcgcagagtaaatgctcagtaaatcactcattcacttattggacaaatactgaatgagcacctattgtttgccaggtgctgttctaggcgctgaggatgcagccgtgcacaagacggatgaaatccctgccctcagggggccgacatttgcggagtaaataaaggaaaggtaaatatcttccacgtcagattgaaaaataaagtcagaaaggggatttgccattttattttttgtagagatgggatctcgctatgttgctctgcctggtctcaaactcttggcctcaagtgatcttcccaccttggcctcccaaagtgctgggattacagccatgagccactgcccctggcctggtttgctactttaaattggggtggagggagggtaacagggaaggtgtctctgagatgatgctgggcaggagccgagggggttgtggtgccagagctgctgatagctgtgttcttatgacctgcatcctgatggcttctgagtcctggttcctctgaggcctctgcagcctgcttccgggcagggggccacacctgtgctcacctgtcctggtttgcctccagcactgtgtcctgggctgccctcgtggggcagggctctaacaagggggagaaggccctgaggaggtgcgggtgaggccaggtgagaggcacagaggatgtcctggcgcctcctgctcccctctccccacctgtgacctcacctcactcttctgcgtcctggcccagagcactgggacctcatcccagtatcaatcaggatgcctccctgatgtccctgggcacctctcactcaccttgtcccaaactgaccttggcatcttcccccagaagtgtatcttcccctggtgcccttatcagggaaggcgccactacccacctcatcgctgggaaaagagacctggggcctcatccctgatgcctccccctactccccgaacacgccaccccttctggcaactgactctacgtatatcttctctccctccctgaagcccctgccctggtctaggtgaccactccaccaccccaccttgcctgggtcctcctgtctccccaccagcctcctccctagtctctggccctggtctccccgactcccattgcccctccacatggcagacagaggctctttccaaaacaaaaacctgcctctgcccctccgtgctcagaacctgctgtggctccccagtgcccttgggaggaagcccaggttcctcactgtagcccaggaggccctgcccggcctgactcctgcccacctgaccagctacatagaataccacttgcttccgggaaccctctgcttcagttcttctgtttcacttgcactctacccagaatatccctgcttccctctgctctattccactgccttccccaaaccctctcctccaggaagccctcctggacttcagggcctggaattccctgtctcagccctgactgccttgggttctcgctgtctggggctgggtctttttcccccactggcctgggagcctcagctgggcacggctgggctgtcaccactgtgtccccagcactgcccagcaaatcacctggcacagagcagaggctcacagcatgtttgtggaactggacaccaggtgtggatgacacagagagaggagtcttcagagaggctcaggttcctggtgatctgctgtctgcctgcggagtgtgaccaggccgggctctagaggccctctatcgtcacatccacccttcctagtctgcccccatcctccacctccctggcccctcctctggtgctcccggctgtgagcccagatccttggttcagtcaagagctgcaggctctttagcacctgctgtgcgccgccgggctgcgcagaaagcagacggggttcttgtgggcaggggctttttcctgtttgtgcagtgggtggggggtgttcatgacattgacttccctgggactcttctgaggatcaaaataggcacatggagtgttccgtgccgggcctgcctcagagcacgtactgggggcacagtggtcgttgttcctccaccatttgacaaatgtttatggagcaccaactatgtgccgggcactgcgctaggcg

SEQ ID NO: 1560145 - DNA, 4001 bp, Homo sapiens
attgcctgcaaccacccgaacagtgtagtttcccgtgtcatttaatgcagtcggcctgatcaacaggctgccttctctgttcactctctccctgccagtgtacatgggcccaggctgctgggcactgggcggtttgtggctgataatcatgtttcctgcgctgtcgtttgcaccccagtaccagctgtattcctgaacatcctcagggaccttatccagggccacgacagtccgatatcccttgatccccagggtttgggtgatgaagatttggccagaggcctggcagatcccacaggccagcagactggctgaagaagacaaggaaaaaagacagagagaaattcacaaagagattcagactggctgagaagacaaggaaaaaagacaccatccgggaacgattcccagagacgctggtgaaccaggcaagagtttctggctcctggtagagtccccagcttgtcccctcctgtgcctcccctcagcccctgccgtggtccattttacccttatcttctcccaggccctcctcgctagccacacagcctccaatccatcctcacatcacagttacgtaaatgttaataagcccaagttgcgaccctgttctcctctgctcaaacaccttccatggctccccagtgctcttaggatacagtccaaactcttaggtgggtatatgaaacactctcagccagagctggtgtttgtgactcatcgagcctccttgtggtgcacacctaccccatcctgtccccactatgcaccttttactcatttattcctgtagttatttatcagaagacatgactgccacgctgtatgccccaggcctctacatagctctcttggtgcaccacaccttctcctaactccaggcttcgcacacgctgttccccattcccggcagggactccttctccctcctctccatctgcaccctccttgctgactcacttctattcatcactcaggtctcagcttggatgtctcctccaccccagcctgggtcaggtgtcccctctgggctcccccagctcctcctgggctccccccatcccagccatgacctctgggggtcctcagagtctgggcacatatctatatctcgccctggactgtgggctccaggagggcaggactgccctgtctcagtcaccactgagtccccagcgcccctgagcacaggctggacacagggggagttcagtaatgattgtctgggtgagaaatactcccccgagaatttctacatgtctttgattttgcatctaaattcactggagtgggtgtgaatggaggcggcagcctgttaccacatatgacatgggcagttgtccactgccctgtgaaccccaagcctgggctatgtggaggaggcagagatgcctgagaccccggctctaggcctcacgtatggacacactggacctgttcaaggacagtacacgtggtaaagcaggacagttgtgcttgtagggggcacagaaggtcctgggcaaaggtgaggggctgggaaggaatctggcctgagaggtgggggaggggatggggcagattggggcacccagtgggaggtgagtgcagggaggtgagggtgaaggtccaagctcctgattcctgggcgtagatagaaacacagtttctctctctctctctctgtgtgtgcgcgcgtgtgtgtgtgtgcatgtgcgtgtgcgtgtgtgtgtaacaccacatgtgtgggtctgtgcaggggtgtgtctaggggcaaagtgtgcccacgtgtgtgagctcatgaaagttgtgctgagggtcctcccccttctcctctccccgacccctgctctgggagtttcttgatgtgcccgtggatggggatggtcccagccccctccccgccgctttgctcctagctgcccttccctcagtcctgggaagctcatccagcatccagcatctcttacccatgaggaagaccctcctccacaggctccatctgggtctggaaaggtccatgagctgcctggggtcctccaggaggaggggtccctccagagacacagccacctcctctgctccctccaagacctgtgtctcctggcacagaggctgccggtctcgtctcccagccttcagggcggcctttcctccccagggtgcactctgaccagcaggggtggggcctggggaagacggctcttgagagcccaaccttatctttatggctttatgttgcctttagttcattatttatttacttatttttataataatttacatttttttctctggtcatgaaaaaacggaaaaacacaggctcactgttgggaaaacaaagaaaaccagaaaatacagccaagtgcctcaaagataggacatcaaactcctcaactgtatgtcctgtttccatttggtttggttttcctatgcagggcccagctttttttttttttttttttttttcacggagtctcgctctgtcaccaggctggagtgcaatggcatgatcttggctcaccgcaacctcgtcttccgggtccaagtgattcacctgcctcagcctcccgagtagctgggactacaggctcgtgccaccacacccagctaatttttgtgtttttagtagagacggggttacatcatgctggccaggatggtcttgatctcttgacctcgttatccgcccacctcggcctcccaaagtgctgagattacaggtgtgagccaccgtgcccggtgtagggcccaacttttagactgcctggggctgttttacaactggctgctttcctcctcaacagtggactatttctctatgtcactaaatattcctcccatgaccattgtgaatggctgcagggaatgctcttctagacctgaaccagtgtgtgtataaccagatccctttgtgaaagtgctcacaagccaaaaaaatccctgagaaatacagtggggaaggctgtgaagcgagggctctctgacaacaaaaattttcacagaagacgctgcagaaaccatagtcttgcacaaaagccattgcttccttccaccaaaaaaatacttctgtgacaagtatttggacagcaacctccggtccaaacttggactgacgtcaccctcattagggatccttgtagcctagggtaattatctcaaaccatttatggggtcctcctcatttttccattgaaaaccctttgtgttcttttacctccctgaatatgcacgtagtttactatagcacccagattcccattgcaatgccccattcctgaatacatatcattttcttttagagagcttctctctgtttgttatttaggttgacactttgttgttggagggtcaggctgtttctaaaaacagggatccaggacaggggagttgtgcacagaagtaatgaggtatgggccccttgaaacctgacagagagacagacagacagggacataaaaaaaaatgcaggcagagtgagatacagagggaagacacagaaacagagagagagagagagagagagggaaagaacaactcagaaatgtccaattgacaaggtctttctaaccgtacttgggaatgtgtttgtctttcattttgataacacaccctactttttaaattataaaaggagtgaatttgaatttattataaaaatttttgatttacatacttacatatttatgtaatattattaacatttacatatttatacatatattttatatgtataactatataagtatgtaaaataaatataaaattatttattgtcatttaaagaataccgttttttaaaaccacccagagatacaaccagctgttttctatgtgtcttttcagtttgggtatgttatagctggcatacgcatgcacatatgaatctcttttattagagcagaattatatcattaaatttttgtttttattagggcttttcaaatgttaaacccaagttttgtcagagtaaggtgaatatgcacctctggatgtctactggtttagaaaatatctttgaa

SEQ ID NO: 1560146 - DNA, 4001 bp, Homo sapiens
tagtgctgaagctgagaaactatgctttagggaaaatgtttaagatggtgcctggctcttaacgatcacccaagaaatgccagctgtcattattgcccaccaccctttccctcacactttgccccgagtggattcatcagtaaatactcgctttataaacataaagattgagggatgcattcctcacaaccaggcatacagtaagtgctcgataaaaatttggttaatgttagtgcatgtgaaaggtaaatgagatggtgcattctccagtgtcaggcacaaggcgggcatttcatagatattttattagttaatgcatgtgagggttaaagactatctctggggattggtacacagtagatgctcaatatgtgtcaagtgaataaatgagaggaccaaatgaaatggtgtttgcacagcacctggtgcatggtagctgctcagggctcattagcttcctcacctcatccccagaccctaacacttaccagctacctggacctcagtcttggccttcatagtccattcagagttgatggtaatggctacttggtaggtgccactgtctgtaggctgggcgcggcgcagcagcatggaaccattggggaagcccacgatgtctcgctgtcccatggcactgccatccctctgaggccgttgtatcccagggatgtaggtaaatagcctcgtgcctccgtacgtctcctcccccaggtaccagttgaagtcctggaaggtgtctgggacaccctggactgacaggagaaggtcctggttcttttgaggctgctctggaatcttctggatgtagagagctgcctgggagccttggagcatccagaggaccaggattgaggctgtgggaagttacagggaagggctgagatcaggggtgttgccagggaccatggcatgctcctctctagatacagatcttcagcggggagcaaggactctgagtgctgctcattggaaacaatgctgggattgattagtgatgtctgccctgggtgcaggagtgggaacacaggcatggttaccacagatttgccatcctgttgatccagaggtttttctaccttgagatgctgtgtggcctgcttctaaacacatggactctctgaattcattcattcattcatttattcaaccaatacttataggcatatgtaatatataagctataataccaactatatgtaatacatctaaacttccttcaatttctagacactggagatatagcagggaaccaaacatacataaattcctgccttcatggtcctaacattatagaaaattccatagataaaatggcaatgaggctgtgattctgttgcccctcccccatcttattctaatttcatcctctcaggtaatctttccctacttctaagaggaaacttcaatctctgggctgagtccccatttctccccttggcctttagggtctatttcctccttacctgagagcaggaggctctttgagaagcagccctgggtccccatgggaatctccatcttggcgtcttgtggaaatgccaaggggccacgagctggacactaagggggccagaggggtgggccctggctgtctgaagtaggccagctcagtggggatcccaggggtgccttagagacaccgctggggctggcccagccccagcatgccctgtccatgggctctggaggctccacctatactccctgggatgggagcacagacagaggttgaaccagtttttcagggtgactggggaacttcccaggactcctcccctgaccctcttcaacctctttttctcactcagcgtgactacaacagcagtcactgtagcaatagtcataacagcctctgtttgaacaattcccctgggtttgttcaaacacacactgcctcattcagcagccaccataaataactgttcccattgcacagatgtggaaacagaggcccaggaaaagaggcaagtctgccaatagacagaggtgggatttcacctgtggctgactcacttgaaggctctgaggcaggctgggtgcggtggctcacgcctgtaatcccagcattttgggaggccaaggtgggtagatcacgaggtgaggaatttgagaccagcctggccaacatggtgaaaccctgtctctactaaaaatacaaaagttagtcaggcgtggtggtgggcacctgtaatcccagcaactggagaggctgaggcaggagaatcacttgaacttgggaggcaggggttgcagggagccgagatcgcgccactgcattccagcctgggtgacagagcgagacttcgtctcaaaaaaaaaaaaaagctcttagcctcgtgtttttctttttttttcttttgagatggagtttcgctcttgttgcccaggctggagtgcaatggcgcaatctcagttcaccgcaacctctgccacctgggttcaagcgatcctcccacctcagggagtagctggaaatgcaggcatgcgccaccacgcccggctacttttgtagttttagtagagacagggtttctccatgttggtcaggctggtcttgaactcctgacctcaggtgatctgcccaccttggcctcccaaagtgctgggattacaggtgtgagccaccgcgctcagcctgttttttttttttttttttttttttttttttcttgagacagggtcttgctctgtctttccattcatgaacattggttgtcttaccatttaaatatgtcacctataattgcaagaatattttgtagtttttggattggtttcttttttagatgctgtgtcacccaggctggagtacagtggcacaatctcagtttactgcaacctccgcctcccaggttcaagtgattcttctgcctcagccttctgagtagctgggattacaggcatgcgtcaccatgcctggctaatttttgtatttttagtagagatggggttttgccatgttggccaggctggtctcaaactcctgacctcagatgatcctcctgcctcggcctcccaaagtactaggagtataggcatgagccactgcacccagccccagagtgtatgttttgtacttttttggatcatgtttattccaagtgtgttattctttttttttttttttaagacagggtctcgctctgttgcccaggctggagtatagttgcatgatcattgctcactgcagcctccaactcctgggctcaagcaatcctcccgtctcagcctcctgagtagctgggaccacagttgtgtgctaccatccctggtcaatttttatatgttttgtagagatgggatctcactatgttgccccaggctggtgttgaactcctgggctcaagtgatcctcccaccttagcctcccaaagtactgggattacagatgtgactcaccatacctggcttagcctagtttttaaaaagcatcctccattcattccagcacacattcccagtgcccagttgtgtgtgctgggtgatgttggtgacacagtgatgattgagaccacctctgctctgccctctgtccacagtagggcacacaatcctgtagggtttgggggggcagacccctctcacacaattatgatccagagtgatcagggctgggatggaggagcccaggagtctgggagagcccaaggagacacacctcattcaacctgacggctagggagggcttcctgggggagggggcatctgagctgagacctggagtaagagtagaaatgaggcagatgatggggtgaggcagcatgaggtgcaccaggcagcataaatagcaatgcaaggatgtggaggctgagatagtcatcaaggtgtattgaggaggttgcaatatcttgggtgagtggagccaggaaggagggtgtggggcctgtgtgtgtgaggctgggaggtaggagagatcaaatgtgctctgttggttggatcaacagagcttggataatggagggtctagtgttatgctgtttaatatcatagctattagt

SEQ ID NO: 1560147 - DNA, 4001 bp, Homo sapiens
agcactgatggggcctcatcatacccacccgagacaggaagcctctctgtggaaagcctgccatggccccttccctctggctttcttctcacagggtcctgccgttgtcctaccaggaagaggcaacacttacagactcactgtggatgcggctgataactctcagcctcccaggactacagagcccctgcacccttccagggttagccaggaagcgccggcccagagaaggagaagctggtctcagggacacacagcaaggctgggctgagccctcacctctgcacatgacctgttgcaaaatcatgtcttcacttccaaaatacttttttcatcaaaatattctagtttctgccttttgtctcagatgccttctaggcagaaatttcacatccatccccatcctgatccgtggacctggccgctcagggctggcacagcctccctccacctgtctctcatctgcttgtctgaatctctgtgatactccaactctctccccgcgtttctgaatctatttctggctgtgtatttacccagttctttccctgtctctttgtcctctgtctccctctctttctgccccttcctgtttttcccactggtatctctttctttcttttctttctttcttttctttctttcctttctttctttcctttctttctttcctttctttctctctctccctttccctctttctttcttctttttcttttttttgacagagtcttactctgtcacacaggctggagtgtaatggcacaatctcggttcactgcaacttctgcctcccaggttcaagcaattatctgcctcagcctcccgagtagctgggattacaggtgcccgccaccacactcagctaattttcgtatttttagtagagacggtttcaccatcttggctaggctggtcttgaactcctgactgcgtgatccacccgccttggccccccaaagtgctgggattacaggcgtgagccactgtgcctgggccccactggtatcatttctaaggttattttttcaccctttgtctctgtctctgtgcgtatctcttctccctgtatttctctctctttctccctgggtctctggttctgtggctgtgactccatctttctctgtctctctctctttctctgtgtacacagacacacaaacacacatctttgtctttctctcttgtctctggtctctgtttatgtctccttctgtcagtctcttgcatctgtatttttttctgtctctgtctctctgtgtctgtttctctctctgcctctgtcactctttcctcaagtatacacacacacacacacaccactgacaaatatacatatatctttgtctctctgtctctggtctctgtttatgtctccttctatctcttttgtatctatgtttatttctgtatttctctctttctttcttttttttttttttttttttgagacagggtcttgctgtgtcactcaaactagagtgctatggtgtcatctcagctcactgcagcttccacctccgagttcaaggttcaagtgattctcctacctcagcctcccaaatagctgggactataggagtgtaccaccacacccagctaatttttgtatttttagtagagacgggggtttgccatgctggccaggctggtctcaaactcctggcctcaagtgatccacccacctcggcctcccaaagtgctgggattacagatgtgagccaccacgcctggccctatctttatatctgtatctgtctttatttctgtctctgtctctgtgtctctattttttttctctgcctccatctctttttcctcgagtgcacacacacacacacacacacacacacacacacacacacaccgctgacaaatagatgcatacaacctccctcctcccgcatctgaaggaagcagggcactcacctgaaagcaggattcccatccagtggtgtccccatgagtcagcaggccccatgggtcccggcacctgacttcagtgtgccaggccgtctgtcgccccggcttgcacacacagatacagtcctcactccaggtgcagcccctccacctcccttctctcctctcccaccctgctacaaactcacacacacactgcagtaactgcagctcccaggacagacaggggtggtggcaggaaagtaactttgaccccacctctgccctctacccccagggctcactttccttccctgcccagcacaaagagcgggaagtccaggaaccctggagaccgggaactgcgattacgatagtcaatagcaatgataataaaaaacaacaatgaccagctccttgtccccgagagcttaataaccagtcccagtgccaagttcattataagcagccaataaatattaaatgagccggaatcatgcttgtgatatagatcctggtcataaacaaaagctctggagtcagaccggcaggaatctcagactgagcaggactgggggacctccaggaggagcctgacgtggtcttgggagaaggggcagggagggcctcctggaggagtggacatctgagctgaaacttcgagaacatagtaaaggttccatatataaaagttacttaaaaaaaaatctctatgacaagacaagctggtggtctttgacagtgtatagacctagacccagaagatttaacagaaccgaccagctgagggaactatcattaatccatgtatccatccattaatttaacaaatacttcctgaattctcttccttttttttttttttgagatggagtcttgctctgttgcccaggctggagtgcagtggcatgatttcccctccctgcaacctccacctcccaggctcaagtaattctcctgcctcagcctgcctagtagctgcaactacaggcgtgcgcctccacacccagctaatttttgtatttttagtagagacggaatttcaccacgtagcccaggctggtcttcaactcatgagctcaagcaatccgcccgcctcagcctcccgaagtgctgggattacagacgtgagccgtcgcgcccagtcctgaattctctcctatgctgacccctgctcctggtggtactggggacacagctctgactaagacagccccaaccctgttctcacagaggctcacagtccagtgggggagacagaactgtccccagacagtgacaacccagagtgggcagggctgggatggaggaattcaaagggggcgcctggctcagcttcaggatcagggagagcttcctggaagaggggacatggtagctgagacctgaacaacataggggtgagccagggggagcagcatgtgaaaagtttttgaaattggggcacagaaggaaggtcaggtgggtctagaatagaggaagtgagagaggatggatgattcaacaggcggcttagaaaactctggaactgttacttagggtatgaggggcagcttggcattgcaagaaagagatcgtgactcactcagctgcctcgttttgctgccctgcttccgtcttgctcctgctacaggcagtcacaaagtatctgccctgataaagcataaggccgagccagctggctctggagccagagtgcatgggttcaaatcctgactccccgacttgctaactgggtggcctcagcaggtcagctcccctctctagggactactttcctcagctctaaaatggagatgatgcccaggcacactggctcacatctgtaatcccagcactttgggaggctaaggtgggaggatcacttgagcccaggagttcaagaccagcctgggcaacatagtgagaccccatctcaattaaaataaaataaagcagagtagatgatgatgcttttgtctcctaggaagctctgtggttatgagcacttgacctcagtgtgccaggccatctgtcacccttgcttgtggcaccatttacaagcactaggctagctggctgcctgggctggcaagacagtcctttacatcccagcc

SEQ ID NO: 1560148 - DNA, 4001 bp, Homo sapiens
gcctgggaagtttgtttgtctgtcctctccactctgactctcaggtgaaagatgaggctctgcccttgcccagatggggctctgggggctgagccctgcctggtgaccagctctaggaaccacggccctgggacagctggtaaatccttgctcacaatcagccctgcccaggaagccacaacccagccctggcacaggctccccagggtcatctggagtcaggatcttgggacaggggcctggggcaggggcttcaagggctgagcttctctcagaggatcctcaggccaggccctgactgagtcctataagatctttctcaggtcatgtctatgaggaggaggccaaggggggttggactgagactgattttcccccgctgcatctcccgcatcagactatccttcttgctgtagggaatttccacggagtccggataagggaaaggaattctgatctgttatagtttgtctcccctgggtgtgtcctgcactaaatgcccaaaccccaacatgggacgtaatgcagagggggatgcaggcacagcccaggcctgacaatcctgcgtatgtgaagcagaactgacccccaacacccagaggcacggaggaatcactcaccgtatacacggagatggtgagatgcctgttcaatctgagaatttctgtatgtgacttgtaggttgtagtatcccgtgtcctctagggtgacgttctggaaatgcagatctccactgggtgatattgtctctcgaccgctgtatgcaggccctggagtcctaacgtgagtgtctattacatatgctgcgattagctggttgggctccaccgttttccctttgtaccagccatagctgtaaagattctcgggcagataaaccacagagagatgaacattctccccttcagcaacttcaaagggcgctgatgcaataaagagccaggcagtggtgggtgcgttccagaaagttaaaagtgaggctaggaaagggagagaatatcagtcaatatttgacctatgcattggcatggaaagacggggtcctgggtgcaggtctcttcacccctcagccttagagggtgtgtgtgtgtgtgtgtgtcctactgggtcaaagtcagcagcatgaccctcattccttcagtacctctgaccttggcatttccttgtgtgaaccctctttcccaggggtctgcatggttccctccccactgccttcagttcctactcacacaagggaatccctgggagacttctttcgtgaagcctcctctagagaccctgggtcttccctttctgacctttcccagctctgttccctccagggctcttgtcagcacctgacctcacattctagatctctttgggtgtctgtcttcccccccatgagattgtgagctctgtgagggcatggacttgagtgatgttagttgcaccccagtgcctgggacaggctgcagactcctgtggatgagttcatgagcgttcccagggccttccatatcctggggtttatttgctaatgtctgaggttggcagatgaagacagagtttcatgccctggtggtgtttttatttaaattgtcactgtgatatagttttactatcattttcaaagtgtagtggccactgacaatgaacttgaaaacatggaccaactgagattgttttgccccttggcaattccagttcacttagattttttggttctccttagacgctctctcccctgagtctctaacaaaagccctctgtctcctctcagagccccatcctccccaggagaccccagccagtctctgtgctccctcctcccacccactcccagggagtcctcccctcacctgtgagcaagagcccctgccaggggatgcattctctgtggggacaagctgaggggggccccatggtctctgctgcctgctctgtcctcctctgtggagaggagcttgggctccaggaacgctctagacagggttactgtgactgttgtctctgctgtccttccttcctctatgctgagcttcctctcaggcaggagcacttcccgtttatgggcaagggcggggctctgcctacaatgtctctctgtcccctcccctctcagtcctgcctcccttgtccctcctttctccttcctttttgcctatatttggttccctaggcaaaactttgagaagcaacgctgatggggtcctcataacaggacgacccactctccccagtactgacctctgctgtgttctggccttggttctgtcacagccggtagattatttccctttgtgacacacaaaaccagctgggccctgggtctcctcatgctctccagtgctccaggaaggcagaatgatgcccagcaggaaagtgacagaggtggctctgggggctagaaaggggctcactgggtgatggctgggaaggacccacccgctatcttcagtgtcaccagcctggcctctgacccagggacagagacccaggcctggaggtctcgggaggatccccagctcctaggtgtggagggaggtgtcctgtgtgtcctgggaagagaggactttgatggaaggaggtgggaggctctgggttctgctgtccttggtgaaggtttcagggggaccctctccgtgtctggggtctgtgcccccagcttaactctcattctctttgcaaatacatatattttgtggatctgcagttgcctgaactgtctcatgtccctaaatctttgtatccctttttacagaaggtcaggaagggtgtgtacatgagtatgaggactatctgatcagggcgagtgtttgtttcccaaagatctctttagatatggtataatacataagataaatgtactgaattagcaattttaagtgtagaattaaatgatactaattctattcacaatgttgtacaaccatcaccataattttttaccagaaaatcttcattataccaaatggaaacttcatacttttaatcaataactccccacttccccctgccccacccactggtagcctctgatactatcaatctctgtgaatttgcctagtttacatgtctcatataataaggaattatatacgtgtattatttttttctggattatttctcttagggtaacacttttaagattcatccacgtcgtagcatatattacagcttctttcctatttatggctgagtaatatcccaatatatgtttatacctcaattttaattcattcatctcttaatggacatgtgggtggtttccacatttttgctattgtgaaaaccgctgcaatgaacttacacttggaagtatctgtttgggtttctgtgttcatttctttgggggtacatataggagtataaatatggggtcatgtggtagttctatgtttaagtttttgagaaacagccaaactgttttccagtttgctgtgctattttatattcccatcagcaatatacgagggttccattttctctacattcttgtaaacacttactatttaatattttttaaaacttatagccattctagtaggtgtgaagtgatagctcattgcagttttgattttcatttccctggtggctgatgaagttgagcattttttcatgtatttgctgacaattttaatattttttagagaactatttattcaaatcatttgctgtttaaaaaaaatgggttatctttttattattcagttgtaatagttctttatatattttagatacaagtcccttatggggtacatgatttgcaaaatttttctcatattctgtgtcttctcactttcttcatggtgttctttgaagcacaaacatttttaactttgatgaagttcacttatctatttttaattttgttacttatgctcttgatgtcatattgaagaaaccattgcccaatccaagatcattaagttttactcctatatgttcttctaatggtttgataagttttgctattccatttaggtttttgaaacattttgagttaacttttgtatggg

SEQ ID NO: 1560149 - DNA, 4001 bp, Homo sapiens
tcggcacacaacccagagactcaccccaacatgtgtagcaaatcaccctggaaacaatcatggctgaacgtggtagcccatgcctgtaatcccagcactttgggaggcccaggaggtggatcacctgaggtcgggagttcgagaccagcgaggccaacatggtgaaacctcgactctactaaaaatacaaagttcactgggcattgtggtgtgtacctgtaatctcaactactcaggaggctgaggcaggagaatcacttaaacctgggagacagagattgcagcgagccaagatcgcaccattacactccagcctgggcaagaagagtgaaactacatctaaaaaaaaaaaaaaaaaggaaaaggaaaagaaaaaaaaaatcatgaggcaacattgcatttaacaatattttatttatcaaaagacacttgtctttctcaggtaagtgaaggtctagagatgaaacgagtcccgatgtaaattgccccatgggcattgctgagatcacaagatcatcactgcagcatgcagcacaatagtaaatttctcaggatggaagttcaacaatccaaaaggtagtattttttttcatgatgctcagtccatcatacgaaataaaaataaattccttttcatgatcatccattcagtagaaaaaatgatagtaaatttgttctcatgaagatttttaccgtaacatataggatttatcgttattattattattctttgttttttgtttttttgaagcggagtctcactctgttacccagtctggagtgcagtcgtgcgatctgggcacactattaacctccacctccagggttcaagcatttctcctgcctcagcttcccgagtagctgggattacaggcatgcgccaccacacccggctaattttcgtatttttactagagatggggtttcaccgcattggtcgagctggatttgagctccggacctcgggtcatccgcccatctcagcctcccaaagtgctgggattacaggcgtgagccaccgcgcccggcctcaatttatcattattcacgcatccacaaactgggttcttatattttgtacgtgattttttccattgaggagagatatctgtgcatattcatgctgctcatatttcatccacaaactcggttcatatttcatccacaaacataattttttccgttgagaagagatacttgtacatatttatgctgttcaaattcacatttcatcattcttttacaagaaatagataatgtattttaaggttttccagtggtattacagatattttactgggtgtatagatagaaattaaaccaaacttctttgttctggccgccagtcatgcatcctgttttcaacatagttcacatacaactggttgtgtaaaaatgaaattattttgtttagtacaatcatcaacagttggttgattagatttttaattatcaagttaatcattgtcattatgcttctcatcgcactcgtcattaattgctgtgggaggaaatttgttatgttccctatgagagggtgtatcacaaattcaaataagaattcaacgacaatggactgtataaaggaaataagcaagtccatggaaaacatatttttttccggaaaggattaaaatatttttaaaaaggaattaaaaaaaaattgggcacggtggcaaatgcctagagtcccagctgctcaggagatggagacagaaggattgcttgagcccaggaataagttggaggctgtagtgaacagtgattccaccactgtactccagccagggcaatagagggaaaccctctttctaaaaagacaaaaagaaacaaaacaaaacaaaaaaacaccacatcaaaaaacccaacaacaaaatgaaaaaccaaataacagcaatacaattggagctattcgatccaaagaagtaaatgaaacataaagcaaataaaagagaaaagctaatacctgtgtcctgcaggactcagtccaagttctgctctgactccctcctggtgagccaccccttaaaaagtcacttggggcggggttactttgacagacagtcttctgtcaaagagggaggcggtaaatagcacttttttttttttaatttaacgcctttccaacaaattagcggctatgttgtctaagagtgcaaatgtcagaggtgggtacaggcagcaagaccctccccacaggggcagcagaaggaggaatgactaagggaacaagactttagtgtgctcaactacacaggacaggaaacagatgctttttacaaaagctggtggacttgaaggcagaatattttcaagttcctgtaactgcgaactatgacctgtagcctgtgagagtgactttctgtggcaaaggagcttttgtgaatgtgaggaagttaattatcttaacagtgggaggttctcccggcttatctagctagaccctcgtgaaatcccaagtgtccttaggaaggggaagcagagagagatttgagtccagaagaggaagaaggtgatgtgaggcccagtaggggaacaaagggcgatggcatgtaaacacttagcccccagaagtgggagagggctggggttcatcacaccagaatccctaacaatcagccttattttaattacccttgaaatggaaggaggccttagagagccagaggcttggaggggcaccctctgctgcatacacagatcccaactgctgtgggctccaaataattgcaccagggaaatcacaaattatcaaaaataaaggatgtaaagcttttaaaaaatattaaaagcccaacaaataaaaaaagttctaaatctataaaattgacctcagtctgtatatttagatgagtcatgtgtatatagcgtttcacttcaaaatatatgataaatctctcattcattggcttaaaaataaacacttcaatcaagtctttatcagaaaaattgaaacgttaactcaattgccttttagttcatgtgactttacaaaacttaaaacaataaagtcagttttaaaaattattagtaaagtaaaagaaaaatatcttcacaatgtagacattttgtccacatgagacatgtgaaatattgccattactaaatatttgcaggtcaaaaactgtttccaaaacattttaaataatcatctggcctgtctgttttagagcattcaattctagctgaggtctggggacatgtgaaaggagccacggcccgactccgtgctgggaagagtcagacattttccacagctctgtcctttgctgtgggctctgcaactcctaccaattaaaattgcttacgtttttgttttatttttactaaagaggggttcctaaaagctaacattatactgagtatatgtaactaaaactactaagaaaacaatttcacaattatacaaatgtgccaagtaaatgaaaaaataaactgtattttaataaaggttataaaaagaaaaacatatagtggtgtgaggactgtctcaggtcttcactgagcaagggatcatgacattctatggcggacagctgaccttggctttctgctcctcttgattatgtctactaagtgacatacttactctttttccacctgtcttgcctctaagggtaacaggttttatgagatccctcctagtgctttgcaggtcagcctccctttgctgcattccaattttactgcctataccctccagctggcttttgatgacaaaagtcctggtcccagccattctcagattctgtcatccccgtgggcactatggagctcagcactatgggaggttccccaaaaatctcgttttctatgaggaatggccaccacctgcatctcagtgatgctagtgacccctttcctactcctgtgctcactggtcctcatgaagatcctggttggtctgtagccccctatttttcctattaaagagaaattacagtaagaccaatttgtgtgcaaaatcaattttaggcttattacacttggcctgataattt

SEQ ID NO: 1560150 - DNA, 4001 bp, Homo sapiens
cctagtaatcttgtccatctgttcactccatgctgagtctcaggtaaaggatgaggccctgtccttgcccaggagaggttcttggggctggaccctggctggtgaccaactccaggagccacgaccctcagacagctggtaaattcttgctcccagtcagccctgcccaggaggcctcactcagccctggcacaggatccctagggtccccagggtcacctggagtcaggaatctgggacagggatttgcacaggggctcagttctgggaagagttgagcttctctctgagaatcctagggggacccctcaggccaggccctgatccagttctccagggtctttcttagggtcaggtccatggggagaccatggggttcttttctgacactgaccttgccctgctgagtccccccatcagactgtccttcctctgcagcgagtgtctgcagggtctggatgcaggaaaggaattctgatctgtggaagtttgtctcccccgtgtgtgtcctgcactaaatgtccaaaccctgatacagaatgtaatgcagagagggccacaggcacagcccaggcctgacaatcccatatgtgggaagtagaactgacccccaacacccagaggtcatgtggaaatactcacggtatacatggaactgtccagttgcttcttcattcacaagatctgactttatgacttgtagggtgtagaatcctatgtcattctgggtgacattctggatcagcagggatgcattggtgtatattgtctctcgaccgctgtatgcggcccctggggtagcttgttgagttcctattacatatcctacaattagactgttgccatccactctttcccctttgtaccagctgtagccaaaaagatgctggggcagattgtggacaagtagaagcacctccttcccctctgcgacactgagcggcatggattcaatagtgagcttggcagtggtgggcgggttccagaagtttagaagtgaggctaggagggagaaagcatcagtcaatattgggacccatgtattgggatggaaagatggggccctgggtcctgagagagtctcttcacccttcagccttggagagtgtatgtgtgtcccacttggtcaaggtcagtaacgtgacctttctttcttcagcacctctaaccttggcattttcctgtgtggaatccccttccccaggggtctgcatggctccctccccactgccctcagatcctgctcacatcagggcatccttgggagatccctcccctgacacctcctctagagaccctgggtcttccctttctgacctttttctgctctgttccctccagggctcttgtcaacacctgaactcacattctagatctctttgggtgtctatcttcatctctgcaagagtgtaagctctttgaacacagagacttgtctgatatttgttgtacgccagtgcctaaaatttgattgcaaatactggtggatgagttaaggagtggtggttattttgcaacttgtggttggtggtcaaagacaggttttagtgccctggttatatttttatttaaagtatcaccctgatgtaattcttattcttatcattttctaattgtagtggccagtaatgattaacttggaaaacatgatcaatggattttcctccctcttatcaatcccagttcaatgtgattgtcttgttgtgacccgtgtccctctctgatgttctctcccctgaggcttcagcagaagccttctgtcccctatcagagccccatcctccccaggagaccccagccattctctgtgatccctcctcttgcccactcccaggaatcctccactcacctgtgagcagaagcccctgccaggggatgcattctctgtggggagaggctgaggggggccccatggtctctgctgcctgctctttcctcctctgtggaaaagagcctgggctccaggaatgctgtagtcagggctactgtgacttaggctctgctgtccttcctctttccatgctgagcctcctcccagggcaggagcactttccagggtcatgggtgaagctctgcccaggtcacctctctgtcccctcccctctcagttttgcctcattttctcttcttcctttctcccttctgtctacatttgagttccccagaccaggctctgagaagcaaggcttacttggatccctgtttcataacaggatgaccctccctccccagcgtggacctctgctctgccttggccttgggtctgtcagcaccatgcagagtccctggggtccctgaacctggtgttattttctctgtgacggagaaactcctttgtgtgtgcagggtcttcttactgttctcacatgtctgggaaggttggatttactcccagcaaggaggtcacagagatgtctggggtcctacaaatggatatatctagggctaaagcccggatctaagattctgagctgttctttctgcagcattatgtgactctaatttcctgggagtaactgagaatgaggcttcacagtgctgtagctttatgtcatccagacaccagacatttctaggctgactttatgattttctctctagcttgtaccacctttattattatatatttcatccttttttctaaataaatttagtttacaaaacatcctgtcctagcagggatcggtggctcagatctgtgatcccagctactcgagaggctatggtgggaggatggcttgaggccaggagttggagacaaaacatccttgtcttatgcaatattgtccatgaaattacagatttgatgtgtgcttaaatgttttctcaatgtatattaaaataaacgcataagtattaaagtttttaaaaagcttacttacgtttcgcctaaaatcagtttttggaaatgctgacacagtggcataaacatgaactttatgtccagatgtacctggggacagctaatggttctgtcacttaactatgttgacttggacaagtcacgtggcttctatgatccttgattccctgatttgtaaaaggaggatggtaaaatcctccttgcagagttgttgggaataagtgagctgctgtgggagccccgtgcccaggcgggtgttgagtacatggtggttgtcatcgtggttattgctgtggaattctggttttcaaagagtgtctacgccggaatattgggcttgtggctttctgctgatgtggatgtgtgaaaaagctacttttgcttgttagaacttgtggtgcatctgtcattattttcatttcccagttccactacctattttctctgtgatgttggtcaagttgcctaacttttctgtgcctcatttacctaatttgtgaaatgtgggtaacagtacactagtgtgggtgtgttatttcccagctctgaccactagagggcatagaagcaccggcacctactagcaatgggcatatgggcgcccatggtctgtaaacatcattctcccatgaaaggaaccagggttccctggagaaatggctgattccagggctggggcaggaaaccacaagaggagactggagcatcttgcggggcctgagagtaaggcacaacttgaaaaatgatggggatgtgtggaaagtatcacaaatgccaactagaagaagctcccaatggccaatttggggacaatatagcaacataatcaataataatagtaatgtagtccaaccgataaatacttgagagtccatgctgatatatatataaataagtgaatacataaataaatgagaaagaagaactagctctttcttacagcagcgttccagttaatcagtgtagaagcaatgatggaagcagaaaatcactggctaacaccacagtaagaattgtttatcggctacaattatctctggattctagaaattaattggtaaaagtatgctaagaacaaactggctatttgcatatttccaaagtacctgtccacaagatacttattaattacaatgag

SEQ ID NO: 1560151 - DNA, 4001 bp, Homo sapiens
ctgtccttgtctagatgagactctgggagctgagccctcactgatgagaagcttcaggaaccacagcccgcagacatctggtaaatccttgctcccagtaagccctgcccaggagaccacaccccagccctgacacaggcttcccggggtcacacggagtcaggagtcctgaggctgggcttttgtgaggttcccaggacgccctcaggccaggccctgacccagttctccagggtctttctcagggtcaggttcatggggagggcatggggtgcttggctgagactgacctccccctgctgaggcccccccgcccccgccatcagtgtctgcagggcctggatgcaggaaaggaattctgatctgttgaagtttacctaccatgtgtgtgtcctgcactaaatgcccaaatctcaacacgggacaaaatgcagagggggatgcaggcacagcccaggcctgacaatctcatgtgtgtgaagcagaactgaccgccagcacccagaggtatgggggaatcactcacggtgtacgtggagctggccagttgcttggtcagagtcgtaactggcatttatggttcgtagggtgtaggatcctgcgtcctccagggtgatgttttggaacagcagggatccattggggtatactgtctctcgaccactgtatgcggcccctgggatatttgcttgaatgtctgttatataaccagcaatgagagggctcccttctgccgttttccccttgtgccaataataggcttgaatagtttctgaaatattgcaggccagtagaagaacatcctttccctctgcagcactggacggcagggcttcaatagtgaactggacagtggtgggcgggtgccagaaggttaaaagtgaggctaggaggtgaagacagcatcagtcaatactgggacctatggagtgggatggaaagataaggccctgggtcctcagcaggtctcctcatccctcagccttggagtgtgtgtgtgtgtgtgtgtgtgtgtgtgtgtgtgtgtgtgtgtgtgtgtgtgtgtgtgtgtccctgggtcagcagcatgacccccattccttcaacagcttggaccttggcatttccctggtggaatcttcttccccaggggtctgcacggctccctccccactgccctcagatcctgctcacatcagggtgtttttgggagacccctcccctgacacctcctctagagaccctgggtcttccctttctgacctttcccagctctgttccctccagggctcttgtcagcacctgacctcacattctagatctctttaggtgtttgtcttcctccccatgagagcgtgagctctgtgagggcggggacttgtgtgatcttggttgcaccccagtgcctggcacaggctgcagactcctgtagatgagttcatgagcattctcagggcctccaagtcctgaggtttatttcccagtgtctgaggttgttggctaagagcagtgttttatgccctggttatgtttttatttgaagtgtcatctggtatagttattatcatttttcaaaatgtagtggccagtgatgattaaccaggacgagagaacacttgagattttcctgccttttaccaattccagttcactgagattttcctgttgtgacccctgcccctctctgatgttctctcccttatccagcctccaacagaggccctcagtcccctctcagagccccaggagaccccagccagaagccctctatcccctcctacccaagagaccccagtcagtctctgtgctccctcttcccaccactcccagagagtcctcccctcacctgtgatcaggagcccctgccagggcctgtgccctccacggggagcggctgagggggggcccatggtctctgctgcctgcttgtcctctgtggagaggagctgggctccaggaacgctcttgtcagagctgctgtgactgtcggctgtcggggctgctgaccttcctccttctgtgctgagcctcctcccgggcagaagcacttcccagggccaggggcagaggcggggctcttcccaggtcacccctctgcccctcccctctcatttctgccttttttgtccctccttcccctttctcttctgtgtacattacagtttcctaaccacactttgagaagcagggttggtggagtcccctgtccccagagagggtgacttgtcacccctgcactgaccctttgggaatgtcaccacaaacagaggtactctggggtctcccaaacttggggaactgtttccttttgtgacacagagacccagctgggcccccaggtctcctcatgctccccaatactcagggagtgtgagatgatacccagcaggaaggtgacagaggtggctctgtgggatagaaaatggggggcgactacgggggggaccagtcctctctctccagtgtcaccagccttgcctctgacccagggacagagatccaggcctgggggtctcaggaggatccccagctcctggatgtggagggaggtgtcctgcatgtcctgggaagagaggactgtggtggagggaggtgggtggctctgggttctgctgtccttgaggagggattcagggagatcctccctctccgtttctgttggctgagctgtggcttagggcctgtgcatgttctcccttaccatcccgggtggcctctgtcctctgtgaaggtgattgtcctgttgtcactgtaccttccccatgcatgataccaggagaaagtggagaactgagcagagaatcctggcagagcaggatcctcagaggctccaggaaggatcaggagagacagagcaggcacatgggagggactggaagggcctgctggagcaaagtatggaaaccaggcttcacctccacctccttagcaaagccagattcctgtccaggggaatccatttcctgtgttgtctgcgtgcaatgttgcccctggagagcaagaggaaccctgtggtaaaagtcaggggcttccccagggatgctgaccagggtccacgtggtatgagttggccctggcccctgggcagaggtgggctctgacctccagactgcagggtcaggtcatccttggtcctgttcactgtgggtccccaggatgtccaactccatgcagtgcaggatgagctcagggagaggacgagagttgtccagagcactcctggtcctgatttgggagaactgtcctgcaggcggatgggctgcctcagaaagagccatccgtccccaaggtttcaaaagaagggcccagggaggtgtctctgggggtttagagagagggcactggcctgggaggtggtcctcggtgtgttctgtgttcctccatcacaacactgggagttccgcctccaggtcatctgtgtccctgtctgtcacctgccccaggcctctccacagggcccaggagctggggcagctcctacctgcaggctgcaagggatacctggttcctgtattagagcaggggaggccccgtgaccctcagtccctctgagatggaaacaaaggcagatcctgggttatcctgtcccctcctgcaggagaagttcccctggatcccctggtgaaatgtctgcagggaccataggcagatgtcccaaatactggggatctcgaggctggggaatcactccctgactttcttgtggtcattctgccctggtggaagatccacctgggatcgaatatccggagtttgtgtcagttttggtgtgtttgtgagaaagacatatgttagagcctggagggaatgtcagtgaatgatgtcagggaatgaattgggtttgcccctcactgttagaaagaccctgaattccctcccgatgctactagggtaaaagccatgttcttatgctcatttctctaaggaaatgcaaatagagtttattaaggcgtttctggccaactaaggtggattttgtcatgtagacacaatatagaccataatacatgtacatatgcaaa

SEQ ID NO: 1560152 - DNA, 4001 bp, Homo sapiens
ggctctgtccttgtccaaatgagactctggggacagggaacaagtgtggccagaaagtccgattctgcatccagaatccagctccaggagccacagcccttggacagctgctaagtccttgcttccagttagccttgcccaggaggccacaacacagccctggcacaggctcccctgagtcacctggaaccaggagccctggggctgagcttctctgtgaatatcccaggggtccctcaggccaggctctgatgcagttctccagggtctttctcagggtcaggtttacggggagggcacggggtgcttggctgagactgacctccccctgctaagtcccccacatcagactgtccttcctctgcagtgagtgtctgcagggtctggatgccggaaaggaattctgatctgttgaagtttgtctcttctgtgtgtatcctgcactaaatgcccaaaccctaacatggtgcgtaatgcagagggggccacaggcacagcccaggcctgataatcctgtgtgtgggaagtagaactgacccccaacacccagaggtcatgggggaatcactcacggtatacccggaactggccagttgcttcttcattcacaagatctgactttatgacgtgtagggtgtagaatcctgtgtcattctggatgatgttctggatcagcagggatgcattggggtatattatctctcgaccactgtatgcgggccctggggtagcttgttgagttcctattacatatcctataatttgacggttgccatccactctttcacctttgtaccagctgtagccaaaaagatgctggggcagattgtggacaagtagaagcacctccttcccctctgcgacattgaacggcgtggattcaatagtgagcttggcagtggtgggcgggttccagaaggttagaagtgaggctaggagagagcagagagcatcggtcaatattgggacctatgcattagggtggaaaaatggggtcctgggtcctgagcaggtctcttcatcccccagccctggagtgagtgagtgtgtgtgtgtgtgtgtgtgtgtgtgtgtcctactaggtcaaggtcagcagtgtgtctcctatttccttagcacctctgaccttggcatttccctgtgtggaatctgcttttccaggggtcttcacggctccctccccattgccttcaggtcctgctcacatcagggcattcttgggagatcccttccctgacacctcctctagagaccctgggtcttccttttctgacctttccctgctctattccctccagggctcttgtcaacacctgacctcacattctagatctctttgtatgtctgtcttcctccccatgagagcatgagcttcatgagggcagggatttgtgtgatcttggttgcaccccagtgcctgggacaggctgcagattcctgtggatgagttcatgagggttcccagggccctccacagcctggggcttattttccaatgtccgcggtaggcggatgaggacagtgtttcatgccctggttatgtttttatttaaagtgtcatctgatgcagttattatgatttttaaaaacgtagtggccagtgacaattaactaggaaaatagaactcttgaggttttcctgcccctttccaattccagttcaatttgatttttctggtgtgactcctgtccctctctgatgtcctcttccctattcaggctccaacaggagccctctgtccgtctcacagccctgtcctacccaggagaccccagctccctcctcccaccctctcccaggttgtcctcccttcacctgtgagcaggagcctctgccaggggatgcaccatctgtggggaggggccgagggagactccatggtctctgctgtctgctctgtcctcctctgtggagaagagcttgagttccaggaacgttttgtcaaggctgctgtgactgtctggtctgctgtccttcctccctctgccctgagtctcttcctagggcaggagtacttctcagcatcacgtgggtcatgggtgtggtctttattcaggtgtcctctgtcccctcccctctcatttctgcctcttttgtccctcctcttttttcccttctattttcagttcctcagacaaatcttttcggcaaggtggatggacccccatcccctgggaggacaacctgtcttccccagtgctgacctctgctgtgttctgtccttgggtctgtcacaccagggggattattttcctttgtgacagagaaacccagcagggtcccgggtctccccatgctctccagggctctgggaaggtgggatgatgcccaacaggaaggtgacagaggtggctctgggggctagaaaaaggctcactgggtggtggctggggagggaccagccctctgtctccagtaccaccaaccccgccactgacccagggatggagacccaggcccagaggtctcaggagtccccagatcctgcatgtggagggggaggtgtcttgtgtgtcctggaaagagaggactgtggtggagggaggtgggtgactctgggctctgctgtccttggggaaggctccagggggaccctccctctccgtgtctgttggctgagctgcggctcagggcctgtccatgttctccctgacagtcctgggtggtctctgtcctctgcgaggctgactgtcctgtgatcaccccaccttccccatggtggtaccaggagggagtctggagttgcacagggacccctggcagaacagggtcctcataggacccagaaaggaacagagcaggtatgtgggagagatcagaagggtctgttggagcaagggatggaaaccaggctccacctccacttccttagcaaagccaggttcctgtccaggggaatccgtttcctgagtgatgtctgtgtgcaatgtcaccccctggagggcaagaggagacctccggccttgtctggaactgccctagggatgctgaccagggtcgacgtggtgtgagctgaccctgaactctggattaggctgcagggtcaggccggaggatctattccctgcaggcctctgtcctcccttctgaagctctgggggttgaggcctcattcctggggcagccgcgggcacttgctggcctcctcccatgctggtgccagtgcccctgtgtccacatggaacagactctgactgctgggggccacacggaggtgatatgcttctttttagagatctcccacacatttaaccagtatttatggagcatctgttccgtgtcaggcactgggctgggccctgggattccacagagagcaggacagacgtggtccctgtcacagagttttcctgtaaccgggagacaggcgctcagtgaacttcatgggactgaggagttaatggtaatgacagggctgtgaggtgacagcatagggggcgtcggagcctgtgagagactgagctgtcctggagatcacagggagctgccctgggagacgccctttcagctgagcccggggaaggagggggtgtaggggacaggagctgcctgcagagggcagccgacaggcctcaagtgggcggccgacaagcctcaggtgggcggccgataggctgcagggaggagctgacagagtccgtgtgaggagctcggagggcgaggaggacgtgggccgaggtgacccgggtgagggtggaccctgctgggctgtgggcccggctgagggaggtcagcagcccctggggaggctccagggtgggaggaactctgccgccctctggtggacaggagggaagtggggacagcagcggccccagaccaggctgttttactcaacactgatctctagacattgaacacgggtcatgcacatgttatgccaaagtgctaccaggtttcagctcggtgagccccagtctctgtggctacaagtgtactgtcctccctctttcacaatcagatgtccccaaatgcagatttttgtcaccttttgtgactt

SEQ ID NO: 1560153 - DNA, 4001 bp, Homo sapiens
tgaggctctgggtgctcggacctggctggtgaccaactccaggagtcatggcccttggatagctcacatccttgctcccagccagccctgcccaagaggccaccacacagccctggcacagactccccaggatcacctggaatcaggaaccagggacagggctttgtacaggggctcagttcagggaagagttgagcttctctctgaggggtccctagggggacccctcaggccaggccctgatccagttctccagggtctttctcagggtcaggtccatggggagaccatggggtgcttgtctgacactgacctcgccctgctgagtccccccatcagactgtccttcctctgcagcgagtgtctgcagggtctggatccaggaaaggaattctgatctgtggaagtttgtctcccccgtgtgtgtcctgcactaaatgtccaaaccctgatacaggatgtaatgcagagagggccacaggcacaacccaggcctgacaatcccgtatgtgggaagtagaactgacccccaacacccagaggtcatgtggaaatactcacggtatacatggaactgtccggttgcttcttcattcacaagatctgactttatgacttgtagggtatagaatcctgtgtcattctgggtgacgttctggatcagcagggatgcattggggtatattgtctctcgaccactgtatgcgggccctggggtagcttgttgagttcctattacatatcctacaattagactgttgccatccactctttcgcctttgtaccagctgtaaccaatacgattctggggcaggttgtgggcgagtagaagaacctccttcccctctgcgacattgaacggcgtggattcaatagtgagcttggcagtggtgggtgggttccagaaggttagaagtgaggctaggagagaggagagagcatcggtcaatattgggacctatgcattagggtggaaaaacagggccctgggtcctgagcaggtctcttcacccctccacgttggagcgtgtgtgtgtgtgtgtgtgtgtgtgtgtgtgtgtgtgtgtcctactgagtcaaagtcagcagtgtgacacccccattccttcagcacctttgaccttggcatttccctgtgtggaatgctcttccccaggggtctgcatggctccctccccactggcctcaggtcctgctcacatcagggcattcttgggagatcccttccctgacaccccctctacagaccctgggtcttttctttctgacctttccctgctctgttccttccagggctcttgtcaacacctgacctcacattctatatctctttgtgtgtgtgttttcctcttcatgacagcataagctctgtgatgactgagacttgtctgatgcttgttgtatgccattgactaaaattgattgcaaatgcttgtggatgagttaatgagtgtatctggtggttatttttcaacttctgattggtgagtaagggcagcatttagtttccttgttatatttttatttggagtgtcatcctaatgcagttctgatttctatcatttttcttttttttcaaatggtaatgacaaatgatgattaacttggaaaacatgatcaattgattttcctccctttttatcaatcccagtttagtgtgactttcctgttgtgacccctgtccctctctggtgttctgtttcctcaggcttcaacaaaagccctctgtctcctctcagagccttgtcctccccaggagaccctagccagtctctgtgctccctcctcccatccactccgagggagtcctcccctcacctgtgagcaggacctccttccaggggacatgcaatctgcagggaggggctgaggggggtcccatggtctctgctgtcttctctgtccacctctttgtagaggagcttgagctccaggaatgctctggtcagggctgctgtgactgttggccctgctgtccttcctccttctgtgctgagcctcctctcagggatagaagcatttcccagggtcacgtgggtcatgggtgcggtctctgttcaggaatcctctatcccctcccctctcatttctgtctcttttgtccctcctcctcttccctttctgtttatattcagttccccagaagatgctctgagaagcaagcttgtttggacccctgttccataacaggacgacccgccctccccagcacggacctctgctgtgtctgggccttgggtctgtcagcaccacacagagagtccctggggtcctcaaacctggtgttattttctctgtgacagagaaacccctctatgtgtgcaggatgttcctagtgttctcacacgtctgggaaggttggatttacctccagcaaggaggtcacagagatgtttggggtcctaggagtggacacatccagggctaaagcccgggtctaagattctgaattgttctttctgcagtgttatgtgactctaatttcctgggagtaactgagaatgaagctgcatggtgctgtagtattatgtcatccagaccccagacatttctagaccaactttatgattttctctacagctttaccacctttattattatttacttcatactttttttgtaattaaatttagtttacaaaacatccttgtcttagcagggcttggtggctcacacctgtgatctcagctactcaagaggttgaggtgagaggatggcttgaggccaggaactgaagacaaaatatttttgtcttatgcaatattgtccatgaaatcagagatttgatgtgtgcttaattttttttcctgtcatgcgttaaaataaacacagttaaacttaaaagtttatttatgtttcacctaaaatcagttttgggaaatgcttatatagtggcataagcatggaatttatatccagatatagacctgggctcagctaatggttctgtcacttaactatgttgacttggacaagtcacttggcttctatgatccttgattccctgatttgtaaaaggaggatggtaaaatcctccttgcagagttgttgggaatatgtgggagcccagtgtccaggcgggtgttgagtacgtgatggttatcattgtgtttattgctgtggaattctggttattttccaaagagagtgtctatgctggaatattgggcttgtggctttctgctaacatgcatgtgtgaagaagttacttttgcttgttaggacttgtgcatctgtcattatttttgttttccagttctactacctattttctctgtgatgttggtcaagttgtctaacttttctgtgcctcatttacctaatttgtgaaatgtgggtaacagtacactagtgtgggtgtgttatttcccagctccgaccactagagggcatagaagcaccggcacctactagcaatgggcatatgggtgcccatggtctgtaaacatcattttcccatgaaaggaaccaggggtccctggagaaatagctgatccagggctgggcaagaaagcacaagaggagccttgtggggccagaagtaaacattctgtggggccagaagtaaggaactgcttgaaaaatgatggggttgtgtcaaaagtcacagaaaccaactagaaggaactcccaatggccaaatttgggacaatatcagcgacataataaacaatgccagccactcggggcggtggtttacgctttggcactttggcaggccgagatggacggatcacttgaggtcgggagttcgagaccagcctggccaacacggcaaaaccacgtctctattaaaaacatgaaaattagctgggtgtggtggcagggaccaatagttccatctactagggaggctgaggcaggagagtagcttgaatccaggaggcagaggttgcagcgagccgagattgcgccaatgcactctagcctgggcaacagagcaaaactccatctcaaaaaaaaaaaaaaagggatataaaataagattagattttattttg

SEQ ID NO: 1560154 - DNA, 4001 bp, Homo sapiens
ggctgagtctcaggtgaaggatgaggctctgtccttgcccagatgaggccctgggggtgaccaggctggtgaccagctccatgagccatgatcctcaaacagctcaaatccttgctctcagtcagttcagcccaggaggccacaacccagccctgacacaggttccttagggtcacctggagtcaagagccctgggacagggatctgggacttgtgcttccagggctgagcttctctgtgaggattccaggggactcctcaggccaggctctgacccagttctccagggtctttttcagggggagggcacagaatcttggctgagactgatctccccctgctgagtgccccccatcagactgtccttcctctgcagcaagtatctgcagggtctggatgcaggaaagggattctggtctgtagaagtttgtctcccccatgtgtgtccttcactaaatgcccaaactccaacactggataaaatgtagatggggacacaggcacaacccaggcctgacaaccccgtgtgtatgaagtagaactggcccccagcacccagaagtcatggaggtatcactcacagaatacgtagaattgtctggttacttcttcattcacaagattttcttttataacgtgtagggtatagattcctgcgtcattgtgggtgacgttctggatcagcagggttccattggggtatattgtctctcgaccgttgtgtgcgggccctggggcattttcttgacttatattttttacatatcctataattcgatagttggcatgcaccctttcccctttgtaccagttgtagccataaagattctgggactcattatggactactagaaggacctccttcccttctgcgacattgaacggcacgacatcaatattggtctgggcactgtttggcaggttccagaaggttaaaagcgaggctaggagggggagagaacatcagtcaatattgggacctatgtattggggtggaaagatggggccctggatcctgagcaggtctcttcacccacccccatcttgaagtaagtgtgtgtgtgtgtgtgtgtgtcctactggatcaatgtcagcagcatgtcccctatcagcacctctgaccttacatttccctgttcggaatcctcttccccagggatctgcagggctccctccatactgctggacctgcttacatcagggcatccttgggagaccccttccctgacaccttctctagaagccctgggtgttccgtttctgacatttccctgctctgttccctttagagctcttgtcaacacctggcttcacattctagatctctttgcctgtctgtcttctgccgcatgagagcgtgagctctgtgagggcagggacttgtgtgaactggattgcaccccagtgcctggaacaggctgcaggctccagtagatgagttcatgagagttcccagggccctccctccacatcctggggtttattttccaatgcctgaggttggtggctagggacaatgttttatgccctggttatgtttttatttgaagcgtcacatgatatagttattattatcatatttcaaaatgtagcagctagtgatgattaaccaggaaaagagaacatgtgagattttcttgaccctttccaattccagtccaatgtgattttcctgttctggtttcctgtccctgtctggtgtcctctcccaaaggacttcaacagaagccctttgtcccctctcagagccccgtcctcccaaggagaccccagccagtctctctggccctcctcccacccactcccaggaagtcctcccctcacctgtgagcaggagcccctgccagggaatgcacactctgtatggacaggctgaaggggaccccatggtctctgctgcctgcttgtcctctgtggagaagagcttgggctccaggaactctcttgtcagggctgctgtgactgtcagctctgctgtccttcctacctctgtgctgagcctcctcccagggcaggagcactttccaagatcacatggtccaggggtggggtctctgctcaggagtcctctgtcccctcccctctcattcctgcctcttttgtccctcttcctctttcccttttgtctatattcagttcccgatacaaagctttgagtagcaaggctgatggacccctgtcccctgggaggacaaccaacctttcccagtgctgacctatgctgtgttctggccttgggtctgtcacaccagggggattatttcccttgtgacagagaaacccagctgggccttgggtttctgctgggatgatgcccagcaggaaggtgacagaggtggctctgggggatagaaaggggctcactgggggatgactggggagggaccagccctctgtctccagtgacccaggcacagaaaccaaggcccaggggtctcaggaggagctacagctcctgggtgtggagggaggtgtctggtgtgtcctgggaagagagctgtggtggagggaggtgtgtggctctgagctctgctgtccttggggaaggcttcaaggaaaccctccctctccctgtcttttggatgtgctgtggctcaggtcctttccatgttctacctgacctggaagcctctgtctggctgacagtcctgtggtcaccccgccttccccatgggtggtgccaggagggaatggggagctgcacagaaacccctggcagagcggggtcttcaaaggccccaggaaggaagaggtgggacacagcaggaacgcgtgaaagacaagaagggtctgttggagcaaggaatggaaaccaggctccaccttcaccaccttagcaaggccaagttcatgtccaggggaattacagctgaccttcgaacacacagatttgaacacacaggtccacttacatgtcgatgtttttttgtttgtttgtttgtttgtttgatttttgttttttgttttttgtttgtttgttttttgcttttttttttttcctgagacagagtctcactctgttgcccatgctagagtgcagtggcacgatctcagctcactacaacctccacctcccgggttcaagtgattctcctgcctcagcctcccaagtagctgggactataggcacccgccaccacgcctggttaatttttgtatttttagtagaggcggggtttcaccatgttggccaggctggtctcagactcctgacttcaaatgatccacccacctcagcctcccaaagtgctgagattacaagcatgagctgccatgcccagccacatgcagatgttttaaattaaaagttgcactgagtgtgtcccctcctcttgcctcccctccacctcttctacctctgccatctctgagacagcaagaccaccctctcctttcctcctcctcagcctacttaacctggagacaaaaaaaggataaaagcctttatgatgatccactgtcacttaatgaatagtaaatatgttttatcttccttatgattttcatagtaacattttattttccccagcttatgttattgtaagagtacagtatataatataaataaacatgcaaaatacattgatttaccgtttatgttaacaataaggcttctggtcaagagtagggttttagtggttcaattgttgggaagccaaaagttatacaaagattttctacggggtcctcagcacccttaacccctgccttattcgagaatcaactgcaatttcctgagtgttctctgtgtgcgatgtgcacccctggaaggcaagagatctgtggtcaaagtcaggggctgttccagggatgttgacgagggtccacatggtgtgacctccaagctacaggatcaggtcaccccaggtcctgctcatggagagtcccaggctgcccaactccatgcagtgcaggatgagctcaaggagaggacaggagttgtccagagaacagcaaatcaagatttggagaactgtccaccagggggataggctgcctca

SEQ ID NO: 1560155 - DNA, 4001 bp, Homo sapiens
tctccactctgagtctcaggtgaaggacaagactctgtccttgcccagatgaggctctggggtctaagccctggctggtgagcagctccaggagccacagcccttggatggctggtaaatctttgctcctagttggccctgcccaggaggctacaacccagtgctggcacaggtttcccagggttacctggagtcaggatcctgggacaggggtctggagcaggggcttccagggatgaacttctctgtgaggatcccaggatcccagggagcccctcaggtcaggccctgacccagttctttagagtttttctcagggtcaggtccatggggagggcacggggtgcctggctgagtctgatctccttctgctgagtccccccatcagactgtcattcctctgccgtgagtgtctgcagggtctggatgcaggaaaggaattctggtctgtggaagtctgtctcccctgagtgtgtcctgcactaaatgtccaaaccctaaagtgggatgtaatgcagagagggacatgggcacagcccaggcctaacaatcctgtgtgtgggaagtagaactgacccccaacacccagaggtcatggggaatcactcacgatgtacgctgaactggccagttacttcttcactcataagatttagctttatgacttgtagggtgtaggatcctgtgtcatttctggtgacgttccgcatcagcagggatgcattggggtatattgtctctcgattgctgtatgcaggccctggggtaatctgttgatttgatattacatatcctataattcgacggttggcatccactgtttcccctttgtaccagttgtagccacgagggtcctggggcagattgtggacaagtagaagaacctccttcccctctgcagcattggatggcacagcttcaatagtgagctgagcagtggtgggcgggttccagaaggtgaaaagtgaggctaggagggggagagagcatcaagcaatattgcaacatatgtattggagtagaaaaatggggacatcagctttggagtttgtgtgtttttatgtgtgtgtatgtgtgtgtgtcctactgagtcaatgtcagcagcacagcccccatttcttcaacacctctgaccttggcatttccctggtggaatcctcttcttcagggttctgcacggctccctccacactgccctcagatcctgctcacatcagggcatccttgggagaccctttctctgacacctcctctagagacactgggtcttccctttctgacctttccctgctgtgttccttccagggctcctgtcagcgcctgacctcacattctagatctctttgtctgtcttcctccccaggagagtgtgagctctgtgagggcagggacttgtgtggtgttggctgcaccccagtgcctgggacaggcttcagactcctgtggatgagttcctgagcattccctgggccctctgcttcctgaggcttatttgccaatgtctgacattgttggctgaggacaatgtttcataccctggttatgctttatttgaagtgtcatctggtatggttattattatcatttttcaaaatgtagtggccagtgatgattaaccaggaatatggaacacttgagatgttcctgcctcttaccaattccagttcaatgtgattttcctgttgtgaccccttcccctctcttgtgtcctctcctctattaaggctccaacagaagtcctctgtcccctctcagagccccgtcctccccaggagaccccagccagtcactgtgtttcctcctcctgtcctttcccaggaagtcctctcctcacctgtgagcaggagcccctgccaggggatgcgccatctgcaggaaggggctgagatgggccccatggtctctgctgcctgcgtgttctcctctgtggagatgagcctgggatccagaaactttctgagcacggctgtcagctgtgctgtccttcctccttttgtgctgagcctcttcccggggcaggagcacttctcaggctcatgggcggggtctgtgcccaggacacctctctgtcccctcccctctcagtcctgcctccctgtccctcctttccctttattttctgtctgtgtttcaggcccctgggaattgctgaggtctctgactccttcagcagtgattctctcacccaacctctgcacacactatgcagacacacacacacagagacacacacatacacaaagagacacacacagtcacacatacaccctggagactgggtgagcacagccctgtgccctcagcatcctgcagcctatgtctccaggtcggggtgcacagtcgctccccctgccctctcccatccccatctggctcttcccttcagatcaggaggtcagcgctccgcaaggaccctgtcacagggacaccaccactgagctttggggaggtgtgtgctcactggtgagagggatcctccccctctctcattgtgtcaagcttggttgcagcttccaaggatggacattcaatgccctggatatcccagaggggactgtccttactggtggtgtgcagggcaaataatctcttatgcctcctgagagagagggctgttctggttggtcagtgggggctgtgggcctagtggtcatcagggacaggtatcagccattctcttgctctttgggttctggcagctgagctggggctcgggccttccatgttctctctgaccatcttgggtgtcctctgttttcgcccggctgactgtcctgtggtcaccccaccttccctatggttggtgcagcaggaagtggggagttgcccaggggccccacaagacagtgctctctgagatccaggagagggagcctgggacagagcaggggctcagagctggagagactcatcccaacttactctgcagccaggatgggctcagccctccccatgctgatatcccctggggtctgtcctaagggtttggacctggtcaggcccctctgtgtagagaaaggatgggcagcggccggggagcccgtctggggggacgttgctcacacctgagagggcaggtaggggtgggccatgttctgggaacaaagggagctcattccttgccccccagcttgtgtacatgagagagcgctgtcctccctcctggcttcacgaaggacagcagggggcaggtggctacatcccagacagtgcctgggcgtgaccatcacatactctccgagcctcctggggtgcagagggaaggtcatagggtgcctggctgattccccagaggcactgtgggccctcaggcagctgtggttctgtcagcgctgggctcagcctgccatgccgtagagaacaggacacacggagcaggggcgggtatttagggagcagtcacagaaagagttgatgaggatggagggaggtcacgaggggaaagcgcccagtgtggcatcccgtgcaccagcgctgccctgggagatgccttaactaggcccagggaaggattgggtgtgtggggcaggagctgcctgcagagggggcggcctcatgttgccggctgcctggctgcagggaggagctgacagagtccgtatggggagcttggagggtaaggaggacgtgggccgaggtgccctggtgagggtggaccctgctgggctgtgggttccgctgagggaggtcagcagcccctgggaaggctccaggctggagggactctgtcgccctctggtggactggaagggaagtgtgggtggccgcagtcccaggtccggctgcgtgttttattccacatggatctgcacatttcacacgaggtcacccacatgttatgtcgagctccatcacattccacatccgtgtttttctctgtggctgattctctggtgtgatctctgagcctgtgttagtcctcctcacaatggtcacagctgtgtgtggagatctaatggggtgtgtgtggctcatgtgctcacacagagtgtcctggggtc

SEQ ID NO: 1560156 - DNA, 4001 bp, Homo sapiens
gagttctaagaacagagctgagtaatcttttcataaggagacctccaagtaactctgaatacactgaagtctgagggcctctgctgctgattcccaatgaatattgagaatggtggactaagtgggtaataggctttgttttaattcaaacttaattcaagtaatgttcattcacgtcagtcacactgaaagcgcagaatgttagaatgagtaaaacaaaatcaaatttttctcaagtttcacctgggaaaataaacctatcaagaattttcctaacccttttgtcccttttctccacagacctagaacccaatattcctccccttgcccaccaaaataaatttttcactcgatttcctcaatgaaggtcaacatttcaaaatagtcacagatgtttctccttggtcctaactctgtttagtctctgggatttgacaattccacctaaaacaaacaaaaaaaaaacttcccatctactcttcctctccatcccaatcccatcgaaatcaccttaggccactatcatctctcagggacactggtctctggtctagcctgcttcctccaacctctgtctccagagcaattgaacactcaaacctgagtgagtcattctcctggtgaaaattcatctctggctccagtctacaggatcaaatccaaggtcctgaccctctctcctccctcacaccacatcttgacagtactaaaccactatctgtatcctaaatggtctgtgctttctcttttctttgggcatctgggaaaatttgttccctaggtctgtcaactccagccgcatcgtgtctccctgcagatcttcacaagcatctagcgcagggtccatgaggaaggggacgtcccctttctgggagtacagaagtgggtcactggagcattagaagaacatcaacatcatctttctaacccaatccttttgaagtgatttacaacacacaaaacaaatagactatttgtaaatgaacatccattaggaggtcatgctcatttttgtcttttttttactgatagagctagaaagccacaaacgcaggaggccagtgtacctatcaatataacaacccatggaaccaaccctcccaagaacgcacaatacagctggaatcgtggctacctgtatttaccattactgtgaccaagtgaggcaatcttagaccacgagaccaaattcagccccacgaggtcctatttgtctttaccaggggctcagcacatagtgtttaatttcccagggatgaaaccatctctccaagatcagacagccttgcagacagacatgatgtgatcttgagaatttaaaggatattctcaatgaagttttgtttccatctactttttttaaaagcaggtattaaaaataactgaaccagccaagtgtgcccaccaaaagcaggaatcaagaagctgaaatatgcttcagctcccttgtaccctgtaattatttagccttgtttacagcaactttttccagaagcagaatcgaccttatgaacagcttatcccaaatactactcaagggctaacagatgaccacatcttaaatatcaagagcttctaggtgtagaatgtcttcgtaaagcaagcccttataggattttcttttaaaattttctctgggagtcacatttctttgggagaagtctgccttaagtgacaacctattcatataagcagtcaattctgacacaactaccaattttggtgtcacccatcaacattgagacctttctaaatcttatacatttcaggatgccagattacagtataaacttcaaacaagaggaaaacccaacacgtaaacctgcggaagagaagcaacacaccagctgccctggaaaacactctcctccccccgcgacacatgcatttccatccttcgcatctggtcacctccgctggctgtcggccctgctccgctccctccaactatgcctgcgaagtgcttcatttcttctctattcgacccgtaggtgttgcgtgttcttctaaactacgttcaacagtaaagtgcaggacattccaacagctccacaaagaagcaaaatattatctctgcaaagtcatgcatttaaaaaccagttgctttccctattttattgatcagtctttgaacttctgaacagattttcgatcaccgcaagctgagcccttctagaagatcaggattctaaagctcgactcggtccaccttctgctattctgggaacacccttcatccccaggggccaatgcgagcctggcgggtcacagcgcccgtttcaccgagagggggccgggctccgcagggggcattccccggccgttcgcgcgctcccggcccgccgcgaggggcgccccgggcagcgcgggggtcgacgggcggcgccgcagcgctgggccgcggccaggaatgagctcagcgtccccgccgggtgttgccggcaggttgcatcagacgccgcgcggcgccgccgcccgcgcctccagcctcgcgtggccttcccgggccagcgggccgtctggggccggggctgggtttccccgagccgggcccgcacccagtcgagcggccggcgtcgccgcggcctcctcctccccgttctcagggcgcccgccgcagcctccttacctgctcctctagcccgcctgcccccaggcggcctccactccgagcggccccgcgcggtgcggcccgagccgacccaggcctcacagcccgcgagtcagcgaggaggagcgacggttacgaaaccggcagcctccgcccgttccgcagccgcggccaccggcttcccctgctcgccggggccgcgcgcgccgccgccgccatcccggccaatgggagcgccggcctgccggaggcaccgccttctctcgcgacgggcagcccagtcgaccaatcgtgggcaggctggcggcgggaggcgggcccacggtgggggagtgggttccgcgcggctggctcggcgggtgtggcgggagcagggagctgcttgctgcggcgtccgcggtccctaggcagctcgcccgggctggcggcggcctagtgctgtggacgactcaagttcgagtcggaggctgaaaagccgtcaccttgtggaggccagacgtgcctttggaagcattttctgaggtggttttgtgaaccaccggcgactgttttggtttcgccgcgtcccttggaagcccccgcggcgtccctcacagagtttctgcgaacggaacgccccgcaggcgggcgggctttgtcgccgcaaaaagagtggaggctgacgcggtggctcccgcctataatctcagcgccgagggaggccgaggcgggagaatggcttgagcccaggcgttggagaaccagcctggacaacatagcgagaccccatctcagttactaatttttaaaaaatcgaatgaacccagatgtttcacacataggattagcattgatgtcacatgggtgaaatccatgtgctgcaggctgtgctttgttgttagggtgagatgaagtgaatttcttaaaatgattctctttgggtgccttccaggtgcatgggtgcgaggtgatctctgaaaataagcagcgatccagtgtgacttaaaactcgccaggagaacccgaaagcgttttttttttttttttttttgagacggagtctcgctctgtcgcccaggctggagtgcagtggcgcaatctcggctcactgcaagctccgcctcccgggttcacgccattctcctgcctcagcctcccaagtagctgggactacaggcgcccgccactacgcccggctaattttttgtatttttttagtagagacggggtttcaccgttttagccgggatggtctcgatcttctgacctcgtgatccgcccgcctcggcctcccaaagtgctgggattacaggcgtgagccaccgcgcctggccccgaaagcgttttaacaccaggaagcagcagctcgctgggcggagggcagaactcgcctgataggtttaattgcttc

SEQ ID NO: 1560157 - DNA, 4001 bp, Homo sapiens
ggacgtcccctttctgggagtacagaagtgggtcactggagcattagaagaacatcaacatcatctttctaacccaatccttttgaagtgatttacaacacacaaaacaaatagactatttgtaaatgaacatccattaggaggtcatgctcatttttgtcttttttttactgatagagctagaaagccacaaacgcaggaggccagtgtacctatcaatataacaacccatggaaccaaccctcccaagaacgcacaatacagctggaatcgtggctacctgtatttaccattactgtgaccaagtgaggcaatcttagaccacgagaccaaattcagccccacgaggtcctatttgtctttaccaggggctcagcacatagtgtttaatttcccagggatgaaaccatctctccaagatcagacagccttgcagacagacatgatgtgatcttgagaatttaaaggatattctcaatgaagttttgtttccatctactttttttaaaagcaggtattaaaaataactgaaccagccaagtgtgcccaccaaaagcaggaatcaagaagctgaaatatgcttcagctcccttgtaccctgtaattatttagccttgtttacagcaactttttccagaagcagaatcgaccttatgaacagcttatcccaaatactactcaagggctaacagatgaccacatcttaaatatcaagagcttctaggtgtagaatgtcttcgtaaagcaagcccttataggattttcttttaaaattttctctgggagtcacatttctttgggagaagtctgccttaagtgacaacctattcatataagcagtcaattctgacacaactaccaattttggtgtcacccatcaacattgagacctttctaaatcttatacatttcaggatgccagattacagtataaacttcaaacaagaggaaaacccaacacgtaaacctgcggaagagaagcaacacaccagctgccctggaaaacactctcctccccccgcgacacatgcatttccatccttcgcatctggtcacctccgctggctgtcggccctgctccgctccctccaactatgcctgcgaagtgcttcatttcttctctattcgacccgtaggtgttgcgtgttcttctaaactacgttcaacagtaaagtgcaggacattccaacagctccacaaagaagcaaaatattatctctgcaaagtcatgcatttaaaaaccagttgctttccctattttattgatcagtctttgaacttctgaacagattttcgatcaccgcaagctgagcccttctagaagatcaggattctaaagctcgactcggtccaccttctgctattctgggaacacccttcatccccaggggccaatgcgagcctggcgggtcacagcgcccgtttcaccgagagggggccgggctccgcagggggcattccccggccgttcgcgcgctcccggcccgccgcgaggggcgccccgggcagcgcgggggtcgacgggcggcgccgcagcgctgggccgcggccaggaatgagctcagcgtccccgccgggtgttgccggcaggttgcatcagacgccgcgcggcgccgccgcccgcgcctccagcctcgcgtggccttcccgggccagcgggccgtctggggccggggctgggtttccccgagccgggcccgcacccagtcgagcggccggcgtcgccgcggcctcctcctccccgttctcagggcgcccgccgcagcctccttacctgctcctctagcccgcctgcccccaggcggcctccactccgagcggccccgcgcggtgcggcccgagccgacccaggcctcacagcccgcgagtcagcgaggaggagcgacggttacgaaaccggcagcctccgcccgttccgcagccgcggccaccggcttcccctgctcgccggggccgcgcgcgccgccgccgccatcccggccaatgggagcgccggcctgccggaggcaccgccttctctcgcgacgggcagcccagtcgaccaatcgtgggcaggctggcggcgggaggcgggcccacggtgggggagtgggttccgcgcggctggctcggcgggtgtggcgggagcagggagctgcttgctgcggcgtccgcggtccctaggcagctcgcccgggctggcggcggcctagtgctgtggacgactcaagttcgagtcggaggctgaaaagccgtcaccttgtggaggccagacgtgcctttggaagcattttctgaggtggttttgtgaaccaccggcgactgttttggtttcgccgcgtcccttggaagcccccgcggcgtccctcacagagtttctgcgaacggaacgccccgcaggcgggcgggctttgtcgccgcaaaaagagtggaggctgacgcggtggctcccgcctataatctcagcgccgagggaggccgaggcgggagaatggcttgagcccaggcgttggagaaccagcctggacaacatagcgagaccccatctcagttactaatttttaaaaaatcgaatgaacccagatgtttcacacataggattagcattgatgtcacatgggtgaaatccatgtgctgcaggctgtgctttgttgttagggtgagatgaagtgaatttcttaaaatgattctctttgggtgccttccaggtgcatgggtgcgaggtgatctctgaaaataagcagcgatccagtgtgacttaaaactcgccaggagaacccgaaagcgttttttttttttttttttttgagacggagtctcgctctgtcgcccaggctggagtgcagtggcgcaatctcggctcactgcaagctccgcctcccgggttcacgccattctcctgcctcagcctcccaagtagctgggactacaggcgcccgccactacgcccggctaattttttgtatttttttagtagagacggggtttcaccgttttagccgggatggtctcgatcttctgacctcgtgatccgcccgcctcggcctcccaaagtgctgggattacaggcgtgagccaccgcgcctggccccgaaagcgttttaacaccaggaagcagcagctcgctgggcggagggcagaactcgcctgataggtttaattgcttcctctttagcaacgcgtatcgttcaaacaattgaggctttgaaagaggaaatgtttcttcagcgcccatggaaccggctcgccccgtaagattgtttcgaggaatcagtaagatgataaagcaataaataaaaattaaaaggggtcacaacggtgaacaatgggctgggcgcggtggctcaggtctgtaatcccagcactctgcgaggccgaggcaggctgatcacttcaggtcgggaattagagaccagcctgggcaacatggaaaaaccccatctctaccaaaaatacagaagattagccgggtgtggtggcgctgtgcctgtggtcccagctactctggagtctgagatgggaggatggcttgagcctgagaggcggaggttgcagtgagctgagattgagccactgcactccagcctgagccacagaatgagatccctgtctccaaaaaaaaaaaaacaggtaataatgctcacagatgcacacttaggagaataagtgtcattgaaacaagtgtgtttcttcacgttggctctcagtattctcagcttaaatttcttttcttctttttttttgagacgatcttgctgtgttgccccagctggagtgcaatggcactgccacagcttgatcacagctcactgcagcctcgacttcctgggctcaagccatcctcccacctcagcctcccaagtaggtgggattacaggcatgcaccaccacacctagctaattttttaaaaatgttttgtagagacaaggtctcaccatattgtccactctggtctcaaactcctgggctcaagtgatctttctgtctcggcctcccagattgctgggattaagggtgtgag

SEQ ID NO: 1560158 - DNA, 4001 bp, Homo sapiens
ctcaaccagcggcctttcaatgcaaccgtttggggggccatgtggactcccccattcccacgggaatctttctagaaatgggtgctttgggtgtacccaggggtgggggcgtgtgggaaaagcccacctatcacctctggactccagatattgacttatgggggccgcatgggagcccctctgccctcctaggccacatggaggagttagatttttcaggcccaattttgtgtgtgtgtgtgtgtgtgtgtgtgtgtgtgtgtgatggttggttttgaaaagagatggggaatggggaggggtttctttcctccctcaagataaccagctggagggtctagctgaagtgacaggcctgggccccatctcaccagaccctccctagggccttcttgaaccccttcattcattcattcattcattcattcattcattcaattcattcattcaataaacatgcattcatgcttaccgggcacgcagcgctggggaaaaagtgggtgtaaaataggtcatgggccccggtccttccccaaggcctctccagggtcttcctggaggatgggagggggagggccgggggtgtccagcacaaggcctttgaagtggcacccccagtccccaacacctgaccggaaggctgtcaaagccaccccaattcagacgctgggcccatgatgggaaccaagggctggggatacaattgccggacacccccacccgggatgccatcggagggagaatccagtgggagggaggcagacaggcctgaggccgcccacgcctccctcctcctccctgtccaccccagaatttgggctctgcccagatggacacgtccaagctcattgtcttgggcctgagaccccaacacattgctaagaggctcggccagtttcaacttgagcccaaggtggaggcgggggagggggagggcagagaaatggaggagagaatgctgatccacgcggaggtggtggggccagggggtgggcagcgacgggagcctctccgccacccgaggcaggcgaggcgggcgcgtccccccgagccgggcgcccccaacccgtcttcctttgtagttaccgattagcctggggtcctgggcatccgtgtcccccgcggccggacctgccccgccggcctggctttgtgaaaataaccaaagcaatggagtccgcaggtgcaaacttccccgacggggcctggggaggctgaatgaatgggggtgggggggcagggaggggtgccggcgttcccgaggctcccctggcaaacgggcaggaaagagtggggtgagggagggaggaaggggtgggggtctgggggatggaagggtgagggagggagggagggagagagagggtgctgtggggggaaggatgagaggtcgagggagatgggagagaagagaaagggagagagagagggagagagagagggagagagagaggagatgccggaaggtggggagggagggagagggggcggaggaggggagggggcccgctcggatctgtcagctgcacccccagagaggggaggaggggtgggtgggagggagggggtaagaaccgatgctccggcagaggcaggcagaggagggaggtgagcagaggagggatggtgatgggggagagaagatgccggaaggtggggtgggaggcggagggagggggagaggggggagggggccgggcgcccacctttgtgcatccccgtgtaggggtctttgagcaccgtgagctcgtagatgcggccgaactgctcgaagagcggcttgaggtccttctcgtccaggtgccgcgggatctggcccacgaagagtttgatggcgtccaggtccttcatgccgtcgggctgccccccggggggctcgggcccgctgctgcccacgggcgagggccgcggctgcaggagctgctgctgctgccggcgcgcctcgctctccgtcaggcgggccatggcgggcgcgggaccgagccggcggcggcggcggcgggcggcgggcggactcgcagctggagcggcggccgcgcctcccgcctccctcccgggcccccgcgccctcctcccgcccgcgcccgccccggcatcgggaccacaaaggcggctccgcagcggcccctggcggccgcgccgcgcggggcagccggcgcctccccgcatccccgggccgcggggggaaactgaggccggaaggccccgggccccgcctacgggtgggcgagggcggagctgcgggcgggacgggccttagccggcttcccaggggtccccgccggctcccgcggagggcatcggccggaagaatgtcaaaagttgctgggataatgtagggggcttgtcgttgaaagcgcccgtgatccttaaagtaggtaactcatcaataatattaataacactaataatatggctgggcgcggtggctcacgcctgtcatctcagcactttgggaggccgaggtgggtggatcacttgaggtcaggagttcgagaccagactggctaacacggtgaaaccccgtctctactaaagaatacaaaaattagctgggctcggtggcggggggtgcctgtaatcccagctactcgggaggctgaggcaggataatcacttgaacccaggaggcggaggttgcagtgagccaagattgtgccattgtactccagcctgggcaacaagagcaaaactccgtcttggtaaaaaaaaaaaaaaaaaacacctaataataacaacactaataataattaatcaagagcaagacaaagtgctcccactaatcacgacagcacaggagaaatggtaaaagtatcttccagttctatagggtgcttacacatagaaagtgtccttggccctttaagtatgtaactcatcaataatgtcatcaacaaggagggagactggctcgcactgataatgacaggataggagaaatactgaagtatctcccagctctaaagtgcccgtgatcctttacgtatgaaactcatcaataatattaataaaaataataatacgtgctggccgtggtggctcacacctgtaatcccagcactttgagaagcagagtcaggaggaccacttgagcccaggagttggagaccagcctgagcaacatagtgagacgccattgctgtaaaaaataagaaaacaggccaggcacgatggctcacacctgtaatcccagcactttgggaggctgaggcaggtggatcacctgagatcaggagttcgagaccagcctgatcaacatggagaaaactctgtctctactaaaaacacaaaaattagccaggcatggttgtgcatgcctgtaatcccagctactcaggaggctgaggcaggaaaatcgcttgaacccgggaggcggagattgcagtgagccgagattgcgccattgcactccagcctgggcaacaagagtgaaactctgtttgagaaaaaaaaaaaaaaaaatcagccaggagtggttggtgtgcaccgttggtcccagctactcggaggctgcggtgggagcatcggttgatccctgggatattaaagctgcagtgaaccaggatcgcaccactgcctctggtctaggcgacagaatgaaatcttgtctcaaaaaaaaaaaaaaaaaaaacacttcccaaagatgtcccataattaaagcccaagtccttcttgaggcccacaaggctctgcgtgtcctgttctgccttgtccccaccttcccctgctccctctctccccctcctcactgctgcagctacacaggcctcctcgctgttcctctcacttgtcaggtgcggtcctgcctcagggcctttgcacgggctgtaccctttgtctgggatgtgctctccccagatgatgtgtggctcattccttaattccccatcactttccccatctaccttatctaaaaccgctcagtcaccattatctcctttctcagccttctttttccctccacagagttacacccatttaaaattttattttcattttta

SEQ ID NO: 1560159 - DNA, 4001 bp, Homo sapiens
tcaaccagcggcctttcaatgcaaccgtttggggggccatgtggactcccccattcccacgggaatctttctagaaatgggtgctttgggtgtacccaggggtgggggcgtgtgggaaaagcccacctatcacctctggactccagatattgacttatgggggccgcatgggagcccctctgccctcctaggccacatggaggagttagatttttcaggcccaattttgtgtgtgtgtgtgtgtgtgtgtgtgtgtgtgtgtgatggttggttttgaaaagagatggggaatggggaggggtttctttcctccctcaagataaccagctggagggtctagctgaagtgacaggcctgggccccatctcaccagaccctccctagggccttcttgaaccccttcattcattcattcattcattcattcattcattcaattcattcattcaataaacatgcattcatgcttaccgggcacgcagcgctggggaaaaagtgggtgtaaaataggtcatgggccccggtccttccccaaggcctctccagggtcttcctggaggatgggagggggagggccgggggtgtccagcacaaggcctttgaagtggcacccccagtccccaacacctgaccggaaggctgtcaaagccaccccaattcagacgctgggcccatgatgggaaccaagggctggggatacaattgccggacacccccacccgggatgccatcggagggagaatccagtgggagggaggcagacaggcctgaggccgcccacgcctccctcctcctccctgtccaccccagaatttgggctctgcccagatggacacgtccaagctcattgtcttgggcctgagaccccaacacattgctaagaggctcggccagtttcaacttgagcccaaggtggaggcgggggagggggagggcagagaaatggaggagagaatgctgatccacgcggaggtggtggggccagggggtgggcagcgacgggagcctctccgccacccgaggcaggcgaggcgggcgcgtccccccgagccgggcgcccccaacccgtcttcctttgtagttaccgattagcctggggtcctgggcatccgtgtcccccgcggccggacctgccccgccggcctggctttgtgaaaataaccaaagcaatggagtccgcaggtgcaaacttccccgacggggcctggggaggctgaatgaatgggggtgggggggcagggaggggtgccggcgttcccgaggctcccctggcaaacgggcaggaaagagtggggtgagggagggaggaaggggtgggggtctgggggatggaagggtgagggagggagggagggagagagagggtgctgtggggggaaggatgagaggtcgagggagatgggagagaagagaaagggagagagagagggagagagagagggagagagagaggagatgccggaaggtggggagggagggagagggggcggaggaggggagggggcccgctcggatctgtcagctgcacccccagagaggggaggaggggtgggtgggagggagggggtaagaaccgatgctccggcagaggcaggcagaggagggaggtgagcagaggagggatggtgatgggggagagaagatgccggaaggtggggtgggaggcggagggagggggagaggggggagggggccgggcgcccacctttgtgcatccccgtgtaggggtctttgagcaccgtgagctcgtagatgcggccgaactgctcgaagagcggcttgaggtccttctcgtccaggtgccgcgggatctggcccacgaagagtttgatggcgtccaggtccttcatgccgtcgggctgccccccggggggctcgggcccgctgctgcccacgggcgagggccgcggctgcaggagctgctgctgctgccggcgcgcctcgctctccgtcaggcgggccatggcgggcgcgggaccgagccggcggcggcggcggcgggcggcgggcggactcgcagctggagcggcggccgcgcctcccgcctccctcccgggcccccgcgccctcctcccgcccgcgcccgccccggcatcgggaccacaaaggcggctccgcagcggcccctggcggccgcgccgcgcggggcagccggcgcctccccgcatccccgggccgcggggggaaactgaggccggaaggccccgggccccgcctacgggtgggcgagggcggagctgcgggcgggacgggccttagccggcttcccaggggtccccgccggctcccgcggagggcatcggccggaagaatgtcaaaagttgctgggataatgtagggggcttgtcgttgaaagcgcccgtgatccttaaagtaggtaactcatcaataatattaataacactaataatatggctgggcgcggtggctcacgcctgtcatctcagcactttgggaggccgaggtgggtggatcacttgaggtcaggagttcgagaccagactggctaacacggtgaaaccccgtctctactaaagaatacaaaaattagctgggctcggtggcggggggtgcctgtaatcccagctactcgggaggctgaggcaggataatcacttgaacccaggaggcggaggttgcagtgagccaagattgtgccattgtactccagcctgggcaacaagagcaaaactccgtcttggtaaaaaaaaaaaaaaaaaacacctaataataacaacactaataataattaatcaagagcaagacaaagtgctcccactaatcacgacagcacaggagaaatggtaaaagtatcttccagttctatagggtgcttacacatagaaagtgtccttggccctttaagtatgtaactcatcaataatgtcatcaacaaggagggagactggctcgcactgataatgacaggataggagaaatactgaagtatctcccagctctaaagtgcccgtgatcctttacgtatgaaactcatcaataatattaataaaaataataatacgtgctggccgtggtggctcacacctgtaatcccagcactttgagaagcagagtcaggaggaccacttgagcccaggagttggagaccagcctgagcaacatagtgagacgccattgctgtaaaaaataagaaaacaggccaggcacgatggctcacacctgtaatcccagcactttgggaggctgaggcaggtggatcacctgagatcaggagttcgagaccagcctgatcaacatggagaaaactctgtctctactaaaaacacaaaaattagccaggcatggttgtgcatgcctgtaatcccagctactcaggaggctgaggcaggaaaatcgcttgaacccgggaggcggagattgcagtgagccgagattgcgccattgcactccagcctgggcaacaagagtgaaactctgtttgagaaaaaaaaaaaaaaaaatcagccaggagtggttggtgtgcaccgttggtcccagctactcggaggctgcggtgggagcatcggttgatccctgggatattaaagctgcagtgaaccaggatcgcaccactgcctctggtctaggcgacagaatgaaatcttgtctcaaaaaaaaaaaaaaaaaaaacacttcccaaagatgtcccataattaaagcccaagtccttcttgaggcccacaaggctctgcgtgtcctgttctgccttgtccccaccttcccctgctccctctctccccctcctcactgctgcagctacacaggcctcctcgctgttcctctcacttgtcaggtgcggtcctgcctcagggcctttgcacgggctgtaccctttgtctgggatgtgctctccccagatgatgtgtggctcattccttaattccccatcactttccccatctaccttatctaaaaccgctcagtcaccattatctcctttctcagccttctttttccctccacagagttacacccatttaaaattttattttcatttttat

SEQ ID NO: 1560160 - DNA, 4001 bp, Homo sapiens
gtgcagccctagccacacagcgtgatggcagcagccactgccatcacaaggacccaaattcatttcttgcttcccctcctcttcctgcgcagagtccctgtgcttcagcactcagcgtgggcttccatttcccaaacagcaaataattcattcttttttaggccttggtatttgctgtcttctgcacccagaattctttccttactccctgccaggcccaggccaactctccaggctgacgtcactgcccttctggtacacacatcaacagcagttcttgttttaccattgtgtacagaattatttatgggcttgtctatcctacagaccgtgtggccataagctgtcagttgtgggtatcagcacacagcagggactcattaatgtttggggctttaaataaaaactcaagccagatgcagtggctcacacctgtaatcccaacactctggaggccaaggtgagaggattgcttgagccaaggtttaagaccagcctgggcagcatacccagaccccatctctaccaaaaaaaaaaaattatgtttttttgaggcagagtctagctttgtcgcccaggctggagtgcagtggcacaatcttggctcactgcaacctctgcctctcgggtttaagcgattatcccacctcaacctcccgtgtagctgggattacaggtgcccaccaccacgcccgctaatttttgtatttttagtagagatgggttttcaccatgttggccaggctaatcttgaactcctgacctcaaatgatccgcctgcctcagcctcccaaagtgctggattacaggtgagagccacctcacgtggcctctacaaaataatttttaaaattagccaggcattgagacttggcagagtgtgaggcaaaaaataaaataaataaaaaatacctaggtgtggtggtgcacacctgtagtcccagctactcaggagcctgaggcaggaggatcacttgaacccaagaggttgaagccacagtgagctatgatcatgccactgtactccagcctgggcatcaggacaagaccctgtctctaaaactaaattaaataataaataaatataagaatccccttggctgctacgtggagaatggacctaggggaagggcgagagtggaagcagagaaaccagtgaggatctgccgcagcagtccagacagatgctggaggccggggtgtgggtggagatgggaacagctggcagatgtatgtagtgggtatatcggatgggacttgctgatggggtgtacatggtgggtggaggagggaaaaatgaagaatggctatatccagcagtgcagcaggtgtacgtcgtccaggagttaactccgggcacggggacgaatgctacaggggaggcagggtgctcctgtccaactgtggccgaccctggggcagaagattgttaacgccgggcacagtggctcacgcctgtgataccaacactttaggaggctaaggagctcaagaccaccataggaacatagcaagatccctgtttccacaaaaatattgaacaattagccgggagtagtggcgcgcgcctgtagtctcagctcctcgggaggctggggtgggaagatcgcttgagcccaggagttcgaggatgcagtgagctatgatcgcaccactgcactctagcctgggcgacagagcgagaccctgtttcttaaaaaaaaaaaaaaaagtttagaacacgaaaaatcaaggcttcctcaactgaaaaccactttctcttgtgccgcccccttgactggatctcaggccaaaccccaacccgccccaacactttacccctaattcccggccccacagagccccacgcgcggcgggcgagcatctacttacgaaatgactcctgcggcctctccgaaatcccaggagcatccttgcagcgcgaggagaatggaccggggcctggactcatcagcagatctatccacagccagggaccactccctaaagcccgccgcaggcccagccctcacgctttctcttcgcaatggactttgcagcaaccacgtcggccattggctcagctcggccctcgaccaatcagagctaaggttacttccacaccggtcgttcttggcaaccagtgggtaccgttcaaatccccgccagggcggaaacgtccgcccttatccgttctcttattggtcaggttagacgtccatttctgacgccacagcctatccggcgctgcgggaggcggagggcgggctggatgaaggactgggcgagcaccgagggcgtgaacccggaaggtggcgcggccaccagtaacatgatctctagactgggacggtggggttcctgccggctgtattcgggccttggactggactgagaagctacggtgcggatccagctggggtatcaggggctaggcacgtgatgaaaatgaaggacgcggacaccaggacaggaatctcctggttcttagagaatttatttcgccacaaataattggcaaacgggatctcgctgtattgctcaggctggtctcgaactcctgggcacaagcgatcctcacgcctcagccttgcccaatgttgggattacagacgtgagctaccatgcccagcccaggattcttttaaaacttaaatctgatcgtgcctctggccttattggaatccaatgccattaccacctccaccaccacacatcccgtctccagccaccctggccttcattcaggcctttgtgttttctttttcttttcttttttttttttttttttgagacgagtcttgctctgtcgcccaggctggagtgcagtggcgcgatctcggctcactgcaacctccgccttccggattcaagcaattctctgcctcagcctcccaagtggctgggattacaggtgcccaccaccaagcccggctaatttttttgtatttttagtagagacgcggtttcactatcttggccaggctggtcttgaactcctgaccttgtgatccacccgcctcgctcggcctcccaaagtgctgggattacaggtgtgagccaccgcgcccagcctgtgttttcttattagtaattataaagggaatcttatttgacagttctttgacaaataattcagtttgcagaggggatcctgccccagaggccctggcttggagtggaatgcagggccgtgtgcaggagagcctgctcaagtgccgcctggcttttccctccttaggtggagaccatccatggaaaagaacccccctgatgatacgggccccgtgcacgtgcctttggggcatattgtggccaatgagaaatggcgcgggtcacagctggcgcaggagatgcaaggtcggtggcctgccctctgccagccctttcctcccctgacatattaaaaaaaaaaaatctgcctattattgccatcttttcatccaaagcttatggaactcattttcttctctgtattttaagggaaaattaagctcattttcgaggatggcttgacaccagacttttatctgtcgaacagatgctgcattctttatgtcaccgaagctgatttggtggcaggaaatggctacagaaagaggcttgttcgggttagaaatgtaagtattaggctgggtgctgtggctcacgccagtaatcccagcactttgggaggccaaggcgggtggatcacctgaggtcagtagttggagaccagcctggccaacatggtgaaaccctgtctctgctaaaaatacaaaaattagctgagtatggtggcgcacgcctgtaatcccagctactagggaggctgagacgggagaattgcttgagcctgggaggcagaggctgtagtgagccgagatcacgccactgcactccagcctgggcgacagagtgagattccaactcaaaaaacaaaaaacaaaaacaaaaaagaaatgtaagcattggattaaagaaactcgaacattgatttgtctcaccccacccttccctccatcccttggtatcatttattt

SEQ ID NO: 1560161 - DNA, 4001 bp, Homo sapiens
ggggtctctccctcatgtgggtgatatggggacgggagtggggagagtggcagtcagacaacatcccatcatcgacctcacaagggccagcctcttcccggccagcagagaaaggcccctttgttggcgctgggcacattgtccctgcaccctccagccagacgggcggggtgacaccagctggtccacgggggtgtccaggccaagctaaaggcccaaacaccttccaaccagctcctgccacagcgacccctccccagggaagtgagtggggtcaggcgccaatgtcaccatcatggtcactctctcgcaggggcgatggtctccgcagaaactggggaattctgctgtcgcctcttggaggcagcacagtccaaccctgaagccccgggccatgtcacctccaagggagcgaccactggcgtggccagagcacccaggcccttgccatccctggtcggagggtggcgctgaccccagataggcacaaggcagcgaccgggcagctcctgcctcttcccgattacagcgggcaagccggccccgccgccgcacggacccagcagaaaacgggcagcggacctcgctccgggccggggcgcagcccgcatggcagggaggcgcatggcgcaggccgcggtgcgccgagccctcccgttcccggtcctgggcttctcagtgtctggctcggccctgccggaaagagcgcgcggtggccggagccatccaccgcgcggggccccctggtcccaaactgaccggaaagggccgtgcctcggtcccccacgtctcaaacatcccacctgtctcgggccccccatgtcccagactcaccccagcccggccacacccccgcatctacccggttcccccacgcagcactgtctgaagggggcgcgcggcggcccgagagaccttatcctggggctccaacgtcctgggcctctccagcccgaggcccccacccacgttccggcgaccccttcatccgcagcagccagcgctggaagaaaggaacgcgccggcggccccaggtccccggtcccggcttcccccagtccggggtcccctcgtcccggcccccggccacactgacccgaaagaggcgcgcagtggccgcggagcgcagggcggtccagcccagcgcgccgagcgccagcagcagcagctcgggcggcgccaggtgcgcgtgctcagccaggccgcgacgcgccagcccccagccgcagtccgtgcagccccgcgccgccgccagcgcgctgccccagccgcgctgcactagctgcgcgtagctcggcatgggctcgggccccgtcggccccgccgcgggccccgccgccgccataccgcccgctcgcccgccgtgcccgtcgcctgcgcccgcccgcggtagccgacggagccgcgcgccccgcgtcacgcgccgcagctgggccgggggcgcgcgggcgggagagcggagggcggaggggcgggaccggcgcaagctccgccccgctgggggcgcggctggggggcggccagcggggacgcggggcgccctggaggcgggcccgcgcccctgcccgtttcccagcagagaaacccaggcgcgggggccggagctgggggcccgttggacctggaccccgagagaccccgcgcaccgccgtgtcgcgcccccatgcctgccccgcgcgccccccgctcccccaccccaccgcgccgtgcccgtgacggggggcacgggggacactagcaggcagtcccctcgactggcgacccccgcttctcccggccctccagcacgccacgccgctcccgctccatcgccccggcccgctccgacctcaccgttcttggagccctcgctccttctcaaggacccgaggcctggcacgccttggcacagtcttgggaccatcccgtggccctcccgcattcaggaggcgtaggctcaatgaaacattctcattcttcaaaaggacacggcccacgccagggcgttgggaggcgcacctagtggagacgcagctctctgccctacaccaggagcttggcaatggggttccagcttggacgcgggtaccctgggcacttcccaggcatcttcttctgcaggtctgcacagcgggctactgggacaaaggtgtgatgggggctgctgagattagggggttctctgagggtcacttgctgctgtgaccctggggaacccggggggggggctccccaacatcaggttaatacatgagttgcagagaggctgcaggagtgggtgccaacgtgggagggactcccaatctggatcgactgtgacatcattgggaccaccataagtgactttccaatgcactgttcattgacaaggccctgtgcccaaagccactgaaggccatcgaggaagacactggtcacctctgttaggaccgccatctccccaggcactgctgcaccccccctccatcctagcccgcaggatgtccccacacctggccttcaaggtgcaggatgcagggatgagtcctgcagcagccgcgctggctcccgaacacctgcacctgaacttcaggggcacaggtgaacacaccttccccttgccccacaccgagtcccccacaacacatccaggtggccctgcatctggccacttctctgcatctgcacagccttgccccccgctccccgccaccaccaccactaccaccactaccctcttccgtctggtatcctggcttcctcctcaccccacagaggtgagaaggtggctgcgacgctgttggcctgttcctcgtctgcttgcagccctctatggctcctgttccactcagggaaagcccaagtcctcactggctgccctcacagcgccctgtttccctccgcctgtgggcttttctgctgttcttccaacatgccaagctctgtcctgcctcagggcctttgcactagctgttcccccctcctgaaatgctgttcccctaggtacctgcatggctcttctgccacctgctcaggctgcccccgactctgaagtcacacgcccctcatgtcttcatgtctgcttggcacttgtcaccatctgcccctacatacatacagctcatttttttttttgagttggagtcttgctccgttgcccagactggagtgcagtggcgcaatctcagctgaccgcaacctccgcctcccaggttcaagggattctcctgcctcagtctcccgagtagctgggattacaggcgcctgctatcacacccagctaatctttgtattttctgtagagacagggttttgccatattggccgggctggtctcgaactcctgacctcaagtgatctgcctgtcttggcctcccaaagtgctgggattacaggcatgagccaccgtgcctggccccactctttattcttgaacgtggactccatgtggactaggggcctagtgtaggggtggggcacgaggcttggcctggccaatagttcaggtccagccggaggccagagatgtgactaacgccacaacctgcctggcaggcagagggggacgagggggatatgctctcaaaggtccagccaggcctgtggggcagccgtggacagtcccagccacctccctccaccctctcggccagcactatctggtcaccatggcgcccatcggtcacgggagaggcgccacccacccacccactagccccagctcagcctcgaatttctttttggcgggtccagccaggaggctgccaacgggtgggtgcagggcaggaatggaaggcggctctactggcagctggggaccaggcacccaaggctgggcggaggtcagtcttgaggccagtgtccccccacccaccccaaggtctcctccctccagaaagctcggcctggacccctcctaatgtccctgtccagggagtcctcttttgccacttccctcccctaccaggctgggggtgggggtcgcttgctgtcctgccctggcaaccagagacggggtctggtttcaaatgaataggcctggg

SEQ ID NO: 1560162 - DNA, 4001 bp, Homo sapiens
ggacaggaggcggaaaaggtgtcacaggcgaggtgagaccctgaggggacattgggagtgcagaggaagctgctggctccaaggcaggggttggggagtgcggtgggtgggtgggtggcggggcgcggctccagagctgcccggccaagccccacccctggacaagtcccacccccttcccagaggctgagggggccggagcccagagcacccagcagttgtcatggagacagctggagccggctccggtaacccctggcaaccaggctgctgccaagaagatcagctttggaacacccggcagcccctccacccatttctgaggaagggcgagcctcgaaatggggcgagcaccccacccaaggggctggggagggcccccggggctcggccctggtagtctaccagccgccacatcctcctgtcccgcaggggtgggggacggcttgccctcctgggtctcgggcttcccagctggaaactgggaagaaggcaggggcaacaagcaggataaagaccactgcggacccagggaggggccctggacagccctgtctccccctcccacagtaggggtgtggctggggtctctccctcatgtgggtgatatggggacgggagtggggagagtggcagtcagacaacatcccatcatcgacctcacaagggccagcctcttcccggccagcagagaaaggcccctttgttggcgctgggcacattgtccctgcaccctccagccagacgggcggggtgacaccagctggtccacgggggtgtccaggccaagctaaaggcccaaacaccttccaaccagctcctgccacagcgacccctccccagggaagtgagtggggtcaggcgccaatgtcaccatcatggtcactctctcgcaggggcgatggtctccgcagaaactggggaattctgctgtcgcctcttggaggcagcacagtccaaccctgaagccccgggccatgtcacctccaagggagcgaccactggcgtggccagagcacccaggcccttgccatccctggtcggagggtggcgctgaccccagataggcacaaggcagcgaccgggcagctcctgcctcttcccgattacagcgggcaagccggccccgccgccgcacggacccagcagaaaacgggcagcggacctcgctccgggccggggcgcagcccgcatggcagggaggcgcatggcgcaggccgcggtgcgccgagccctcccgttcccggtcctgggcttctcagtgtctggctcggccctgccggaaagagcgcgcggtggccggagccatccaccgcgcggggccccctggtcccaaactgaccggaaagggccgtgcctcggtcccccacgtctcaaacatcccacctgtctcgggccccccatgtcccagactcaccccagcccggccacacccccgcatctacccggttcccccacgcagcactgtctgaagggggcgcgcggcggcccgagagaccttatcctggggctccaacgtcctgggcctctccagcccgaggcccccacccacgttccggcgaccccttcatccgcagcagccagcgctggaagaaaggaacgcgccggcggccccaggtccccggtcccggcttcccccagtccggggtcccctcgtcccggcccccggccacactgacccgaaagaggcgcgcagtggccgcggagcgcagggcggtccagcccagcgcgccgagcgccagcagcagcagctcgggcggcgccaggtgcgcgtgctcagccaggccgcgacgcgccagcccccagccgcagtccgtgcagccccgcgccgccgccagcgcgctgccccagccgcgctgcactagctgcgcgtagctcggcatgggctcgggccccgtcggccccgccgcgggccccgccgccgccataccgcccgctcgcccgccgtgcccgtcgcctgcgcccgcccgcggtagccgacggagccgcgcgccccgcgtcacgcgccgcagctgggccgggggcgcgcgggcgggagagcggagggcggaggggcgggaccggcgcaagctccgccccgctgggggcgcggctggggggcggccagcggggacgcggggcgccctggaggcgggcccgcgcccctgcccgtttcccagcagagaaacccaggcgcgggggccggagctgggggcccgttggacctggaccccgagagaccccgcgcaccgccgtgtcgcgcccccatgcctgccccgcgcgccccccgctcccccaccccaccgcgccgtgcccgtgacggggggcacgggggacactagcaggcagtcccctcgactggcgacccccgcttctcccggccctccagcacgccacgccgctcccgctccatcgccccggcccgctccgacctcaccgttcttggagccctcgctccttctcaaggacccgaggcctggcacgccttggcacagtcttgggaccatcccgtggccctcccgcattcaggaggcgtaggctcaatgaaacattctcattcttcaaaaggacacggcccacgccagggcgttgggaggcgcacctagtggagacgcagctctctgccctacaccaggagcttggcaatggggttccagcttggacgcgggtaccctgggcacttcccaggcatcttcttctgcaggtctgcacagcgggctactgggacaaaggtgtgatgggggctgctgagattagggggttctctgagggtcacttgctgctgtgaccctggggaacccggggggggggctccccaacatcaggttaatacatgagttgcagagaggctgcaggagtgggtgccaacgtgggagggactcccaatctggatcgactgtgacatcattgggaccaccataagtgactttccaatgcactgttcattgacaaggccctgtgcccaaagccactgaaggccatcgaggaagacactggtcacctctgttaggaccgccatctccccaggcactgctgcaccccccctccatcctagcccgcaggatgtccccacacctggccttcaaggtgcaggatgcagggatgagtcctgcagcagccgcgctggctcccgaacacctgcacctgaacttcaggggcacaggtgaacacaccttccccttgccccacaccgagtcccccacaacacatccaggtggccctgcatctggccacttctctgcatctgcacagccttgccccccgctccccgccaccaccaccactaccaccactaccctcttccgtctggtatcctggcttcctcctcaccccacagaggtgagaaggtggctgcgacgctgttggcctgttcctcgtctgcttgcagccctctatggctcctgttccactcagggaaagcccaagtcctcactggctgccctcacagcgccctgtttccctccgcctgtgggcttttctgctgttcttccaacatgccaagctctgtcctgcctcagggcctttgcactagctgttcccccctcctgaaatgctgttcccctaggtacctgcatggctcttctgccacctgctcaggctgcccccgactctgaagtcacacgcccctcatgtcttcatgtctgcttggcacttgtcaccatctgcccctacatacatacagctcatttttttttttgagttggagtcttgctccgttgcccagactggagtgcagtggcgcaatctcagctgaccgcaacctccgcctcccaggttcaagggattctcctgcctcagtctcccgagtagctgggattacaggcgcctgctatcacacccagctaatctttgtattttctgtagagacagggttttgccatattggccgggctggtctcgaactcctgacctcaagtgatctgcctgtcttggcctcccaaagtgctgggattacaggcatgagccaccgtgcctggccccactctttattcttgaacgtggactccatgtggactaggggc

SEQ ID NO: 1560163 - DNA, 4001 bp, Homo sapiens
gaaggggacagggcagcgagctcccaaggcacctgcctttctgtgccatcccacgggtgggaggagggaacctgggcccacttctgctgccaactacaggcatcccagtggctcctgagccaagacattctgtgccacgcactgggtcaaccgctttattcaacctgcagacagccctgggtcaggaggtggacactgttgtgaatttctcagaggagaaatggaagcccatacatccccctgaactcccaccgggcgttagaaccctctccggttccttaggggtgtggctgccaccgagatctgcctagcctcggctttcatcgatccatgaacactcccaggctcagatactactgacccattttacagatgggtaaactgaagctcagaaacctttccctgggggccctacagccagttcaacgaccaaggccgccccccaccccccacaccccaggctcaaagtacctctgctggcagtgggtgagctggaaaaacaggtaaggaaagtcctcaatgcctcttcctccacgcctggctgggcctgctggggcccaggtgcactgaatgaggcttctaatcagtcccccagctccacttctgtgtttattcacagcagctgctcctggaaggcagacccatttgaggctgggggaggccgagggcttcaaagacaattccacagtccaggaaccctatccccatataacagacccaggtcgccccagtggggtcaccctggcctctgcgctcagatgcctgagaccttgcctgagctcagactggagtcgatgggagcattcccccatctggtaggttttgcaaaccacaacagcctctccccctgcccaccttcctgtgtcccccagagcagcttctcctcaagtctcccaacccagcaatgaaagcctcttctatatactcctaactacccaggagaaacatcggtcccccacgctccacttgcaaacagacagaattagacgatgttactctgccaaagcgaattttcagttcacccacttcctatcacaccttccagccaggtcaagccagaagcccccttccaagtatccccatctctcctacccacagcggctacgggatgttcttaagacacaatccgatcacgccatgcacctgctgttccaagcctccctggtccccaccgccccgagaacgggttccacactctcctcgccgcttcccaggccccggccaacctctctccacctcagaccctccctctccgcgtttcagccaggctggcctcttttctgctccgcacacactcccggctaggccctgggcctaaaaagccctcgctggctggtccaaccaggccaaatgacattatccccgcctgggcacctccacctcaccccggccgcctgatgggttagctcgggcttggaatgacgtgtttaagcggttctcagaagccgtctacgcggccgggctgcggactccgaggccagggccccagctgcgtccccagccctggcacgtcggggaaacggggcgctcccccggctcacacatccggattcccccgcgtcacgaggccaggatcgcccctactcgctccagcccgtttcacagccgcgtcctcgggcacccgttgcgccccggccctcgtgggggagcgcggatagctcggggagacggccatgatgggaagccccgagggggacagtccccggcggggtgatgggggctggagcccagctgcgagtgggggccgggctggggccgccatggccgcggaggcggggccggggaccgccgtgagggtggcgttcggggcggtgttcgcggcgcggggtgctcgcttacctgggggtgcaggcggccgggcgcaccgagggccggcggcggggctggggacggcgcgcctagcgggctacccggagcagctgcagacacgcgccgcccgccccaggcagccggactctgctcctggccgggcctcggcccccagcaggggaaaaaaggcttgagtggggggagcccggggcggggccgtgggggcggggcctgggcggggcacgcgccccggaacggtggggcctggcgcggggctggggccctggagaggcggggcctggcgcggggcgggggacttggaggggcagggcctggagcgggcgccgggtcctccaggcgcttgcccccctcgacgcaactaggcctctccctggcccccgaccccgcacccgcaccccatccccgcccccgtccccgcccccccattctcgcccccgcccccgttcccgctccgcccatctctgccccgcggcgcgcctggcccgggtccagcctagcgtttctagtctgcgccttatctctcccctttgaacccagtattgtccgctgcgcgctccgtccggccccggcttcacccctgttcgctgtctgtctccccggccccctcccaggtcccctcttctgcccgagatgctctggctctgctcatctgtccacacccccacactcccggggcgccctgagcctctggggcgcgcagttggatggtgcacaggggaggcccagatttctccaggcctcagcggccaccctgggtaccccgagtctggggccctgttggagggccagtccaggggttcgcccgaggcgcgcgcgggggccaaccgaggcggtgagggcaccgggcaaaggctgcgatttggtggggtgcaggggtcaggcgacagagctggggagataagatgggagataggccgggtgggtggtggcgcagccctggttttggctgagggcagcagcagtgggggctgggtcccccgcttgcctggtagaaccgaaaatgacccagtctcagcagcgcgcaggggcagggagcctgggcgatccctgaacagaggacagccccaggggttttcatagtcgctggcccaccgcatgtactctgggcaagtggcttcgcctttggacaataagcctctgtaaaatggggataataaacctttctctgactcagctcagcagacccaagacccatggggtgaagttggggcctccctgccacagggccctaggcaagctgagatttgatttcctcacacagacaggggcgcggggggcggggcggtcagggaggcaggagacctctgttgcaagtgtggaagaacctgtccctccaagttcagactcctggcgtttgcacttggccttccctctgctacactgtttctcttttcttttttctttttctttttttttttttgagacggagtcttgcattgtggcccgggctggactgcaatggcatgatctcggctcactgcaacttctgcatcctggtttcattcgattctcctgcctcagcctcccgagtagctaggattacaggcgcccacaacacccggctaatttatatatatatatatttttttttttggagagacgggggtttcacaatgttggccagactgatctcaaactcctgacctcgtgatccaccagccttggcttcccaaagtgctgggattacaggcgtgagccagcatgcccgaccttctcttttctttttttaaaaaaatctgttagaggctgggtgcggtggctcacacctgtaatcccagcactttgggaggctgaggcgggtggatcacctgaggtcaggagtttgagaccagcctggccaacgtggcaaaatcccatctctactaaaaacacaaaaattagcctggagtagaattacgtgaacccaggaggcagaggttgcagtgcgtggagatcgtgccactgcactccagcctggacaacagagtgagactctatcaaaaaaaatttcgttaaagatgggagtctcactctgttgcccaggctagaatggaatgtcatgatcccagctcattgcagcctgggactccagggctcaagcagtcctctcacctcagcctccagaggagctaggactatagatgcctgccaccatgcccggctaatttttttttgttttaaataaaaaaact

SEQ ID NO: 1560164 - DNA, 4001 bp, Homo sapiens
cgggggtgcgaggctggggagaatgccgctaggctcggggagacgggacgggggaggtgggcatcagggcaggggcgtgggtctcagtgcagcaggagagatttaggctagaccctgggtgggggtgcaggtggggatggggtgggtgcgaggctcaccagtgcagctgcaaaggtcgaggctggaaccgggatggggatgcagggggagcggggggtggggggctcccagtgcagccgcagaggtcgaggctagacccggggtgagggtgcgggggttgtagggcggggtccccatgcagcaggagaggtcgaggctggacccggggtgagggtgcagggggtgggggggctccgagcgcagcaagagaggtcgaggctagacccggggtgagggtgtgggggttgtggggcggggtccccatgcagcaggagagttcgaggctggacccggggtgagggtgcagagggtgggggggctccgagcgcagcaagagaggtcgaggctagacccggggtgagggtgtgggggttgtggggcggggtccccatgcagcaggagaggtcgaggctggacccggggcgcggtgtaggcggggtggagtgagggtgggccggggatcccagcgccgcaggagggactgcgctacacggggccgacctgtagcagcaggaggtcgtggtcgatggtgtcgggctggctgtccgggtggggcactgcgcggagcacgtcgtacaggcgcttggagggctccggctgcgacagggagtgcgcgcccaggagaacctgcaccttcccgtcggccctggggaccggacggagtccgcggtcggtgccagccgactccccccaccgcacccgggctcttcccccgcgcggcgcgggcactcacgcgtcctccaggcagtgcgccgcgctcagcacccactgctccgccaccaggacgccgccgcacaggtgcgcgccgttcagctgcaccgacgccatgtagggccgcgcgtgcgcctcggcctctctgccgcccaggatccgaccacggggcggcgccgctgtgggtgggcgggcgcgtgagggccgcggggtggactcctcccccgggcgaggctgcctgacgggatcccagctctcaccccccaggccgctccccgcaagaatcccatctctgggcgcggtggctcacgcctgtaatcccagcactttgtgaagccgcgcgggggcggggggggaggggggggtgcagatcatgaggtcaggagttcaagaccagcctggccaatatggtgaaaccccgtctctactttaaaaaaaaatacaaaatttagtcggcgtggcctataatctcagctattcggaaggctgaggcaggagaatcgcttgaacccgggagtcggagtttgcagtgagccgagatcgcaccactgcactccagcctggacgacagagcgagactccctatcaaaaaaaaaaagaaagaaaaaaaagaatcccgtttccgtcttggggcccctcagcgttgcaaactcagataccctcgggcgggaatgccccagagtacagaacccacagtgggctggggaccgggggcagatcccagcgccctaccctgggcgcagtgccttccagttggacataagagaaatggggctgacccagccagtgcctgggccagcccagtcagccacgcagatgaagttttccacgcagacgttcagactctgtctgcaagaaaagctgactccagaaagttccgatttccaatctgaattttctagaatttttcagcgttcagagccttccattagtgaggagagacacccccttcctgcccacctggaggggctggaggaccgtccgtgtgacggaagggagcaccacgcccctacacagccctgtccctcaccccaggcccaggcctcctcaccgcaggcggccgctcctaggaggaccagaactgccaggcgctcccagctgtgcatggtgaagccgctgtggctgagacactgacccaggcagggccctgggggtgcttttatgagggtggagggggcgggccgctccccgggtgggcagcggcccagctggggaaaggggaactcgcccgcccagcctccgccctccccgggactgggttacctcctgccagactcacaccagagtcgacaagtcgctgggagaccctcgggcctctgtgagcctgacagcctgctggccctggtggggggcagtccctcagatgggcaggaggcagagaggggggctgcacccaccccggccccaacttcaccacacccagagtcccccagggtgtttcacaatcctagctggaggccacagcgtgtaaacaacccactttcttgtcctgctaccctcccttcttttcctcctctatattagagagaaggtctgttgggggtaggaaggtcacttgacacctttgtctctgtccctgtggcctctggggcttgacaccctgacgaatagaaagttggaaaggccaaggcagaggcagctgggaagactggctacaagggacaggaaaacccagacaaactgggtggagcctgaatcatgaaagttatatggaaagttcagggatgtccgccttcaggtgtggcttgatccaggtgcctgaacaatgtccagtgtctgcttctggcttctcctttcttctctgatggcttctttcctcaccagcctcccctggtgtgtttccagggaccccacactcaacccagtggctcagtgggcccctcctaaaattcttcctcactccagccaagtctcaagggtgccttgggttggtggagcctggatcacacgccccctcccaaactgttcactgagggcaggttctgatgaacagagtcagggctggccgggcacagtggctcccacctaccatcccggcacattgagagacccagataggagcatctcttgagcccaggaattcaaggccagcttggggaagacggcgagaccccatctctacaaaaaaattaaaataaaatacttctcagaatctgggccatagggccttttgtgaggtggggatttgtgtgtgttgtttttgttttattacagacagggtcttgctctttcatccaggctcgagtgcagcggtgcaatcatagctcactgcagcctcctcgacctccggggctcaagtgatcctcccacctcagcctccagaagtgctgggactgcaggcctgctcatggtgtagctccatttttcacatctgccccacaggggccagcgggattcacgttgcattaatccatggtgcggggaccagaaggatggggataccttgtggggaggacctcagacattgtccccagggggagcagcacacgaggttcccccggcttttctcttcaccatggatcatttctttcttttctttcctttttttttttttttttgagacggagtctcgctctgtcgcccaggctggagtgcagtggcgcgatctcagctcactgcaagctccgcctcccgggttcacaccattctcctgcctcagcctccggagtagctgggactacaggcgtccgccaccacgcccggataattttttgtatttttagtagagatgggtttcaccgtgttagccaggatggtctcgatctcccgacctcgtgatccgcctgcctcggcctcccaaagtgctgagattacaggtgtgagccaccacgcctagcctcatttccttccttcctttctctgtttttctctttctttccctttctttttctttctttctttctctttccttctttttttctttctttcttgctttttttttttttttgcgacagagtcttgctctgtcgtccaggctggagtgcagtggcacaatctcggctcactgcgacctccacctcccgggttcaagcgattctactgcctcagcttcccgagtagctgggattacacgcatgagcaaccacactgggctaactttttgtatttttagtagagacagggttttgcca

SEQ ID NO: 1560165 - DNA, 4001 bp, Homo sapiens
acaatttttttttttttttgagacggactttccctctttttgcccaggctggagtgcaatggcacagtctccgctcactgcaacctccgcctcccgggttcaagcgattctcctgcctcaccctccagagtagctgggattacaggcacccgcctacacgcccagctaatttctttatgtaattttagtagagacggggtttcaccatgttaaccaggctggtcttgaactcctaacctcaggtgattcgcctgtcttggcctctcaaagtgctgggattacaggcatcagccatcgcacctggccatcaagctggaaaattttaaggtctgtttctttcccaatgtagagtaaagttgcgatgtcatcccccgaccccacactgttttctaccagagttctcatactgtgactctgtataaaatggtttggaagctggacccatcctgtgtgtgtgtggttgccctgagcccacagaaagacacctccagagtgcggattgagaagcctttattgtgggaggatcggggtgtccgagggccccgggagtcgggatgggcttggaaggctggggggaggggcctttgaggaagaggagtcctggaagcgggggtcatcacaggtcaaggggtggtccttgggacccccgcagtcagtggtgctgcggcggcagagtgcacattgacagctgagagccacggcgtaggagaccacggggttcacgccgcgcgggcagccagggagccggatggactcgaagcgcacatcgcggtagttgcacaccacctgaggcagggccggcaggaccccctgcagcacgcgggtctggaagccgtgtgagtgggggaatgagcatgtgcctggggccagcgcctcagctgagctccccagctgcccccacaggtctcagactcaggggtccaggaagccctctgttcctgccctcccacaccccattccgcagcccctgaccagagaggcagaccacccttcctcccccgctgcctctgtgggtctggccctgaggtggcagcacctgccccggccccgggcagctcaccatggtggggcagtagccggcacagatggtggtgttgacggtgatgcacacggggcagccctccttctccacagccagggtggcattgatggggcggcaccgtggccgaagcggctccttggatgcccatgtcccgcccatgctcagcagcagcaacagcagcagcccctgggacaaggacactgcttcacccgggtctgagaccgcagccccgagtcctggccttcccatcccgcgtggtacaccacccacaaagacccagagacccttcccggcatctcctattcaggacccaccacccggacacctgcctttcagagcccaccccacagcccagaggacctgagataccccaacatttcagatccgcaccttcaggaaatgccccacctgaagcttactgggggtcacgctcctccagaaagaggcctccttccacagctcacactggtctgaccccttctcatgccagtgattgcctggaaggaggtggaaggtgcccaggggccctgcagtcttacctggaacatctccatccttggtgcgtcccctgcctcgtgtacctggctttatacctcggggttgtgggggcggcaaggccaccaggaggtgataggatgctggggtgagctcgacactaacccctcggggggcaagaggtagacaaggccaggggggcgcaggagtggctcagcggagcgccccagccctctcctctcactggtccagcgccaagggtgaggcggagaccacggtgaagtgacctcagagactcagtcgtcgagtgctagggactagtcgaggctggaggcacagggagtagggtgtaggaaggcctgcctctgcctatggtggggtcctgggagccaggaggaggccgtgacccgagaaaggtgctggactgaagcctcaaccctcctctacttgaggctttcctgcaccacagtccaacctcccaggaggggcgcggcttcggacttagtttctgcccaatgagagagggcctccccgtgactgtgctgccagggaagccacttgaccctggtgccgccaacgagggattcagcccgagccccacctctcccttagggacctccgcccaccctaccctcaagccaggatgcccggagctgtccccggaaatgcgtgtgcttcaggtgatttaactgattattgaataggcccgcaggaggtgtgtcctgcccatggggccgaagcctcggaggacattatctggacttagtcccttccccgcgatgccatcaagctggacaattttaaggtctgtttctttcccaatgtagggtataggttggcacagggaagagggctagaaacctgacttgagctccccgcccagggctgaactctccagcatcctgatcacttctcattgaaccttgcttatactccccgtgtgatcggtagctctttatctcaaaacagaatattctaagccaacccctgcctgctctcaccaagtaagatttctcatttgaaccccagctcccagatacttaaaggccttctgtagaccatgtcctcaaggtcccctggccatctgcttgcatgttccagtttccctcctcccccatgcacatcgtgaaatgtgccctcccactccccaggatgagcaaggtggtgtcctctgtgactgagcagtcagcaacttaacaccaaaggtcaccaatgatcaaatccatgagagttgatccgaggagttatgtattagggctacgaaagagtaaacactcagtaaatagtggctattattattatcatcatcatcatcatcatcatgattaccctcaagttcccctgggagagctcctattcaaccttcaaaaccacatgtggtggcacccatcctgcagagattgagctcaaattcagagagttgtgattttgtgatgatttgatgagttccccaactggggtccgtccgtagagcagctgggccaaccctgaggtctctcagcatccagctctgttctttttctgcctgaccagttcctgggtataagtctcaggcccggccagtccggctgaggagtgtgcagacacaggctgtgccagtttgaatccatcgccagtccacacggccctgggcatcagcggtcaatgcccgcacataggactgcttggccttgcactcagacacccagtgccccccggtccacaccccggcggcagccccctccacctacccccgggccaccttcctcagatttatcggcctcgaagtgggcaacaaagaagtgctggcggagggaactgccgacagctgcaggcacctcgcccaacacctccacctcgagcacacccaagtccacagcagtccaggggtctgtcacccagacactgactgcatcgcacacggccagctcaccctgatgactcgccggtgaagtatcgctcacccctcgctggctgcggttggcccgggcgcctgctgactcccgaaaggctccagtctccagcaggaagaccagagggggcccggcagcggcacccctagacaggaccactcgggggaaaagaaggtcccactctggaggaggaaaaggcgacaatgtcgaggatggggttaggactccattgacacactggggaggaggaaaatgagggggatgcggagggagcctgggggagtgggagcatctctcagagcatctctcagagcacatggagacagggaaaaggaggctgggattagagaagaggataaacacttcagtggggtcagaagttggaaaccccaggggaggcctgcctgccaggattatggggaagcccttgctctagaagtttgggggactccatatataggacttgcatcacacccaacttgtagattaataataaatattcaacaactacaggtcaggcactatggctcacacctgtaatcccagcactttgggaggctgaggcgggtgga

SEQ ID NO: 1560166 - DNA, 4001 bp, Homo sapiens
cagcttcctgagtagctggaactacaggcgcgcaccaccacacccagctaatttttttttttttttttagtagagacagggtttcaccatgttggccaggctggtctcgaagtcctgaactcaggtgatgcacctgcctcggcctcccaaagtgctgggattgcaggcatgagccactgcgcctggacgaacgtttttaattatattattattattattattattattattattactaatttttgagatggagctttgtttttgttgcccaggctgaagtgcaatggcgggatcttggctcactgcaacctccgcctcctaggatcaagagattctcctgcctaagcctcccaagtacctgggagtataggcatgcaccaccacgcccgacgatattttgtaattttagtagagatggggtttctccatgttggtcatgttggtctggaacccctcacctcagctgatccacccaccgcagcctccgacaattacaggcgtgagccaccacgcccagccgtccaccctgttttctaccagagttctgtactgtgactctgtataaaatagtttggaagctggacccaccctgtgtgtgtgattgccctgagcccacagaaagacacctccagagtgcggattgagaagcctttattgtgggaggatcggggtgtcctagggccccgggagacgggatggacttggaaggctggggggaggggcctttgaggaagaggagtcctggaagcgggggtcatcacaggtcaaggggtggtccttgggacccccgcagtcagtggtgctgcggcggcagagtgcacattgacagctgagagccacggcgtaggagaccacggggttcacgccgcgcgggcagccagggagccggatggactcgaagcgcacatcgcggtagttgcacaccacctgaggcagggccggcaggaccccctgcagcacgcgggtctggaagccgtgtgagtgggggaatgagcatgtgcctggggccagcgcctcagctgagctccccagctgcccccacaggtctcagactcaggggtccaggaagccctctgttcctgccctcccacaccccattccgcagcccctgaccagagaggcagaccacccttcctcccccgctgcctctgtgggtctggccctgaggtggcagcacctgccctggccccgggcagctcaccatggtggggcagtagccggcacagatggtggtgttgacggtgatgcacacggggcagccctccttctccacagccagggtggcattgatggggcggcaccgtggccgaagcggctccttggatgcccatgtcccgcccatgctcagcagcagcaacagcagcagcctctggggcaaggacactgcttcacccgggtctgagactgcagcccccagtcctggccttcccatcccgcatggtacaccacccacaaagacccagagacccttcccggcatcttctattcaggacccaccacccggacacctgcctttcagagcccaccccacagcccagaggacctgagataccccaacatttcagatccgcaccctcaggaactgacccacctgaagcttactgggggtcacgctcctccagaaagaggcctccttccacagctcacacgggtctgccccttctcatgccagtgatggcctggaaggaggtggaaggtgcccaggggccctgcagtctttcctggaacatctccatctttggtgcccggaaatgtggatctaccctacctttgacatgtctctctcttagcgggatatcttccgcaagcactgggaatgtggacatggaaagtaaattgagtctccgtgggggagtgagacagggagtgaggggtgttggacgcggcacgggaacctggccagagtcagcggacccaattggctgctctctctcagatgcagttccccttcctccctccagggggcgccacggaacgcagggccctcactggccctggggactgggtgacgtcagggatgagcctcttgtgattggctccatcaccctgcgtaagatcaaagggaagaaaggatgggcccgacaaccggagccattgtggctccggccgattgagcctgccctcgggctctcaaggctaggcgagggtgtgagggactggagttcgaggtcaacctgggccccattggtaggaaaaaaaaaaaaaatttttttatcgttccctatataacaacaaaacataaagggaggacgccttgataggaagaaatgacatcttcctaagtgtttttaaattacttcaatgtatctttttttttttttttgggataccgagccttgctcggtcctcgggggacctccctgcctgtcagccatggcggtcgtcacctgtggtaaacagaatggcgggagcaagtgggatgtcccactactcgggctgaggcaggagaatcacaggaacctaggaggtggaacctcctcgcccaggaggggcgcggcttcggacttagtttctgcccaatgagagagggcctccccgtgactgtgctgccaggttagccacttgaccctggtgccgccaacgagggattcagcccgagccccacctctcccttagggacctctgcccactctaccctcaagccaggatgcccggagcggtccccggaaatgcgtgtgcttcgggtgatttaactgattattgaataggcccgcaggaggtgtgtcctgcccccgaggccgcagcctcggaggacattatctggacttagtcccttccccgcgatgccatcaagctggacaattttaaggtctgtttctttcccaatgtagggtataggatggcacagggaagagggctagaaacctgacttgagctccccgcccagggctgaactctccagcatcctgatcacttctcattgaaccttgcttatactccccgtgtgatcggtagctctttatctcaaaacagaatattctaagccaacccctgcctgctctcaccaagtaagatttctcatttgaaccccagctcccagatacttaaaggccttctgtagaccatgtcctcaaggtcccctggccatctgcttgcatgttccagtttctctcctcccccatgcacatcgtgaaatgtgccctcccactccccaggatgagcaaggtggtgtcctctgtgactgagcagtcagcaacttaacaccaaaggtcaccaatgatcaaatccatgagagttgatccgaggagttatgtattagggctacgaaagagtaaacactcagtaaataatggctattattattatcatcatcatcatgattaccctcaagttcccccgggagagttcctattcaaccttcaaaaccccacattgttgcacccatcctacagagattgagctcaaattcagacagttgagattttgcgatgatttgatgagttccccaactggggtccgtccgtagagcagctgggccaaccctgaggtctctcagcatccagctctgttctttttctgcctgaccagttcctgggtataagtctcaggcccggccagtccggctgaggagtgtgcagacacaggcagtgccaatttgaatccatcgccagtccacacggccctgggcatcagtggtcaatgcccgcccataggactgcttggccttgcactcagacacccagtgccccccggtccacaccccggcggcaggtcctccacctacccccgggccaccttccttagatttatcggcctcgaagcgggtaacaaagaagtgctggcggagggaactgctgccagctgcaggcacctcacccaacacctccacctcgagcacacccaagtccacagcagtccaggggtctgtcacccagacagtgactgcatcgcacacggccagctcaccctgatgactcaccggtgaagtatcgctcaccccacgctggctgcggttggcccgggcgcctgctgactcccgaaaggctccagtctccagcagg

SEQ ID NO: 1560167 - DNA, 4001 bp, Homo sapiens
gagaatggaagagatgacatcccccttggcccattcatcccattcaggtccccaagcccccacctggactgccagtgccaacctcagagggtggaagagggagctcggcttagaatgctgaggccctgccccctgggccacaccaatcgtgtggccttccttctccccacggaaggccagaccatggacacctcctgagctggatgtcatcccccatctccaccctcttttctttttctttctttctttcttttttttttttttttgagatggagtctcgctctgtcgtgcaggctggagtgcagtggcgcgatctctgctcactgcaacctcccgctcccaggttcactgcattctcctgcaagcgcccgccaccaagcccggataacttttcgtatttttagtagagacggggtttcaccgtgttagccaggatggtctcgatctcctgacctcatgatccgcctgcctcggcctcccaaagtggtgggattacaggcgtgagccaccacgcccagccgtccaccctgttttctaccagagttctgtactgtgactctgtataaaatggtttggaagctggacccaccctgtgtgtgtggttgccctgagcccacagaaagacaccgccagagtgcggattgagaagcctttattgtgggaggatcggggtgtctgagggccccgggagtcgggatgggcttggaaggctggggggaggggcctttgaggaagaggaggcctggaagcgggggtcatcacaggtcaaggggtggtccttgggacccccgcagtcagtggtgctgcggcggcagagtgcacattgacagctgagagccacggcgtaggagaccacggggttcacgccgcgcgggcagccagggagccggatggactcgaagcgcacatcgcggtagttgcacaccacctgaggcagggccggcaggaccccctgcagcacgcgggtctggaagccgtgtgagtgggagaatgagcatgtgcctggggccagcgcctcagctgagctccccagctgcccccacaggtctcagactcaggggtccaggaagccctctgttcctgccctcccacaccccattccgcagcccctgaccagagaggcagaccacccttcctcccccgctgcctctgtgggtctggccctgaggtggcagcacctgccccggccccgggcagctcaccatggtggggcagtagccggcacagatggtggtgttgacggtgatgcacacggggcagccctccttctccacagccagggtggcattgatggggcggcaccgtggccgaagcggctccttggatgcccatgtcccgcccatgctcagcagcagcaacagcagcagcccctgggacaaggacactgcttcacccgggtctgagaccgcagccccgagtcctggccttcccatcccgcgtggtacaccacccacaaagacccagagacccttcgtggcatctcctattcaggacccaccacccggacacctgcctttcagagcccaccccacagcccagaggatctcagataccccaacattttagatccccaccctcaggaactgccccacctgaagcttactgggggtcacgctcctccagaaagaggcctccttccacagctcacactggtctgccccttctcatgccagtgatggcctggaagcaggtggaaggtgcccaggggccctgcagtctttcctggaacatctccatctttggtgcctggaaatgtcgatctaccctacctttgacatgtctctctcttagcgggatatcttccgcaagcactggggatgtggacatggaaagtaaattgagtctccgtgggggagtgagacagggagtgaggggtgttggacgcggcacgggaacccggccggagtcagcggacccaattggctgctctctctcagatacagttccccttcctccctccagggggcgccacggaacgcagggccctcactggccctggggactgggtgacgtcaggggtgagcctctcctgattggctccatcaccctgcgtaaggtcaaaaggaagaaaggagatccccgacaccccgagctattgtggctccgaccggttgcgcgtgccctcgggccctcagggaggggagggttcgagggtacgagttcgaggccaaccgggtccacattggttgagaaaaaaatttttttatcgttccctatataataacaaaacataaagggaggacgccttgataggaagaaatgacatcttcctaagtgtttttaaattacttcaatgtatcttttttttttttgggagaccgaggcttgctcggtcctcgggggacctccctgcctgtcagccatggcggtcgtcacctgtggtaaacagaatggcgggagcaagtgggatgtcccactactcgggctgaggcaggagaatcacaggaacctaggaggtggaacctcctcgcccaggaggggcgcggcttcggacttagtttctgcccaatgagagagggcctccccgtgactgtgctgccaggttagccacttgaccctggtgccgccaacgagggattcagcccgagccccacctctcccttagggacctctgcccactctaccctcaagccaggatgcccggagcggtccccggaaatgcgtgtgcttcaggtgatttaactgattattgaataggcccgcaggaggtgtgtcctgcccccgaggcctcagcctcagaggacattatctggacttagtcccttccccgcgatgccatcaagctggacaattttaaggtctgtttctttcccagtgtagggtataggttggcacagggaagagggctagaaacctgacttgagctccccgcccagggctgaactctccagcatcctgatcacttctcattgaaccttgcttatactccccgtgtgatcggtagctctttatctcaaaacaaaatattctaagccgacccctgcccactctcaccaagtaagatttctcatttgaaccccagctcccagatacttaaaggccttctgtagaccatgtcctcaaggtcccctggccatctgcttgcatgttccagtttccctcctcccccatgcacatcgtgaaatgtgccctcccactccccaggatgagcaaggtggtgtcctctgtgactgagcagtcagcaacttaacaccaaaggtcaccaatgatcaaatccatgagagttgatccgaggagttatgtattagggctacgaaagagtaaacactcagtaaatagtggctattattattatcatcatcatcatgattaccctcaagttcccctgggagagctcctattcaaccttcaaaaccccacgttgttgcacccatcctacagagattgagctcaaattcagagagttgtgattttgcgatgatttgatgagttccccaactggggtccgtccgtagagcagctgggccaaccctgaggtctctcagcatccagctctgttctttttctgcctgaccagttcctgggtataagtctcaggcccggccagtccggctgaggagtgtgcagacacaggctgtgccagtttgaatccatcgccagtccacacggccctgggcatcagcggtcaatgcccgcacataggactgcttggccttgcactcagacacccagtgccccccggtccacaccccagcggcagcccctccacctacccctgggccaccttcttcagagttatcggccttgaagcaggtgacaaagaagtgttggtggagggaactgctgccagctgcaggcacctcacccaacacctccacctcgagcacaaccaagtccacagcggtccgggggtctgtcacccagacactgactgcatcgcacacggccagctcaccctgatgactcgccggtgaagtatcgctcacccctcgctggctgcggttggcccgggtgcctgctgactcccaaaaggccccagtctccagcaggaagaccagagg

SEQ ID NO: 1560168 - DNA, 4001 bp, Homo sapiens
ggccaggctggtctcaaagtcctgaactcaggtgatgcacccgcctcagcctcccaaagtgctgggattgcaggcatgagccactgcgcctggacgaacgtttttaatttttattttattattattattattattactttttgagatggagctttgtttttgttgcccaggctgaagtgcaatggcgggatcttggctcactgcaacctccgcctcctaggatcaagagattctcctgccttagcctcccaagtacctgggagtataggcatgcaccaccacgctcgacgatgttttctatttttagtagagatggggtttctccatgttggtcaggctggtctggaacccctcacctcagctgatccacccaccacagcctccgacaattacaggcgtgagccaccgcgcctagccgtccaccctgttttctaccagagttctgtactgtgactctgtataaaatggtttggaagctggacccatcctgtgtgtgtgtgattgccctgagcccacagaaagacacctccagagtgcggattgagaagcctttattgtgggaggatcggggtgtccgagggccccgggagtcgggatggacttggaaggctggggggaggggcctttgaggaagaggagtcctggaagcgggggtcatcacaggtcaaggggtggtccttgggacccccgcagtcagtggtgctgcggcggcagagtgcacattgacagctgagagccacggcgtaggagaccacggggttcacgccgcgcgggcagccagggagccggatggactcgaagcgcacatcgcggtagttgcacaccacctgaggcagggccggcaggaccccctgcagcacgcgggtctggaagccgtgtgagtgggggaatgagcatgtgcctggggccagcgcctcagctgagctccccagttgcccccacaggtctcagactcaggggtccgggaagccctctgttcctgccctcccacaccccattccgcagcccctgaccagagaggcagaccacccttcctcccccgctgcctctgtgggtctggccctgaggtggcagcacctgcccgggccccgggcagctcaccatggtggggcagtagccggcacagatggtggtgttgacggtgatgcacacggggcagccctccttctccacagccagggtggcattgatggggcggcaccgtggccgaagcggctccttggatgcccatgtcccgcccatgctcagcagcagcaacagcagcagcccctgggacaaggacactgcttcacccgggtctgagaccgcagccccgagtcctggccttcccatcccgcgtggtacaccacccacaaagacccagagacccttcccggcatctcctattcaggacccaccacccggacacctgcctttcagagcccaccccacagcccagaggacctgagatgccccaaaatttcagatccccacccttaggaactgccccacctgaagcttactgggggtcacgctcctccagaaagaggcctccttccacagctcacactggtctgccccttctcatgccagtgattgcctggaaggaggtggaaggtgcccaggggccctgcagtcttacctggaacatctccatccttggtgcgtcccctgcctcgtgtacctggctttatacctcggggttgtgggggcggcaaggccaccaggaggttgtaggatgctggggtgagctcgacactaacccttcggggggcaagaggtagacaaggccaggggggcgcaggagtggctcagcggagcgccccagccctctcctctcactggtccagcgccaagggtgaggcggagaccacggtgaagtgatctcagagactcagtcgtcgagtgctagggactagtcgagcctggaggcacagggagtagggtgtaggaaggcctgcctctgcctatggtggggtcctgggagccaggaggaggccgtgacccgagcaaagtgctggattgaagcctcaaccctcctctacttgaggctttcctgcaccacagtccaacctcccaggaggggcgcggcttcggacttagcttctgcccaatgagagagggcctccccgtgactgtgctgccagggaagccacttgacccagatgccccccaacgagggattcagcccgagccccacctctcccttaggaacctccgcccactctaccctcaagccaggatgcccggagcggtccccggaaatgcgtgtgcttcaggtgatttaactgattattgaataggcccgcaggaggtgtgtcctgcccacggggccgaagcctcagaggacattatctggacttagtcccttccccgcgatgccatcaagctggacaattttaaggtctgtttctttcccaatgtagggtataggttggcacagggaagagggctagaaacctgacttgagctccccacccagggctgaactgtgcagcatcttgatcgcttctcattgaaccttgcttaaactccccctgtgatcggtagctcattatctcaaaacaaaatattctaagccgacccctgcccactctcaccaagtaagatttctcatttgaaccccagctcccagatactgaaaggccttctgtagaccatgttctcaaggtcccctggccatctgcttgcatgttccagtttctctcctcccccatgcacatcgtgaaatgtgccctcccactccccaggatgaggaaggtggtgtcctctgtgactgagcagtcagcaacttaacaccaaaggtcaccaatgatcaaatccatgagagttgatccgaggagttatgtattatggctaagaaagagtaaacactcagtaaatagtgcctattattattatcatcatcatcatgattatcctcaagttcccccaggagaactcctattcaaccttcaaaaccccatgtggtggcacccatcctgcagagattgagctcaaattcagagagttgtgattttgtgatgatttgatgagttcccaaactggggtccgtagagcagctgggccaaccctgaggtctctcagcatccagctctgttctttttctgcctgaccagttcctgggtataagtctcaggcccggccagtccggctgaggagtgtgcagacacaggcagtgccaatttgaatccatcaccagtccacacagccctgggcatcagcggtcaatgcccgcacataggactgcttggccttgcactcagacacccagtgccccccggtccacaccctgcggcagcccctccacctacccctgggccaccttcttcagagttattggcctcgaagcaggtgacaaagaagtgttggcagagggaactgccgccagctgcaggcacctcgcccaacacctccacctccagcacacctgagtccacagcggtccgggggtctgtcacccagccagtgactgcatcacacacggccagcctcaccctgatgactcgccagtgaagtattgctcacccctcgctggctgcggttggcccgggcgcctgctgactcccgaaaggccccagtctccagcaggaagaccagagggggcccggcagcggcacccctaggcaggaccactcaggggaaaagaaggtcccactttggatcaggaaaaggcgacaatgtcgagggtggggttaggaccccattgacacactggagaggaagaaaatgagggggatgtagagggagtctgggggagcgggagcatctctcagagcacctctcagagcacatggagacagggaaaaggaggctgggattagagaagaggataaacacttcagtggggtcagaagttgggaaccccaggggaggcctgcctgccaggattatggggaagcccttgctctagaagtttgggggactccatatataggacttgcataacacccaacttgtagattaatagtaaatattcaacaactacaggtcaggcattatggcccacacctgtaatccca

SEQ ID NO: 1560169 - DNA, 4001 bp, Homo sapiens
caatcatgtggccttccttctccccacagaaggccagaccatggacacctcctgagctggatgtcgtcccccatcttcactctcttttctttttctttctttccttctttctttctttctttttttttttttttgagatggagtctcgctccgtcatgcaggctggagtgcagtggtgtgatctcggctcactgcaagctccccctcccaggttcactccattctcctgccacagcctcccaagtagcttggactgcaagcgcccaccaccaagccgggataagttttcgtatttttagtagagatggggtttcaccgtgttagccaggatggtctcgatctcctgacctcatgatcagcctgcctcggcctcccaaagtggtgggattacaggcgtgagccaccgcgccccgccgtccaccctgttttctaccagagttctgatactgtgactttgtataaaatggtttggaagctggacccaccctgtgtgtgtgtggttgccctgagcccacagaaagacaccgccagagtgcggattgagaagcctttattgtgggaggatcggggtgtctgagggccccgggagtcgggatggacttggaaggctggggggaggggcctttgaggaagaggaggcctggaagcgggggtcatcacaggtcaaggggtggtccttgggacccccgcagtcagtggtgctgcggcggcagagtgcacattgacagctgagagccacggcgtaggagaccacggggttcacgccgcgcgggcagccagggagccggatggactcgaagcgcacatcgcggtagttgcacaccacctgaggcagggccggcaggaccccctgcagcacgcgggtctggaagccgtgtgagtgggagaatgagcatgtgcctggggccagcgcctcagctgagctccccagctgcccccacaggtctcagactcaggggtccaggaagccctctgttcctgccctcccacaccccattccgcagcccctgaccagagaggcagaccacccttcctcccccgctgcctctgtgggtctggccctgaggtggcagcacctgcccgggccccgggcagctcaccatggtggggcagtagccggcacagatggtggtgttgacggtgatgcacacggggcagccctccttctccacagccagggtggcattgatggggcggcaccgtggccgaagcatctccctggatgcccatgtcccgcccatgctcagcagcagcaacagcagcagcccctgggacaaggacactgcttcacccgggcctgagaccacagccctgagccctggccttcccatcccccagggtacaccacccacaaagacccagagacccttcccggcatctcctattcaggacccaccacccggacacctgcctttcagagcccaccccacagcccgagggacctgagatgccccaacatttcagatccccaccctcaggaactgccccacgtgaagcttattgggggtcacgctcctccagaaagaggcgtccttccacagctcacactggtctgccccttctcatgccagtgatggcctggaaggaggtggaaggtgcccaggggccctgcagtcttacctggaacatctccatccttggtgcgtcccctgcctggtgtacctggctttatacctcgggtttgtgggggcgtcaaggccaccaggaggttgtaggatgctggagtgagctggacactaacccttcggggggcgagaagtagacaaggccagggaggcacaggagtggctcagcggagcaccccagtcctctcccctcagtggtctagcgccaaggatgaggcggagaccacggtgaagtgacctctgagactcagtcgtcgagtgctagggactagtcgaggctggaggcacagagagtagggtgtaggaaggcctgcctctgcctatggtggggtcttgggaaccaggaggaggccgtgacccgagaaaggtgctggactgaagcctcaaccctcctctacttgagccattcctgcaccacagtccaacctaacaggaggggcgcggcttcggacttagcttctgcccagtgagagagggtctccccgtgactgtgctgccagggaagccacttgacccagatgccccccaacgagggattcagcccgagccccacctctcccttaggaacctccgcccaccctaccctcaagccaggatgcccggagcggtccccggaaatgcgtgtgcttcaggtgatttaactgattattgaataggcccgcaggaggtgtgtcctgcccgcggggccgcagcctcggaggacattgtctggacttagtcccttccccgcgatccagccgcagctgagtgggcgtgtctgggctagtcctgtccccacactgcggatagacttaatgagtgcgagcccacctaggtccgacaccgcgtagtgagcggctgcccagagctctgctccgcccccacgccagggggcgtgtctggggtggggctggcccggcaggctcccactagccccggcttacagcggcctgagcgggagttctcggtgctgtaggctttcgggacgctgtgtatgcccggcaggggcttccagtgggggccaccccaagtcgcctccagcgggcggaagcggtcgagccggcggagcgggtgcggcgaggagctgtaggtttcctgagccggagacatggcccgccgtgcggcgctcgaggcggcctggaagagcagagacagggctgccgctgcgggtcgtgactccagagttggggcgtctcttctaagctccagtaggtcaggtagtccttgcgggggtatccggacggctccgtcctgtgggagcagggcgggatggtgaggatacagctggatccttggggacgagtttcagacctcgggatctaaggagtctgcacattcaaactcctgcatttccaggcgagcaccccttaggaaggacgcgaccgggcacgcgttgcctgcgttcctgggtcctcgaggtacttaacgtcctggaagctgagctttcgcatcctagggaaggaaacgggggctttcgcttccttgcgaaggagcatgtgggggctcaagtaccgaaggaggccctgccctcagatccagaatcccctcgagccgctgtgcaggcttcctgtccctaccgcggttcctggaggtgacactaaggactcctgggtgctaaaagagggaggggctggggtctgaactgtggttgttgctgctataggagtcgagactgagaccaccggtcagggaatgggagccagcccaggggctcggcgtgcaccggccatggcgggggctgtgcaggaggcggtgccgagcgagagcccggcttacttgggatagaaccgaaagtcccgcgccgaggtggtcagatagagctggcggcggttcaggacgccccggtcggatactgtgaagggtgggccagacagcgcggggttcttcgtgcaggcgattagagcctgagcaagattgggggaggaggcatacccaagacatagatttcataccccatcccaagtcctgggtcccgagttcagaatccctctccttcggcctcgacagccatgacggccacggccctcacaccccgccccagggtcagagcccttcctgccacccacgccagggaacttcagcttcctttctcatacccgaacccttcccagcctcacctccctaaatccaagccctcctgctggtcaaggaactcaaatgcaggcccccagccaccacaaaatccccctggttctgcccccggtctcaagccttcttggtgtggccactggagctgagctgcatcttgggcaacaactccaggttacctctcctaactcccaccctaccacgtctcagaatattctagtctcctccccacccacagcccgccgtctagctccgcagcagcttaggagccctgaaggcgagtttccagcccctggtccttctggcctg

SEQ ID NO: 1560170 - DNA, 4001 bp, Homo sapiens
agaatgctgaggccctgctccctgggccacaccaatcgtgtggccttccttctccccacggaaggccagaccatggacacctcctgagctggatgtcatcccccatctccaccctcttttctttttctttctttctttcttttttttttttttttgagatggagtctcgctctgtcgtgcaggctggagtgcagtggcgcgatctctgctcactgcaacctcccgctcccaggttcactgcattctcctgcaagcgcccaccaccaagcccggataacttttcgtatttttagtagagacggggtttcaccgtgttagccaggatggtctcgatctcctgacctcatgatccgcctgcctcggcctcccaaagtggtgggattacaggcgtgagccaccacgcccagccgtccaccctgttttctaccagagttctgtactgtgactctgtataaaatggtttggaagctggacccatcctgtgtgtgtgtggttgccctgagcccacagaaagacacctccagagtgcggattgagaagcctttattgtgggaggatcggggtgtccgagggccccgggagtcgggatggacttggaaggctggggggaggggcctttgaggaagaggagtcctggaagcgggggtcatcacaggtcaaggggtggtccttgggacccccgcagtcagtggtgctgcggcggcagagtgcacattgacagctgagagccacggcgtaggagaccacggggttcacgccgcgcgggcagccagggagccggatggactcgaagcgcacatcgcggtagttgcacaccacctgaggcagggccggcaggaccccctgcagcacgcgggtctggaagccgtgtgagtgggagaatgagcatgtgcctggggccagcgcctcagctgagctccccagctgcccccacaggtctcagactcaggggtccgggaagccctctgttcctgccctcccacaccccattccgcagcccctgaccagagaggcagaccacccttcctcccccgctgcctctgtgggtctggccctgaggtggcagcacctgccccggccccgggcagctcaccatggtggggcagtagccggcacagatggtggtgttgacggtgatgcacacggggcagccctccttctccacagccagggtggcattgatggggcggcaccgtggccgaagcggctccttggatgcccatgtcccgcccatgctcagcagcagcaacagcagcagcccctgggacaaggacactgcttcacccgggtctgagaccgcagccccgagtcctggccttcccatcccacgtggtacaccacccacaaagacccagagacccttcccggcatctcctattcaggacccaccacccggacacctgcctttcagagcccaccccacagcccagaggacctgagataccccaacatttcagatccccaccttcaggaaatgccccacctgaagcttactgggggtcacgctcctccagaaagaggcctccttccacagctcacactggtctgccccttctcatgccagtgattgcctggaaggaggtggaaggtgcccaggggccctgcagtcttacctggaacatctccatccttggtgtgtcccctgcctcgtgtacctggctttaaacctcggggttgtgggggcggcaaggccaccaggaggttgtaggatgctggagtgagctcgacactaacccttcggggggcaagaggtagacaaggccaggggggcgcaggagtggctcagcggagcgccccagccctctcctctcactggtccagcgccaagggtgaggcggagaccacggtgaagtgacctcagagactcagtcgtcgagtgctagggactagtcgagcctggaggcacagggagtagggtgtaggaaggcctgcctctgcctatggtggggtcctgggagccaggaggaggccgtgacccgagaaaggtgctggactgaagcctcaaccctcctctacttgaggctttcctgcaccacagtccaacctcccaggaggggcgcggcttcggacttagcttctgcccaatgagagagggtctccccgtgactgtgctgccagggaagccacttgaccctggtgcccccaaggagggattcagcccgagccccacctctcccttagggacctccgcccactctaccctcaagccaggatgcccggagctgtccccggaaatgcgtgtgcttcaggtgatttaactgattattgaataggcccgcaggaggtatgtcctgcccacggggccgaagcctcggaggacattatctggacttagtcccttccccgcgatgccatcaagctggacaattttaaggtctgtttctttcccaatgtagggtataggttggcacagcaaagagggctagaaacctgacttgcgctccccacccagggctgaactgtgcagcatcttgatcgcttctcattgaaccttgcttatactccccctgtgatcggtagctcattatctcaaaacagaatattctaagccaacccctgcctgctctcaccaagtaagatttctcatttgaaccccagctcccagatacttaaaggccttctgtagaccatgtcctcaaggtcccctggccatctgcttgcatgctccagtttctctccacccccatccacatcgtgaaatgtgccctcccactccccaggatgagcaaggtggtgtcctctgtgactgagcagtcagcaacttaacaccaaaggtcaccaatgatcaaatccatgagagttgatctgaggagttatgtattagggctacgaaagagtaaacactcagtaaatagtggctattattatcatcatcatcatcatgattactctcaatttccccctggagaactcctattcaaccttcaaaaccccacgtggtggcacccatcctgcagagactgagctcaaattcagagagttgtgattttgtgatgatttgatgagttcccaaactggggtccgtagagcagctgggccaaccctgaggtctctcagcatccagctctgttctttttctgcctgaccagttcctgggtataagtctcaggcccggccagtccggctgaggagtgtgcagacacaggcagtgccaatttgaatccatcgccagtccacacggccctgggcatcagcggtcaatgcccgcacataggactgcttggccttgcactcagacacccagtgccccccggtccacaccctggcggcagccccctccacctaccccacggctaccttcctcagagttatcggcctcgaagcggtgacaaagaagtgctggcagagggaactgccgccagctgcaggcacctcgcccaacacctccacctcgagcacacccaagtccacagcggtcccgggatctgtcacccagacactgactgcatcacacacggccagcctcaccctgatgactcgccggtgaagcatcgctcgcctcacgctggctgcggttggcccgggcgcctgctgactcccaaaaggccccagtctgcagcaggaagaccagagggggcccggcagcggcacccctagacaggaccactcaggggaaaagaaggtcctactttggatcaggaaaaggtgacagtgccgagggtggggttaggaccccattgacacactggggaggaagaaaatgagggggatgcagagggagcctgggggagcgggagcatctctcagagcacctctcagcacacggagacagggaaaaggaggctgggattagagaagaggataaacacttcagtggggtcagaagttggaaaccccaggggaggcctgcctgccaggattatggggaagcccttgctctagaagtttgggggactccatataaaggacttgcatcacacccaacttgtagattaataataaatattcaacaactacaggtcaggcactatggctcacacctgtagtcccagcactttggg

SEQ ID NO: 1560171 - DNA, 4001 bp, Homo sapiens
tttttaaaagcagactggggcttcctaaaaaactccatcgtccatacatgaaaccacccctcacccaccgccccaagcttagtgaataagaaaaggtactgagaaaattcatgtttcctttctagccacttcaaagaaataaagacagtatcattctcaagtgtccacttaccaaaagccatggatttctaccccctaactgaaggatatgatttttagtcacttaactttattttcgagacaatcacaaaaatctatttgtgtggctttgagtcactagctttggtgcaagtggaacagaaacaacctcattaaaaacaggacccaccctcattaaaaaatcttgtatataaaacgggacactcccaatccagagatccaaagatacacacgattaacacatatgtgtgtataaagttactaactgctctttattctgcgattacatcctttctaattttatttggcactaaaatatactttcctttcatgatagcatggtcctagcgagtagcgatttttttttttaaagttaaatatcctggccaggcatggtggctcatgcctgtaatcccagcattttgggaggccaatgcaggtggattacctgaggtcagaagttcgagaccagcctgcccaacatggtgaaaccccgtctctactaaaaaatacaaaaattagccaggcatggtggtgcaggcctgtaatcccagctacttgggaggctgaggcagaagaatcgcttgaaccagagaggcagaggttgggcaacagagcaagactcagtctcaaaataaataaataaataaagttaaacatcctgacttaaaacatcacagctccacgacagtaccaactttatattaattttatgtctccgggaaatcccacaggctagaaggaactacagccatgattttcagccaaggcggaatctgccccataggggacacagggcaatggtatttctggctgttactaaggcatggtgagaggggctgctactggcctgcaaaaggcggaggccagggatgatgcttaacaccctgcagtgccgtgcccaggacggcaacaaatatcaacactgctgaggctgagaaactggactggcgtccattctagcccttcattcgttcacgttatttactgagcacctactatgtgccaaagcgtaatgccaagtgctgccaaagcgttatgtaatgcagagtccagcaagggagagggacagtctggtcttccttggttcaccctcccacgtttcaggaggcctgtggtgggctccaaagaccccattccaaggcacacggaggaggaagtcacggtgcatatcaggaaggagcaagaactcgggagtcccaccctcctggccatctctaccatctgggcctcttcttacccgggcttaccccgaccctcagcggcatcggtactggtccccgagcccgtgcgaccttgggcctcagtttccccacccgctgcaaggtccaacatggtcaagggacacaaacgcatccagtaacctgcagggcaagccctttcgcttccctgggcctcagtttcccctctcggcccctccgacccaccgccccagagagtcctggagggacgaactgacgcaaaagcgccggaaacaaacaatatggtcgcggctacaacaataacgtcaacaagggtgcccttggggacgccaggccctcgctggggatgagaaggccccagggggtgaacgcccggcccgcaggaccaggcttggcgcccggaggcccgtccgcctcccatcgccgcctcggcccgtccaggccgcgcgccgcgcccccccttcccctcggcgcgggcccgaaccgacctgtggcggctcccctggcgccgggcgccccgcactccagctcctccagcatcgccccggcggcagctcgacctcctctcaggcggcggaggcgcgggctcccctcaggcggccgctgctcttcgccctcccgcccgcgccgctgctgccgccgcggccgccgcgctcgtatttggcgggaaccgcggcgacccccgcagtccgcgcgccaattgggcgagcccgggtcacgtgacggcccgcctcgggaattgaggggcgccgggggcatcctcgcgagatccgtgacttccattcctcccagggctcgcccattgacatatccgcgagggactgggcttcccctcggaggcctgtcattggctgggaggagctgccctgcgattggaggaaggaggtgtcaagctcattgctctgcgctgcgactggctgatcgcgtgggatagtccctaagaggagggaggcccaggctcttacgtcaccagaacattttacgcaaggcgcagatgacaacttgaaagtgggatttagatgaggaacctggagttttgagtttatcctaatgggacatcggctaaatatagcaacagcaattaaaattataaattgctttctacaagaacaataaaacgaagtctggggagcgcttcggaagtatttgacattcagtaaataacatgtagaatgagtgaacgaaatggacgaaatggatcgtttctggtttaatcctcaggaaattggcacatgctgttttctctgcctagaacaatcttttcgcagctcttttcctggctaatttatacttttcagatcttagatcgtcaccccaggaagccttttcttccccaaccctgacaatatcaagtgcctacaacactgttcttttccttaaagcaattacagctgtgtctatttattagtttgttatttgactaatgaattaatttctgccttttgtcattagttctggcgagggtaggactcattcctcactggaaccccaggacctgttagtaactgatcatatttaccaggtcaataaatgtttgagtgaatgtataaatatttgattgaactgtgtagatcaagcagattaaaagcctcacacaaaacagagaacttcagtgtcagcctgtgagtgtagaaacaggttttctttctttctttcttccttccttccttccttccttccttccttccttcctttctttctttcttttttcttgagacggagtccctagtagctgggaccacaggcgcccgccaccacgtccggctaattttttctattttttagtagagacagggtttcaccgtgttagccaggatggtctcaatctcctgacctcgtgatccgcccacctaggcctcccaaagtgctgggattacaggcgtgagccaccgcccctggccctgaattgcattctagaagcatctttctggctgccatgacaaggaagaattggaggggaggactggtggaaagtatggtcaaggcatgaagacagacctagatgtctagatgtgtcacgtgggcaactgaatggatgaacacaggacagagagagagaggaagagaggtggccgggcacggtggctcatacctgtgagaccagtactttgggaggctggatttggtgggggggttgggggttggatcacctgaggtcaggagttcgagaccagcctggccaacatggcgaaacactgtctctactaaaaatacaaaaattagcctagcatggtggtgcgcgcctgtaatctcagctacttgggaggctgaggcaggagaatcgcttgaacccgggaggcggaggttgcagtgagccgagatcacgccactgcactccagcctgggagacaaagcaagactccgtctcaaaaaaaaaataaataaataaataaaaatgggagggggctgaacacttagacgaactggatttagctaagatgagtaaacaggaatctgaagaatcgtaagcaggggccccttctacttcccaacctccctggccaggtttaaactaagcgcgttttccaagacgttagggtcacctccacgactccagggggcgctgcaactgctacggcccctctaggctcgccccgctcaactcactgacagaggcggcctctcccgcggtagacaatg

SEQ ID NO: 1560172 - DNA, 4001 bp, Homo sapiens
acctccagctcccaggttcaagcgattcttctgcctcagcctctccagtagctgggactacaggtgtgtgccaccacacctgactaagttttgtaattttagtagagatagggtttcactatgttagccaggctgttctcagactcctaacctcaagtgatctgcccgcttcagcctcccaaagtgctgggattacaggcgtcagccactacgcctggcctcctttcaagccttttctttttctttctttcttttttttttttgagatggagtcttactctgtcactcagactgcagtgcaatggcgtggtcttggcttaccgcaacctccacctcccgggttcaagcgattctcccgcctcagcctcccaagtagctgggactacaggcgcgggccaccacacccggctaatttttgtatttttcgtagaaacagggtttcactatgttggccaggctggtctcagactcctaacctcaagtgatctgcccgccttggactcccaaagtgctgtgattacagtatgagccactgcaacaggcctcctttcaagctgtttaatcgaacaccaactgtgtgttatgtattaagggacaatgaccttgtaccttaatacaagacgagcgtgtagtcccctgaactacacgctcgccgaagccaaacagaccttgtttgggtcattgtaccttaatacataacacacaattggcgttcgatcaaacagcggacaaccacctctcaatgtccatctacctggcaaactcctagttattcatttaaacaatctagagacggggttgggtactgaacgtgacagatgtgatacctgccctgagcagccgcaccacctggtgactatccattattcaaaggccagctctgcttcctaactttaaacttctttagagcaggactggaatcctgttgcctaaatgaacgaacattgataaacacttgccaataactaaaactcagagggataattctttttgatttctgctgcaggcatctgaaatgcacaaaaccttgctggacccacagggagacggcaaagggggctggacagtgcctgtcccatggactcccatccggcctctatcacttcctccctagaaaacactaaaacaatcacgctactcctgctaatctccgtcatcagtctgcaaaacaacagcaaaatccctgatccagagcccaggggggaggatcgaaaacctcgttgttctccattacagtggcacccagcagccgctctgtgcagggccgtgggaacagcggaacagggatcgtgtggaccgagctgctccacttcaaagaataaacgacccgaaagaaagaggtttgtggcagagcccggactggaatccgagaaaggaagcgctcgatgggacggcctgagtgccggaggggactcacgctgctgctgctccagcgccagcttgcacttgtagtaactgtagaattcgcctccgaaaagaaacgagaatttggggttgtccttctgcttctccatagtcatcttctcaaactcgggcccattgcgagccacgaactgggcgagcttgtcgatgacatttcgaagctcctggtctggaggacggagaaaaggccacgcggggcgtcagcgaggaccgcccaaagccgggggactcggcgccccagcccccgtccgccttgccggggaccccaagggggtgggccccgaagaggccgcccttgtacgggtcccgataggggccacacgctcgccgggaatgcggggacccacgggagaggccgcaggcgaagccgcgaggccgagccccgccccctcccagacccggggactccgggaggcggggccggccaataggaggttccggggagagagaaacggtctctcggccggtttgggtctcaccatcggggggcagcggcatctccatggctccggccgcggggaacgtcctccggcgccacacgatcgaccaccagcgccgtctgcggaagccggccggaagtggcgcgagggagccgtttacggcgggcttctagggccgcttccgcccgccacttacggccgtcgctgggaaactccggaagtgagagcgggaggcaggcgggaagaagccgcgcgatgcctggcgcgcgggaggggctagcgacgcgcacgcgcagaagtttcctgacactttcgcagagtgggtccccgtcgcgcggcgccgcggaaaggctggaacggcgcgggtgggtgttagtcgagaccggggggcgcggggcgtgccccttggtcggcgtcgcagcccgatgggctggctggttgctacctccgggcgaccaggggcctggggacttcgtgcctgggccagggtctctttcctttcgcgggcacagtgaggagactgcgaggtgaggtgcgtccgggtggatcccgggctgcggcgactgtcacattctccccggccagaccggaggtggagcagaactgggggcgacgagcttgactgggattgcagctggacgtatttaggttcaaaacatcctcctcctggctttcttccgctccactctttggtcaggaagactggggcggggtaccccccaacccatgccctcaaattgctggcctagagggcacagcgcctttctaaaagctgcagttgggttgcctctaaaataatgaagctaacccttgctaattgtggggaaaagatagccagaagcagcaaatttctgctgtggacgtccgatataaactgatcctcttgagatggttaatgcttagttggctatacctgccccccgcccccgccgcttttttttcctttatccgtttttttttttcttttttcttgagacaaggtcttgctctgtggcccacgctggagtgcagtgtcatgatcatagctcactagccctgaactcctgtgctcaagtaatcctcccgcctcggcctcccaaagtgctaggattataggcatgagctactttacccagcctgtttttttctgtgcaaataaatgcacatgtattttagattagtttcatttttattgttaacagcatttttccaccagatgcttatggattgacaactctacatcaagtgttgctgtaggctaggaatcaacaaaactttttgtataaaagggacagaaagcaaatattttagactctgcaggtcaggaggcaagatcaaggatttttttttttctaaatgtcctctagttcatattttctcatgaagatcgaggatcttaattgtttggtttttttttttttttgagacacagtcttgctctctctcgcccaagctggagtgcagtggtgtgatctcggttcactgcaacctctgcctcccgtgctcaagcaattctcctgcctcagcctccaggggagctgggactacaggtgcgcaccaccacgcccggctaatttttgcatttttagtagagatggggtttcaccaggttggccatgctggtcttgaactcctgacctcacatgatctgcctgccttggcctcccagactgctgggattacaggtgtgagccaccctacccagccttatttaggtatttctataaccagaaagaaaagttcataaaatttttgttggtgaaaatcaaaatatgataactgagtagtttcttaaatacaagttgctacagtttgaatgtttgttcctaatccccagtgaaacagtattaagaggtggagcctttaagaggtgattgggttatgaggtcgtgccattcatgtgttaatggataaataggttatcatgggagtgggactggtttggagcttgcagtgagctgagattgcaccactgcactccagcctgggcgacagagtgagactccatctcaaaaaaaaaaaataaataaaataaataaaataaaataaaaagaggaagaaaggccaggctcagtggctcatgcctgtaattccagcaccttgggaggccaaggcacgcagatcacctgaggtcaggagttcgagaccagcctggccaac

SEQ ID NO: 1560173 - DNA, 4001 bp, Homo sapiens
ttggctcactgcaaactgtgcctcccggcctcaagcgattcttctgcctcagcctctcgaatagctgggataacaagtatgcaccaccatgcccggctaatttttggtagagtggggttttgccatgttggccaggctggtctcgaaatcctgacctcaggtgatccacccacctcagcctcccaaagtgctgggattacaggcttgagccatcatgccgggccagcttatccttatagttaactggtttttttttttttttttgagacagagtctcgctctgtcacccaggctggagtgcagtggcatgatcttggctcactgtaacctccgcctcctgggttcaagagattgtcctgcctcagccctgctgagtagctgggattacaggcgtgcgccaccatgcctggctagttttttttattttcagtagagacggggttactctgtgttggtcaggctggtctcgaagtcctgacctcaggtgatccaaccacctctgcctcccaaagtgctgggattacaggtctctgagctactgcgcccggccctgtaatccctaaccttccaacttagctcccactttggcccagagttctgaattgtctggtccatgcccaactcttgaagctcacctgtcatctcccatttttttgaggctcttttttaacatttgctgctctgtctgcttaacacattccctgcccagatctgtaggctcactctcatcactcaagccttggatctcataccagttccttggaggcagccttccagaccctcaaactagggaagccctgctgacctttcactccactcgttttgctgaaagcacctgtgtttggtgtctggtctctcttgttcactgctgttagagccgtgcctgattgacagcaacctgcccgaccacccacactcaccatctggccttgcttggccatcttcttaatgtctgcaatgattttcttctcctgggtctctagtttctgtcgctcgcggtccagctcccgcatggcacggttcagggccctctggttctgccgcagtagctcctctggcgtcttccggcgcccgaacaataggtccatgatggtagaagctcactggcaggcctgagacagatgtgagtgaggcccagttgtagggcatggggcccaggagggcaagaagcagaacagggtcacgggagccttgccaaatgggaaggggctaacggagactggaggcaggaatgaggagccaaaagggagcagctgagaacactgggattgtcccggggacacataaagggggacaggtagacctgaaaattatccaagtgctggcccgagcccctccttcatcgccatgccccaaaagaagttatggcttgcaagttcagcttccctctccagaactatgggtgaggccctggagtccttgatacgactgagagcgggggatgacgcgggccggtgcactggtgttttggagactgtgggcaccgaggacagagcaattgtgggggttctgatagaggaggacaggatgggcggaaacgctaagtaccaagaacaggtgaatgtggggctgtgaagctcaggacaaggcattaggatttggggaccctgaatgctgagggagacggttgggggcgctggggcatcctgtacactgaggacgggatgatggagattcggtcgcactatacaccgaggacagtcagtgggcccggcaccaaagcaaggtggtgttggagacctcgatgttgacgacagggtcccagggagaagcgaggcaccggacacccgggcgagtagaaggcctcgtacgctgccgcccgcacgcccgcccgggatccacggtccagcaggggccactcaccggagctgggacggacacccgtttccgcttccgggtcacgcttctctttctgggatccccgacttgcccaccaactaaggcccctcggtcctgtcgccgccgccgccgtttccggattaaacgacgtgacgtaacatgccccgcccgcacccggaaggttgggaaactccaggagcgcgcgtgcgcccgtgccccggaacgggccagcgtccgagcgcatgcgcaacagctcccgtttcctctgcgcgtccgagtgtttcatgttttgagtcccgcccgagtgacccaagccagtaccggggtgggcgctttccacccaacctccacttgaggacccagcttattcgtgagaccttgacttctgcctgaggcctcagatagaaggagcctcagaaggctcctcctcctcggtgggcccacccacacaagaaaggggcaaagctagagatggcttgtttcttccactttgctggcctcttggccaggaagccacaggtcactggatcctgcctacgcttctcatcctagagtaggcttcatcccaaccaaccccaggcacagtcatggtatccccaccaactttagagctgccccaggcactgggcagcctgttgtagggtgctccaatgccacctgtgaccacaccttccaccaccccagctttgcaggccctaatggacctcagctgcccctcccaccccatagaagtaagaagcagaggccatgcagtaacattcccctttaatagcctggtgggacctccagaggtggaggggtgggttgcctgggcccagctacccaggcccgttgcccacccactccacagcccagagtgggggctgaacaagcacccagcaggggggctagacaagccaattcatttcccatcgctgagtgggtcgggggaggcagcgccgaccttaatcacatggtgttaaaaaaaaaaaaataactaggggcacgtggcaggaaggggaggcaaggccaaggcaggggattcccccaccggccgccccccaaacccctacccatggcccccaataaatatttgcaggggatgccagggcttgtggccgtggcgggggtgggtatgcgccaaccctatttcaggcagcgctcaaagtaggtggagccgatgtagccaccccgcatggagcgctgcacgttctgctcaaacagccgccggttgttctgcaggacctctgcggcctccttgttcagtgggtcctcggggttgggctcctgtggccagtacaggtagggggggtcaacaggccagagggacagaaggccaatctccccagacccaaccacctattcctactcaccaagaagagatactgcaggccataaattatggagtttatcgtaaggactggcttccagtcctctctgtggacagagagcatcagggtcagggcttggtgagtgggagactgccacaggcccctctggtgttgggcaggtcagatccagggcataggagagtgagcatgtgagaggctgggagggagggtgtggagcaggacaggccaaggagaaaaccaaggtcaggccatgaggaagatgactgggaaatcaagaaaccacagacaacaaaggggtgggaagggacagagtctgatgtagtgcccacaagaccatgagggaggcctggcaggcagcgctgaggagggcattagagggccagtgtcctcacctgaggatgttgaggcagacgttgccctcgaggtcaatgttggggtgatagaccattgtctcacacttcaccttggggggatcatgcgggtaaccctggcccacctggctccaggaaaagaaaagagagatgggtaggtgcctggaagggcctcagctgctgcctcctctgtccagggagccatccctgcccgcctgggactcaccttaaaactgaacacaaacttcccactcttgtagaagccctgggaggaaaagggggagaagaaaattttagggttccatcctgtggggcccgatgggcagaacatgtctccctcctctcagtggggacacccttggtttgctcctgggaattcagccatatgcaccctcacctcatcaggacagatgaccagcttgaagttgaggaggtcgtctggatctgagaagctgatatc

SEQ ID NO: 1560174 - DNA, 4001 bp, Homo sapiens
actggttccggctgtctcttaccagcctcttggccatagcttatagcttacccttaccttttttttttttttgagttggagtcttgctttgttgcctaggctggagtgcagtggcacaatcttggctcactgcaaactgtgcctcccggcctcaagcgattcttctgcctcagcctctcgaatagctgggataacaagtatgcaccaccatgcccggctaatttttggtagagtggggttttgccatgttggccaggctggtctcgaaatcctgacctcaggtgatccacccacctcagcctcccaaagtgctgggattacaggcttgagccatcatgccgggccagcttatccttatagttaactggtttttttttttttttttgagacagagtctcgctctgtcacccaggctggagtgcagtggcatgatcttggctcactgtaacctccgcctcctgggttcaagagattgtcctgcctcagccctgctgagtagctgggattacaggcgtgcgccaccatgcctggctagttttttttattttcagtagagacggggttactctgtgttggtcaggctggtctcgaagtcctgacctcaggtgatccaaccacctctgcctcccaaagtgctgggattacaggtctctgagctactgcgcccggccctgtaatccctaaccttccaacttagctcccactttggcccagagttctgaattgtctggtccatgcccaactcttgaagctcacctgtcatctcccatttttttgaggctcttttttaacatttgctgctctgtctgcttaacacattccctgcccagatctgtaggctcactctcatcactcaagccttggatctcataccagttccttggaggcagccttccagaccctcaaactagggaagccctgctgacctttcactccactcgttttgctgaaagcacctgtgtttggtgtctggtctctcttgttcactgctgttagagccgtgcctgattgacagcaacctgcccgaccacccacactcaccatctggccttgcttggccatcttcttaatgtctgcaatgattttcttctcctgggtctctagtttctgtcgctcgcggtccagctcccgcatggcacggttcagggccctctggttctgccgcagtagctcctctggcgtcttccggcgcccgaacaataggtccatgatggtagaagctcactggcaggcctgagacagatgtgagtgaggcccagttgtagggcatggggcccaggagggcaagaagcagaacagggtcacgggagccttgccaaatgggaaggggctaacggagactggaggcaggaatgaggagccaaaagggagcagctgagaacactgggattgtcccggggacacataaagggggacaggtagacctgaaaattatccaagtgctggcccgagcccctccttcatcgccatgccccaaaagaagttatggcttgcaagttcagcttccctctccagaactatgggtgaggccctggagtccttgatacgactgagagcgggggatgacgcgggccggtgcactggtgttttggagactgtgggcaccgaggacagagcaattgtgggggttctgatagaggaggacaggatgggcggaaacgctaagtaccaagaacaggtgaatgtggggctgtgaagctcaggacaaggcattaggatttggggaccctgaatgctgagggagacggttgggggcgctggggcatcctgtacactgaggacgggatgatggagattcggtcgcactatacaccgaggacagtcagtgggcccggcaccaaagcaaggtggtgttggagacctcgatgttgacgacagggtcccagggagaagcgaggcaccggacacccgggcgagtagaaggcctcgtacgctgccgcccgcacgcccgcccgggatccacggtccagcaggggccactcaccggagctgggacggacacccgtttccgcttccgggtcacgcttctctttctgggatccccgacttgcccaccaactaaggcccctcggtcctgtcgccgccgccgccgtttccggattaaacgacgtgacgtaacatgccccgcccgcacccggaaggttgggaaactccaggagcgcgcgtgcgcccgtgccccggaacgggccagcgtccgagcgcatgcgcaacagctcccgtttcctctgcgcgtccgagtgtttcatgttttgagtcccgcccgagtgacccaagccagtaccggggtgggcgctttccacccaacctccacttgaggacccagcttattcgtgagaccttgacttctgcctgaggcctcagatagaaggagcctcagaaggctcctcctcctcggtgggcccacccacacaagaaaggggcaaagctagagatggcttgtttcttccactttgctggcctcttggccaggaagccacaggtcactggatcctgcctacgcttctcatcctagagtaggcttcatcccaaccaaccccaggcacagtcatggtatccccaccaactttagagctgccccaggcactgggcagcctgttgtagggtgctccaatgccacctgtgaccacaccttccaccaccccagctttgcaggccctaatggacctcagctgcccctcccaccccatagaagtaagaagcagaggccatgcagtaacattcccctttaatagcctggtgggacctccagaggtggaggggtgggttgcctgggcccagctacccaggcccgttgcccacccactccacagcccagagtgggggctgaacaagcacccagcaggggggctagacaagccaattcatttcccatcgctgagtgggtcgggggaggcagcgccgaccttaatcacatggtgttaaaaaaaaaaaaataactaggggcacgtggcaggaaggggaggcaaggccaaggcaggggattcccccaccggccgccccccaaacccctacccatggcccccaataaatatttgcaggggatgccagggcttgtggccgtggcgggggtgggtatgcgccaaccctatttcaggcagcgctcaaagtaggtggagccgatgtagccaccccgcatggagcgctgcacgttctgctcaaacagccgccggttgttctgcaggacctctgcggcctccttgttcagtgggtcctcggggttgggctcctgtggccagtacaggtagggggggtcaacaggccagagggacagaaggccaatctccccagacccaaccacctattcctactcaccaagaagagatactgcaggccataaattatggagtttatcgtaaggactggcttccagtcctctctgtggacagagagcatcagggtcagggcttggtgagtgggagactgccacaggcccctctggtgttgggcaggtcagatccagggcataggagagtgagcatgtgagaggctgggagggagggtgtggagcaggacaggccaaggagaaaaccaaggtcaggccatgaggaagatgactgggaaatcaagaaaccacagacaacaaaggggtgggaagggacagagtctgatgtagtgcccacaagaccatgagggaggcctggcaggcagcgctgaggagggcattagagggccagtgtcctcacctgaggatgttgaggcagacgttgccctcgaggtcaatgttggggtgatagaccattgtctcacacttcaccttggggggatcatgcgggtaaccctggcccacctggctccaggaaaagaaaagagagatgggtaggtgcctggaagggcctcagctgctgcctcctctgtccagggagccatccctgcccgcctgggactcaccttaaaactgaacacaaacttcccactcttgtagaagccctgggaggaaaagggggagaagaaaattttagggttccatcctgtggggcccgatgggcagaacatgtctccct

SEQ ID NO: 1560175 - DNA, 4001 bp, Homo sapiens
aacattcagaccctcaagaggtccctctcttcagggttccaatgttattcctcccgtgggtcacttcacagaggccagtctgctgaacgctcctgaatgaactcccacgccgccttctgtgcttggggtgtcctgattaaaattaaaagaggatctcctgctgggatgagtgtccttcctgtggcctgtctgccttgcctttgggacagggcacagggtgggcaggaaaggtcatgacagctggaaaatgttaagggctctgccacacctgctccacgggtgccctgtcctagggcaggacttagggaaagacttccccacaggtaggcaagggtcaaggtgaactcagaagagaaaggttacccaggaaagtgggcttggtattgtagctcctgggggccttgggcggcggtgggaaataaaagggggttgatctgcctcttacccctctgtcccccgcccctctccaccatccactccaaagcagctactacctccctgcacccaacgcctctcccacgtgctctgctgctgcgccagatcgcgccaagcagatggagaggggccgggacgcgcgttccccttaacggagctgatcacggctcctgagccagcgggagtggcccagggacgcagagtcctctgggacgccggagacgactgcaggacagagagccccaggatcggcgcctacttctgggttaaaacagacagccgggcagcagcgcccacagccgagggcgccgcagccgcttcaactccgggtcggggtcgcgggcctggagacaagatgtacgcgaaagttagggcggcgggagtcccgcactggagaaggaatcggggtcacatcagacccaagccccagcatcgggcactgccaaaacccgtgatcgccctcctggcccggctggcctccagcgaggccagagcgggtctgcagagtcggtagccggagttgcagccgccgtcagagctcggctcggtcccgcggccaaacggatcatttccccgccccctggagccgccccaggctccgactcccgcactcccgacacacgcacgcacacaccttcacaccatcgctgacgcacgcacactcgcctccagcactcacaggccggtgccctggagagttgcgggtcggggacgcgcgcgacggagccgctgggtaggaagccaaggccacttaaacttcccccatagtctctgcccgccgcaacccgtccggagccccggctccgagcgcgccaggaagccccagcgccccgagcgctcctgcctggccctcggcgctcgctgctcagcgcccgacgccgcctccccgcgggcagcaccgagggccaggaggcggagcgggagtccgcagggaccaagagggcccgagggacggcagttcccagaagcgcggcagcgagtgagatccaaggagagaaagtctaattaaagttcccgctaccggggccggtccccaaagtgcaaccagacccgagccccgcgcgcccacctccgcccgcagcttcggactcccattcgcgtgcggtggcggggatggcgagcggtgcagtccggggcccgctcgggaccccttcctggcgtctctgcaggccaggagcctgcgcagggcgggaacaggggtggggcaggggcgcagccacttacctggcgcagcggacgcacccgaggccgcgggcgcctccagtccgggagcggttctccgcggcggatcctctgcttggggcgcgcaggcggcggagaggacctccgacccagctcgggcccggtgcctccgcccgctccaagcggaacccagtgcgatctgtgggcgagcagcgtggggccggcagccggagcgtgcggggagcgagagggcgcggggcggcgttcctcttcggcccccggcgcgatcggtcccccacctcctgctgccgccgccgcctcgtcctctctcctccccgcagcactgccggatccggcttgcgcgccgggaaggctcccagcgaagtgagagcgaagcctccggcgaggctggaaatagcgccgcgcccgcccggcgccccgcccccggcccgtgccccgccccgccgtggtggcggctacggcggtggccgggccgggcggggatcgctccagcgatgcactcggccctcccgggggctcgcgggcgccgcgcccacgcgcgctctgcggctcccgcggcccctctggcagcgctctcagaaagagtcgctgctgggcgcggtccggcggccgcgggggtgggagcggtcgtggctggggctgcgccggtctcccggttcaggagagccggactccggcctgacgctaggctccagaccgcggccagtgctgccactgcctcggtgggtcgcacgcggcgccaacccgggaaaaggaccaggcgtcaccggggcgggccttgaccacagcggggcaggggcgcgcgcccaggacccgatgctgcgggggcgcagggccggtgaaaggcggaagattgatcctgaggaagattctgggatatccctgggcttcagctcgcgtggaattcggtcaaggccgcgagctgcctcaggcccgggtgtccgcatccatcctcaaatccctggggctctagattctgctgaaagtgccctgcgaacaggtgctcccttcaggacttcatcctggaagtttgtgtcgggtcaccagcctgagagcggggccaaccgaccctcttcatacacactcgggaaaacagcgtggagggtggaaccggcccacggccacacagcaccgggacagagtagggacaggaacacggggccctggattcgggtccttgttcttcctaagaagaggcagccccagcctgcaggggacaagcaggccttgggaaggggggcaactgctttctcacaggagctggaggaaactgtgcacacagtcacctgttagtcttgaagggacactcagtattttcaaacaacagcagagaagcctttaataaagtgaaagacccttactctctcctctctaatggtacctgctggctggttggcctgactcctaccagctgacctagagtgagtgatggaattggggagtgagctgggcccatgggtcttgactgaccagagtgggggacaccaggcggagagcagagccactcctggggacggccagggagcccctcagccccagggccatgaggcctccttaatgccccaggtaagctcagagcatccaaaaatagaccaggacagataagaagataaatagaagcatgacaaagagatcatggtcttcctttaattcttgcagcaacagagtagacattatcactcccgtattacagatgagcgaattgagatgcaaaaatgccaccattttgctggactccacgcatctggagaatggcccaggtgtgatgattccaaactgggataggctttgttctggggttccctttccaggactttaggctcggagtgacccaggcctggggctgcgctgggacccaggcacactccactggctgcacgcatgaggggaatgtgtgtgtgtgtgtgtgtgtgtgtgtgtgtctgaaatcaccctcctccgcctcagtcaggtgcagattggaggagctgagtgcaagggccagggactcaagtgtcaggaaaaacagggcagtggaacccttattcatcctacatcccaaagctgttggagcagagcaggagagaaggtaggaacaaagagaggggagagtggagtgagcaaaaagtcacttgccggactagctcacagtgcaatgaccccatccctgtccctgtggtccccttaccccacacttgcagcccctcttgccacccaaggtcctgaccatagcttggctgggcagctgcccatgagctccctgtctgcagttaggcctggaacagagcacacaacttttgccacagaggcctgatggtcaagagaatctcttcagtaccatgaacactccagagggcaaatgcatgcacacacacacacacatg

SEQ ID NO: 1560176 - DNA, 4001 bp, Homo sapiens
cccactggaaccaacattcagaccctcaagaggtccctctcttcagggttccaatgttattcctcccgtgggtcacttcacagaggccagtctgctgaacgctcctgaatgaactcccacgccgccttctgtgcttggggtgtcctgattaaaattaaaagaggatctcctgctgggatgagtgtccttcctgtggcctgtctgccttgcctttgggacagggcacagggtgggcaggaaaggtcatgacagctggaaaatgttaagggctctgccacacctgctccacgggtgccctgtcctagggcaggacttagggaaagacttccccacaggtaggcaagggtcaaggtgaactcagaagagaaaggttacccaggaaagtgggcttggtattgtagctcctgggggccttgggcggcggtgggaaataaaagggggttgatctgcctcttacccctctgtcccccgcccctctccaccatccactccaaagcagctactacctccctgcacccaacgcctctcccacgtgctctgctgctgcgccagatcgcgccaagcagatggagaggggccgggacgcgcgttccccttaacggagctgatcacggctcctgagccagcgggagtggcccagggacgcagagtcctctgggacgccggagacgactgcaggacagagagccccaggatcggcgcctacttctgggttaaaacagacagccgggcagcagcgcccacagccgagggcgccgcagccgcttcaactccgggtcggggtcgcgggcctggagacaagatgtacgcgaaagttagggcggcgggagtcccgcactggagaaggaatcggggtcacatcagacccaagccccagcatcgggcactgccaaaacccgtgatcgccctcctggcccggctggcctccagcgaggccagagcgggtctgcagagtcggtagccggagttgcagccgccgtcagagctcggctcggtcccgcggccaaacggatcatttccccgccccctggagccgccccaggctccgactcccgcactcccgacacacgcacgcacacaccttcacaccatcgctgacgcacgcacactcgcctccagcactcacaggccggtgccctggagagttgcgggtcggggacgcgcgcgacggagccgctgggtaggaagccaaggccacttaaacttcccccatagtctctgcccgccgcaacccgtccggagccccggctccgagcgcgccaggaagccccagcgccccgagcgctcctgcctggccctcggcgctcgctgctcagcgcccgacgccgcctccccgcgggcagcaccgagggccaggaggcggagcgggagtccgcagggaccaagagggcccgagggacggcagttcccagaagcgcggcagcgagtgagatccaaggagagaaagtctaattaaagttcccgctaccggggccggtccccaaagtgcaaccagacccgagccccgcgcgcccacctccgcccgcagcttcggactcccattcgcgtgcggtggcggggatggcgagcggtgcagtccggggcccgctcgggaccccttcctggcgtctctgcaggccaggagcctgcgcagggcgggaacaggggtggggcaggggcgcagccacttacctggcgcagcggacgcacccgaggccgcgggcgcctccagtccgggagcggttctccgcggcggatcctctgcttggggcgcgcaggcggcggagaggacctccgacccagctcgggcccggtgcctccgcccgctccaagcggaacccagtgcgatctgtgggcgagcagcgtggggccggcagccggagcgtgcggggagcgagagggcgcggggcggcgttcctcttcggcccccggcgcgatcggtcccccacctcctgctgccgccgccgcctcgtcctctctcctccccgcagcactgccggatccggcttgcgcgccgggaaggctcccagcgaagtgagagcgaagcctccggcgaggctggaaatagcgccgcgcccgcccggcgccccgcccccggcccgtgccccgccccgccgtggtggcggctacggcggtggccgggccgggcggggatcgctccagcgatgcactcggccctcccgggggctcgcgggcgccgcgcccacgcgcgctctgcggctcccgcggcccctctggcagcgctctcagaaagagtcgctgctgggcgcggtccggcggccgcgggggtgggagcggtcgtggctggggctgcgccggtctcccggttcaggagagccggactccggcctgacgctaggctccagaccgcggccagtgctgccactgcctcggtgggtcgcacgcggcgccaacccgggaaaaggaccaggcgtcaccggggcgggccttgaccacagcggggcaggggcgcgcgcccaggacccgatgctgcgggggcgcagggccggtgaaaggcggaagattgatcctgaggaagattctgggatatccctgggcttcagctcgcgtggaattcggtcaaggccgcgagctgcctcaggcccgggtgtccgcatccatcctcaaatccctggggctctagattctgctgaaagtgccctgcgaacaggtgctcccttcaggacttcatcctggaagtttgtgtcgggtcaccagcctgagagcggggccaaccgaccctcttcatacacactcgggaaaacagcgtggagggtggaaccggcccacggccacacagcaccgggacagagtagggacaggaacacggggccctggattcgggtccttgttcttcctaagaagaggcagccccagcctgcaggggacaagcaggccttgggaaggggggcaactgctttctcacaggagctggaggaaactgtgcacacagtcacctgttagtcttgaagggacactcagtattttcaaacaacagcagagaagcctttaataaagtgaaagacccttactctctcctctctaatggtacctgctggctggttggcctgactcctaccagctgacctagagtgagtgatggaattggggagtgagctgggcccatgggtcttgactgaccagagtgggggacaccaggcggagagcagagccactcctggggacggccagggagcccctcagccccagggccatgaggcctccttaatgccccaggtaagctcagagcatccaaaaatagaccaggacagataagaagataaatagaagcatgacaaagagatcatggtcttcctttaattcttgcagcaacagagtagacattatcactcccgtattacagatgagcgaattgagatgcaaaaatgccaccattttgctggactccacgcatctggagaatggcccaggtgtgatgattccaaactgggataggctttgttctggggttccctttccaggactttaggctcggagtgacccaggcctggggctgcgctgggacccaggcacactccactggctgcacgcatgaggggaatgtgtgtgtgtgtgtgtgtgtgtgtgtgtgtctgaaatcaccctcctccgcctcagtcaggtgcagattggaggagctgagtgcaagggccagggactcaagtgtcaggaaaaacagggcagtggaacccttattcatcctacatcccaaagctgttggagcagagcaggagagaaggtaggaacaaagagaggggagagtggagtgagcaaaaagtcacttgccggactagctcacagtgcaatgaccccatccctgtccctgtggtccccttaccccacacttgcagcccctcttgccacccaaggtcctgaccatagcttggctgggcagctgcccatgagctccctgtctgcagttaggcctggaacagagcacacaacttttgccacagaggcctgatggtcaagagaatctcttcagtaccatgaacactccagagggcaaatgcatgcacaca

SEQ ID NO: 1560177 - DNA, 4001 bp, Homo sapiens
catcatctcatttgttcagtagctggcgctgcagagtggttacaagagagctggccggtcctctcttctccccagtctgtctccattcgagccagtaccgacatccactgtcaaggactaaatgggtctgcagcgaagacctgtcctcacttgtttctgaaccgccccaaaccaaacccaccccatgatgcctggctccagccacccatgtgcctgggagccagggcaaggaccagatccatgcccccaaatccaggaaggggaagaagacacagacccaggaccacacctccatggtggtggagcttcatctgttcacgtttcccctttcaaagaccctgcctttgctggcccccgagagaacacgaacaccctctctctatacccagggaagctggcattggagccgtctgtggcttcagggtttagcccctaagcctcagaccccagcttttccctctgggaccctcagctctgtgtttgttctcactggggaccatctgaccagctaactccctgctccgtgcaaacaggaatcaaaaggtcagcgtgcctcccctcctgggtaactggccagcagtatggctggccaactggactctatagaacactcctttcccctaaggtgtgggaagggagggtggtcaccgacagatccccgggcattccagggggtgtagaatcctctattgttcctcggaggaccccaggcttccaagtcgcacgttgttttcaaggcaacaggagctgctggtctaagagctgtctgtctccctctcctgggagtccagctgctgcctggggagtggacaccaccatctgtcacaggctggggcctggaaggctgggggatgaggcataaacacagtcacaggcctcagcctccacctgggactgtcccatcctcatcacagactatatcactctcagctccgatgacaagggcaaaacctgccttcacctgcttacacccatcccaagaccaacagacaataagaaaatccagccttccaggggcagagaagagggagggttcaggcaagaaaaataaacagccccagcgagtttccagcagctcctgcctggcctcacaattcctagtcctcctggtggcttttctcccccaggcctgaatggcgtcaccaatttttactttaagaaaaaaaaaaaaaaagatccaattaatcttataaacccctcctgggacacagggcagggcgaaggattcctcccatttccttatttatttgatttaaaaatgtgtctctttgaagaaattcacttcagggcacaagcaaggacttgggaattcagccaaaacacacgcacctccagtggcgaccggcagcaggcggacagacgcatggacggctccaaggacacgcttggctgcagctgcttctgggcctggacgctcccctcagctgcccagaggattccctgtggccgtggggacctgtccctgtgcctggctccaggcagcatgggtgcacccacgtggtcagcggaccccgggctcgggaaagttctctgtccggtgggtctccttgcaccacacgggcaggagagaacaatgacgtccctcccggctgagggctcccggagaagctgcttgttgggagagaggctgctatggcaacttgaggagaatggagccaggcactgccgtcaccttgaatccggcaccgtgccttctgccgcggtggcagcagcggggactctgcaccgggcgctggtctctgagccctggcttccctcctcagcctcctggcctcgggaactcatctgctcgtcgccgatcgatcggtgggagcctacagcccagtcccccgagagcaccacctccttctgttttgtcagactagttcttccctgcgcgcggctctcgcttacttctgagatggggctcttcttgatttcagctcattaaaaatcctgcagctaattaaaaccgctctaatggcagcggcggcggcggcagcaaactctgggacgagtccctccagtttttatgcgtaggcataaagttgcaatgctctgcaaggttgacggatgggcgcgagtgctcagactccaaggcggggctgccgactctcaggctgcctcctgccctgctgctggggagcgctggcctgggtcctgaaatccccagagccgggccttggcacacccaggcccctgccgggcggcacgctactcccggggaaggcaatttacctgctgtccgctgccctgttacaaggcagggttctctccactcccccccagccccatgctctgcagcggggagaaagggcgttccgaggtggagattaccgggtgaatcaggctcacaaggtcctaaagcttgccaccatagccctactaggagcaccacagcccggcctcccaccatcacggacacattccagttggagtctgaggggcgcctgcaaacacacagccacagcgaggggggcctgagagcgtggccaaagactgacaggccacgtcaactgaccacaccctggacactatctctgcccagggcttcttacatgttgaggacattttatgccagtggggcagggcaggggacagtcattctgcatgtaaagaaactgagtcccctgctcctcctcatcctggcagagtctagaatgctgactcagtgccccgaattccctgaatgtgtgaaccttggttccctgagagcaccatcgcggtgacagcccttccctcactgtgggaaaagcatttgccacctgcctctgaatcgggaatcgcatcgaggcctctccccatctttgtattcccagcacctagcacagtccccggcacagggaaggtgatcaatagcctctgctgcacgttgaatgagcacgagttaatagatggaagtgtttggggccatctggagagaggcactccatgaacctggaattttaaaaaggtcatctatgtttcagggagctgagggtttgttttcctcagagctgccttggaatcaggtccaaagagtagcccaatcctatgacaggaggcaaggaagaagcaaggaagaaacggcccccagggagcccagtggagccttaaagcttgaaatacccgaggcccgctcgccaccaggacctcacttttgcctcctcatgtcagtatgacagatttcagatcacagagcttgaagacaaatacacttttaaagacaaatgttgattctccctctacatatacatacacattaacaggtgcaatgtttacacaaaagacacacaccattgagatgccacaaaattgactgattgtcccctgacatggtttggatatgtgtcccctccaaatctcatggtgaaatgtgatttccagtgttggaggtggggtctggttggaggggactgaatcacagggtggatccctcatgaatggcatggtgccatccccttggtgatgagttggttctcattcagttcatgtgaaatctgactgtttaaaagagtctaggacctccccactcatctctctctcactgtttctcttgccatgtgaccggcctcctcccactttgccttctgccatgattgtgagcttcctgaagccctccccagaagccgagcagatgccaacaccatgcttcctgtacagcctgcagaaccacaagcgaattaaacctcttttccttataaattactcaacctcaagtatttctttacagcaacacaaaagtggactaatgcatccccaaacctttaaaatatattgtgatgctaggaacccccccaaaaaattacagcttgcatgtgtcaatcaaaaagtcaatgatagcaacacatgctacaacatgggtgactcttgaagccatcatgttaagtgaagcaagccagacacaaacggacaaatactgtataattccacttgtgtgaagtaccaggagtagtccaattcatagagacagaaagtagaatgcaggttaccagggactggaaggaggaacagggagttgtttaatgggtacagagtctctg

SEQ ID NO: 1560178 - DNA, 4001 bp, Homo sapiens
atcctgaccactcagttccctgtcggggtcccatcagggaataccctgggtttaggtttctgtgtggctctgagcatgttcctctcctctccctctctgtgccttggttattctatctgataagcaagaagcttgggacagacaaaatgtctgtccttggggccttggggctctgtgcatttacccttcagcctgggatcagccccgccctgtctgagcctcagtttccccatcagtaatttgatcgtgatggccgaggtgaccctgcaagctgtcctcacccaaacaatggggctcactagtaaaaggtgtggccatcaataatggatgtcctgttactacacaactggggccttggccccgatcacactgcagctgaaccctggccagcttgggtttcatagctccaagttcatgggtcggggcccctgggcaatggccccacaggccgagtgatgatgtgggatactcatctgtgcccatcgtgctgggtcacgccagggacctgcagcagccttgggccacctcctcacaccctcatcttaatgccaagcccacaacccagactgggctctggactttgcacctgggctcccagcctcaagtcccagtctcaggagaatctttatctttcattttgtttttctgaggcagagtctagctctgtcacccaggctggagcacagtggcgtgatctcggctcactgcaacctccacctcccaggttcaagcaattctcctgcctcagcctcttgagtagctgggattacaggcacccaccacctcgcccagctgatttttgtattattagcagagatggggtttcaccatgttggccaggctgatcttaaactcctgacctcaggtgatccacccaccttgtcctcccaaagtgctgggattacaggcatgagccaccgcgcccagcctcaggagaatctttctaacgtgctgatggtctctcccctgctcatgcatgctccatagctccctgccacccttgggagaaagcccaagctcatcagcctagagactgggacagtatgacaagatgtgacttgtcagcttctccatctctgcctctgtccactgaccacacctgccccccttccccatttgagtcccaacaaattggaaataccagttgggcatggtggctcacacctgtaatcccagcactttgggaggctgaggcagggggatcgcttgagcccaagggtttaagaccagcctgggcaacatagtgagagccccatctctataaaaaaatacaaaaatgaggtacatgtggtggctcgcaccagtggtcctagctactcgagaggctgaggtgggaggatcacctgaccttgggagatcgagcctgcaatgagccatgattgcaccactgcactccagcccaggcaatagagacagaccctgtctcaaaaaaaaagaaaagaaggaaggaaggaaggaagggagggagggagggagagagagagagaaaagagaaagaaagaaagaaagactacttacacacacacacacacacacacacacacacacacacacacacaccaaattgcaaatatcctccagcaatgaatagaaagttgtttttccagatcttctctcccttcctccctggactgacctcatgatctccttccttgtgaaaaatgtgcagtcctgtggagagaggtgttgtcttaacccgaaccctgcctctggggcctcctcccacggcctcctccctccaccccacactcacacagatggcctgatgctgccacacacagagcagaaccaggaacccaggcggacggtacacccagatgaaggcattctgttcccatttcccagaccacggaaccaaagttgtcaaacccactgaggacccatcctgcccccctctacctgatacgcttccagctgctcgtgtgtgaagactgtctgcttgttgcccatggtgtgaaccacagcccagacttggggatgcaccccaaaggctcccagcttcctcggggccacacgggttgccaggctgttgtgtaccagtgtctgggcaaatctccctgccctggctgtcacccacccacctacgccatcaccccctgcttgatgagactcaaattacagccaggctctctggacaacagcctgaatgtgtccatgggtaaggataagggctgtgggatgtcacagagaagacctcagtggggaggccacatctgccaccacaaggtgaggctggggttatggggcacactcaagagacaggcagggtatacagaagggctatgggcacactgcagctcaaatcccagctctctgcccactagctgtgtggccctgggcaagtcacctgacttctctgaacctcattcatgagatgaaaattacattatacctacctcatagggtcattctcaggatctgagatttaaaaaaaaaaaaaaaaggttttgactgggcaaggtggctcacacctgtaatcccagcactttgggagggccaggcaggcggatcacctgaggtcaggagttcaagaccagcctggccaacacggcaaaaccccatctctactaaaaatacaaaaattagcttggcattgtgacacatgcctgtaatcccagctactccagagactgaggcaggagaattgcttgaacccaggaggtggaggttgcagtgagccgagatcccgccattgcactccagactgggtgacagagtaagactccatctccaaaaaaaaaaaaaaggttttggctgggcgaggtggctcatacctgtaatcccagcactttaggaggacaaagcatgagattcacttgaggccaggagttcaagatcagcttgggcagcatggcaaggccctatctctactaaaaatacaaaaattagctggatgtggtggtgcatgcctgtggtcccagctactcaggaggctgaggtgggaggattgcttgagcccaggagtttgaggctgcagtgagccatgattgcatcactgcattgggaacataatggtgaacaagctagatgaagttctggggtgtgcattgacattattattttattacattttatttttttgagacagtctcactctgttgcccaggctggagtgcagtggtgtgatctcggttcactgcaatctctgcctcccaggttcaagtgattctcctgcctcagcatcccaggtagctgggaccacaggtgtccaccatgccaagctaattttttttgtattttttttttttgagacggagtctcgctctgtcacccagtctagggtgcagtggcgtgatctcggctcactgcaagctccacctcccgagttcaggccattctcctgcctcagcctcccgagtagctgggattattacaggcgcccaccaccacgcctggctaagttttgtatttttagtagagacagagtttcactatgttggccaggctggtctcgaactcctgacctcaggtgatccacccgcctcggcctcccaaagtgctggaattacatgtgtgagccacctcgcccggcccaaagggcagatctaatgtagcagctaccaactttattaaggcccagaatcctcttgggtggagaatctgagagtctaaatttcttagcctggccctccatgcccttctcactttgggtctcacctgtgttttctctacctggcctggactattgcaatgtttcccagcaggctttcctgcctcggcctcatcaagcatcctctgccaaatctgtgcagtcatcttgtaaaatgtgaccctgatcaggcttgaaagatgcctcaaggatgacttttttttttttttgagacagggtctcactctgtcacccaggctggagagcagtgatacaatcatggctcactgcagcgaccctccttcctcagcctcccaggtagctggcactagaggcacatgctgccacatccggctaatttttttttttttgtattttttgtggagacagggtctgtctatgttgcccaggc

SEQ ID NO: 1560179 - DNA, 4001 bp, Homo sapiens
cccccacccccaacaccagagcctcttggactcgtccatgcaacgtcactcaggaaaaactcctccctgaaaggtttctagatttataaaaaagaaaacagaagcagggaagggaaatagtactcacgccccactcctccccccaccaatctccaccagccctgccaccagggaccaggccagaggaacgatttgctcctgccacaaaccaggtcatgcttggctgccatcccacactcccaaggccccagacctctacgggctgggacccccacccccgtcatgccacattcccagcagcccagtcgccgcccaacacagcgtctcaccttggcctcatgctctctttccctttcctgaggcatacggccccacgtcccctcccctccaactctccgttcactatgcacaggctgtggggtctcttacaactgtggtgtgggagaggtcctgctccttgccttcctcccccaccacaaacacagagtgccagacctgcccttcctggctgggcacaggtggctccagcagctctctcctttgcccccacaaagacaatgcaccatccagaaatcggcctcccagcctcccttccccatcagcccctcggcttatctgtagtccagggtccagcccccttgcccaaaacaggggagggtgtggtaaactccttggaagaaaaaccacggacaatgggccagaagagagaattgtaacaagtctctacccagagagggcacaagtgccaggtgtttccttgaggatatgcacaggaagatgcttcctcaccaagaggctggtcccaggggtccaaccttcagccccaagaggtgggtggtggaagagcaagccctaggctgggacctacccctggctggacttttggggcgggcctaggataccagtgggcttcccctcacactgcctggctccctgggggaagtggaaccagcagaggagagaggcccctgctcggggaagatgaagaagggaggagggaaccgccctagccctgctctccatcattccaggccttcccttgatccggatcaacctgacctgaggtgacctccccatgccttcagaagcctggacaggggggagctctgtgcgaggcactggcctcgagacctgattctgagaggggctgacaaaggaaaaagtagacctcaggaaacaagggactgggatcacgaagacagcactgaagagcactcaagactacgatgaccctgtcccttacccctgaaaacccgctgggccctccaaccccatataaaagcctccagggacttagacctgtgcctctctttgcaaagatctttcccatcaaggcctcctcttttctggggggtggggaaaagggacccagcagacaatggagggcagtcctttggtcctgctccctcctgaacccctccccagtgcacaaccctccaggttcttaggtgtcgcgctctctgcaaactacaccacacactgcagcctgtcactctgatctcagctaacagtgcctcactcgcttcctgagccctgtccttagccccactacccaatccaagcctcctcccctaggaccagcaggtctcgtgctgttcctattctaccccatgctccagagccagttactctgcacccctcacctttctattacagcggacctgtgccatcccatcactttaacatcacagctgtccccagatacgccccactccgctacactcccacctgccatcactaaccactcggcccggccgagctccgtaactttccccgtcatccctttactctgcctctactgttctctcccctactatacccccaccaccgttactccgcacttagcaccccgacaccttgacccctgcagtcccagggcccaggcgctactgaccgaacatgccgaggccacgggaggccgcgctggacgcgggcatcaggggcctgtgggccgaatacatggtccggcgcaggggggacccggcaggggctcgcacctcctcagcggccgacgccgctccgcccgcagcccgctcctcggccgtcgccgcttgggcccggggggagcgggaggccgtcgccgcatgcccccccccccgccgcccccctccggccgccccacgcgggggtctctgccgggcgcgcctgcgcacagcgccgcctgcctcccgccgcccggggggcgggggaggtcagcgcgcaccggccccgccccgccccccggcgcgcgcgggggccgtcacggggcgcgcggcacgggggccatcggcaccgccccctccctctccctcctccctcgcggagtccggcgggcggggcaggcggggcaggcggggcggggcgcgacgcgcgtgcgcgggggcggccccctcccttccccgctcgctggctcgctcgttccctccctccctcgcagctccggcgggtaacggctctggccccgcgcgtcccggctgccggcgccgccgccccgcctttccgggccccgggcccgaggctcagcgccgggtcgacctccggccccgggcgggcagacggaccagcgtgcgtgcgtccgtgcgctccgagcgagccccgcgccgaaccaccaccgcctccccgccccgccactactacgcgctcccctccccccgccgcgcctccccccgccccttccccgcttcccccgcggccttccgcgcaagcccggccccccgcgcgtgagcccattggctgccgccgccgcgcgcgggtcaggccccgccgcgcccgcccccattggccgccccgggggaacgtcagtcatatgcaaataagggcagggcggggcgggctccggttggccccgagccggccgggggcggggccgcggtaggagggtggcagggagggcgcactgcagtaaaggcaccgagccaggggggcggttcggggcgccgcgctgcggaggtctctgggttgtgcgtggtgctgttgtgtgtccagtccgcgcgaggaacacgctcacgcgcggctcggcccgcctcccgcacacccgcctgggcgcgcctggccccgctgggcagacaaactgcgcgtagggctgggcgaggcatcctgagccctcacctactcacactcacactcctcacagacatacagacacactttcgtgccacacccattatctcctacacaccccacgggcacatatgccctctgtcttacacccacgctgtcacacctcacatacctgctcacacagatgtacaacctcacacgctcacggtccatcgctccccacccaccatcgtgcattcacccatcctgttcacatcacccatctcatccatgccctgtcacacatgcttcgccaacccgcatcctcatcacacccccaccagcccacatgaatcatgcaaacagacaacatgtcaaacaggaggaactcagcatagccctgcttgtccactacacacactccacacccctcccacacaaccacacactcctccgtcacacacacagccttcctagcactcacaaagcgcctcctatccccagtgcacactcagctctcacagacaccatcataccgaccccaccctctatataatcctaccctaatgggtgctacctgcttcagtacccaggcccatcaggtatacagagctcagtggccaccgccatcattcagccacccaccctgacactcattggccactctggaccctctgtctagcagtataaggcagggaaccacagagcacaccatggctggccccaccacactgctctgccagccacccactaaccccgccccccctcccagaaaaaaagggccaggaagaaaggaaactaacacttactggggctgctgtgtgctgggagcttgtatgtattatctggttcattgaatcctcacagccacctagggaggtatgctttattacacccattgttcaggtgaaaaaatgagcctcagagattgaataaactgtggcaagatcatgcagtcaagatgtaccagcccagagctctaa

SEQ ID NO: 1560180 - DNA, 4001 bp, Homo sapiens
ctcgaagtcgccgtcgcctccggggtggtccacgttgaaccaggacgtccactcgctggcctctgcgggcaccgcacgcgctgggaccagggcggcggcctgtaggcccccatgcatgcgtgcaaaggccttacttgctgtctcagccccctcccccggtgggcaccggctagccgagcgcgcccacgacccgagccagcggcctgaaacaggtgcagggcagactgggttccccgcgaccccagttctgccgcccagggcctgacctggtccatcccggtgcgctgagctcttgcctctgtctgaccggcctctcacttagatcttgaacttggggcatcacctccaggggctgtcatgtccggggaccaggacggcgccgggcccttcgtctagtgtgtgccctctcctcacacgaccccagtagcccaagccccacccccaacaagcccgcagcagagacgggactccgaggcaggctaactcaccttcccagtcctccagggctggtgagggctggccggtgtacacggaccgtctttccaggcccagtgcagtcgccattggctcctcggtgggggtggcgtctgtgggtgaggagtggggagaaggaagcacgctgctactgatggggaccgctgggagcctccttttaggcaaggtgcagccacgatcatcccccccctttttttttttttttttgagacggaatctccctctgtcacccaggctggagtgcagtggcacgatctcggctcactgcagcctctgcctcctgggttcaagtgattctcacacctcagcctcctgagtagctgggattacaggcacgctccaccaggcctagctaatttttatatttttagtagagacggggtttcaccatgttggccaggttggtctcaaactcctgacctcaggtagtccgcccgcctcggcctcccaaagtgctgggattacaggcgtgagccaccgtgcttggcccatgatccccattttaacaggagggaaaattgaggctctgagaggccagaacccagctctagccccaagggctgccatacactctcctccagcgcgctgcccatgaccaccaccaggcccccaaagccaggtacctctctctgacctagccctaaccccccggctggggaagtgcaagtaccacccagttcccctaggctagagtctccctcccactatgttcagctgccgcgagatcaatcaagttcagctggctgtgcctctgccctcaggctgggctccccctcatccacttggcctgctggaagcccctcccttagtctgtcttccatccctgtactacagtccgagctgccgggaagtccttggaatctagactggcttctccaagataggagctgtccaagatactcccagcagagtgatgaggtcagacaagccccttccttctgggtgcctcagtctcctcacttgagaagtgggcccgtcccccgccccattgagtgttccagggatgggcatttctttctccagcggttggagtgagtgcgtgtgtgggagttaggtgggaggggccagttccgaccccttcggtccagggtgggagacctggccggtgattcagagtccaaaccccgggaggaaccctaggttcttatccacactcccggcttagccaaggaagagaatggatgaggcccgctccgcgccccaggtggtcgcggggatccgactggtgaaggggacccagtccccggggaagcgcgtgggtccctgggttctctccccgagtgcggcttcacccaaggccggctgccaggccctcgggagcctcaggggctgggcgcgggggctggaggcgcctcacctcgggcccccgccaggtgcgcagcgacgacacagagacagagcagtggcagcagcgacgccatggccggggcagagcgtccgagggagggtccgggctccgcggcgtgctcgggtccaactccggcgggtctggcggccgctgggactgagagtgggggcgggatgcgaccgcagatcccgccctggccacgccccattcaggccacgccccctggccctgggtgacggcgctcgagcaacccctctgggtcgccccccttggtgcgtctggctgtgcctccgtcctcaggctgtcctgggttccccgtggcctgctggaactccctccccgagcccactcagtcctccaagctgcatcccaagctgcctgagggaagtgtcacttggaatccagcctcaagctgctcggacccgctttaggtggctggaagtcctgtctcgcgtctcacttcgatcctataggctttaggccaccccaaacagtctgggagtcccaccctgaatctaccctccattcttctggctcgagttttctttcttctttttcttttaatttgtagagtcgggatcttgctatgttgcccaggctggtcccaaactcctggccttaagcgatcctccagcctcagcctcccaaagtgctgagattacaggcaggagccaccgcccccagccctagctgaagttttctaggccagcgggaagtcccactccaccgcccttctcatgctccccgccttggatcacccagggaccgtgtgaagtccctcttcgagtgtgcccacccccgcagcgggcccggtgcacaaaggaggcggaggcgaggcggcggtggtgggagggctgtttattggcgagggtccctgcggtgtggccgcgggtggcggtcacagtgccgcgacgcagtcggtgcccgtgtatcccggcaggcgcagagcgaacttgcggcgcacgtcatcgggcacgaacctgccggccacgaagtggtggcgcccggagaagcggccagcgcagcgcttgggcgccgcgagagacaccagcacgtcaggccgcagcccgtcctccgaatcgctgccggtctctgcgtcccagcctgagggaggagggtccggggggattgggaactgggagggtggcctgccctcagcctagagtccatcctgtccctgcctcctctcctctcccctccaacactgagcctctgccctcagaccagagtcctgctgccccacccccacttcccctcccccatcagacccagccttttctctctggcacatgggtcctggtgagacttgtcgccccctagaactctgcctccgccctcagacaagtctctcccagtccttggaggtgtttccctcccaatcagaccagagcttctgcactcagactttctgcttctgctcctatcctactattcaatcgccctcctccatctgacccagcctctgtcttcagtcacccaggctggagtgcaatggtgcaatctcggctcactgcaacctctgccacacgggttcaagcaattctcctgtctcagcctcccgagtagctgggactacaggcacacgccaccatgcctggctaatttttgtatatttagtagagatggagtttcaccatattggccaggctggtctcgaactcctgaccttgtgatctgcccacctcggcctcccaaagtgctaggattatgggtgtgagccattgcgcccagcctgtttgtttttaagatacagtctctctctattgcccaggctggagtgcagtggcacgatctcagctcacagcaacctctgcctcccgggttcaagcgattctcctgcctcagcctcccaagtaactaggactacaggcgtgcaccactacacccagcaaatgtttgtattttgtagagactgggtttcgccatgttggccaggctggtctggaactcctgacatcaggtgacccgcccacctcgacctcccaaagtgctgggattacaggtgtgacccctgcacccagcctccgtcacctcttgaatgagcctccactttcagcctaggagccttgccttctctcctatctctgacttgattctggggccactcaccagaagacactggatcctccctcagactttaatccttctctgaccctag

SEQ ID NO: 1560181 - DNA, 4001 bp, Homo sapiens
tgctcagcaccctgatcctcaccttcccattcatggccatcatggcatccttagcgtcgtcaatgttctcaaaggtgacaaacccaaatccccgagatctctgggtctccctgtctttcacaaccaccactgtgcaggggagagaggtctgcagtcagcacccagctgtacttccaggtaggaggagcacaagcccccccgcccagggccgcgggcccagcagcagcctcaccttcagagatctgtccgtactttgagaagacctgctccagcgactgctcattggtgtcaaaactcagccctccaacaaaaagtttgccttcatctgatgccatggcggcctgtggcagacaccaatgaaatcctcaacaggggtcatctctcaccacctctccccgcttcctattttatgtaaatgacatgtgttttttaggggaaatattagaaaatcagatttttatttttcattatctcaaactcatacctaggacttatttttttggggtcgggggcagtgtgtctaactgtcacccagactggagtgcaggggtcactgcagcctccacctcctgggctcaagcaatcctcctacctcagcctcccaagaaactgggactgtaggtgtacaccaccacgcctggataatttttttaaatttgttttagtagagatggggtcttgctctgttgcccaggctggtctgaaactcctgggctcaagcaatcctcccaccttggccacccaaagttttgggattacaggtgtgagccaccgcacccagccacctaggacttcttaattcaaataatttactccatccacccccaagactgaaggcaggccgcacccatttccacaatgggtgtctcccttcccccacagccttccagttgtgccctgggcaggactgcactctcaggttctcctatttccgaacgggtgccaactcctaccctaaccaactgacatctacttgttgctggaccagaacgtgcttctgctcactgtaaaatgcctcctgagactggggggggggctggctgtcagggaggccgccccgtcctggggggcacctcagggcaggtactgacttccatagccaggacctaggccgggaatcgggaagggatggccccggaagtgataaggcaggatttccaggcaggggaagtggcatttaggagaactggctatttaagggggcggtcagtgctgacacagacaaagcattcactggctgggaatggccgccacccagtggctctgagaactagacttggaagtctggcactgggagctgtgccaacttggaccaaactttgggcgcaaagcacgacgtggcagacgaggaaccacactagaacgggccacgcctacccaagatttacgaggccgtcctttccctcatgcaatcgcaatgggaaaaggaggaaactaaggctcggtaagcaaaagcgttggtgtgtggatacctccagccccaaggccgggaaagcggccctggagaccgggggcgccacgtggccccgcccccgccgcgtgcgcatgcgccccgcgcgcaccctgcgccactccatccgggaactcggcgctcccgccatttcgctgggcacagcctcgagctcgcggccgccattttgcggcggcaaccgggtcgccggcggcccggaccggcggggagaggccctctggccgctactcggcccaatctcccgctgtccctcgccgccggcggggcggactccaccccgggcccgccccctcccaggggcgtgccgctgcggccccgcctcgcctggccgccgcaggccgcccgccgccccgagctcctcggagccggtgcagccagggccctcaccactgagtcgggcaggtccctgacgcaagcgggaagacagcgcaccacaacgacccgagcctcctaacgcgcgagtgaggggggggcgtccccgagcccggccttatatacgcttccgccgggccccgccccctacacatcctgggccaatcagagggcgcgcctgcgtcttatattcatgagctgggggccgagtctatctcggttccgccccctcccgcggactggtgtcgggctcgactattggccgagacgtttgcagtccgcagtcctccacccgcgctcgagggggcgtgaccagcgcgcggcggggcggggcggggctgacccagttacgcgtgcctgctccctggcctgcggcggggaacaaatgggcctctagccccgattcccaggcctcaggcctcatggggacttctgggtgtcactgggaccccgactttgcctgtgctccagcagtcccgacataacaacctagcccagatcccctacccaaccaagacccggctgtcagacatcccaacttcatctgaaccccgacacctgtcgtgatattcttgccaatacaaccgacgtcccagttttcccagcaccccagcactccattcctgccatcaaccccatgcccaccaaaaccccaacagagacaaccccattcatgcgaaccccaatattcgcaatcccaattcttcctacatcgccacactttggtgcaccccaactttacgcaacccagtttgcctacaaactccaacccgcacccaagcctaactcccactggaaccgcgattatcacggctgggtgcgtggcccacacccccacactcgcctggccggatagtgttgtgcgtccctgctgtcgggtgcaggcggacaccccgagtccccactgcaccccagcactccgcccggccctcggcctcccctcccaccgtgctgcacagcaacggcgcactcgctccccacgcggggccaggcccactctgctcctccacccaggccttttctctccttccacaggcctcccctactgagcctggttggcggaggggagtcttaaagccgccgccatctggagaaccagctttacaaggaccctcactcactactcttcggcggccccaaagcctctggggggccctctatggccaccacttgctcctcgcccaggagtcatctcatgccgccgcctcccccagccctggtggaagaagccagcgcggacccctgcctctctgccccagaaagtcttcggagggatgaccctctgctgacaagctgggggaagttggcgtacagagacccccgctttgctgctcatcccagggaaatcccggccccactcctgacctcagactcacttccaccctcaagtggatcgaggtgggggtagccaggggcgctgtctccagtgacaaggtctctgggacccctcatgggctcaagaccccctcccccaggcagcagctgtgtgattcatcaccaccccctctgcacctcgggcccccccactacagccgccccactccccgtcagcggcagccggctgctgcgtcagccactcacgcagggtggttattaaaggagagagacatcagcaccgagctcccctgcgcccgccgtccatgcgggaggggccacccacccactggagccccagacgcgggcgccacatgcccagcctgggagcaattcaggcccattctttctgatctgcgcccccagcccccagccccagcagtcagcgcggtggacgttctctgacccagagcagcccttgtagggggggagttggagggggtgcctggtagtcacagcggcccctgcataattgcgtaattcttgccgctccccccagcccatcgttccctggttctgtgagcctctgccttttcctggttttgcgaagcgccgtgttcattcattcattcattcattcagccagtgcctagttattaagcgcttactacgagcgggttcctgggtgcgggctccgtgagtgtccgcagccatcctgggttcccagggtggcgttgacacgcacctgcgcacacctgccgctttgcatctgtgccgagcactgtgcaccggcttccaggtgtggacctgtgtcggtacctgtgcctctggggtcagctgcgtc

SEQ ID NO: 1560182 - DNA, 4001 bp, Homo sapiens
ctcagcaccctgatcctcaccttcccattcatggccatcatggcatccttagcgtcgtcaatgttctcaaaggtgacaaacccaaatccccgagatctctgggtctccctgtctttcacaaccaccactgtgcaggggagagaggtctgcagtcagcacccagctgtacttccaggtaggaggagcacaagcccccccgcccagggccgcgggcccagcagcagcctcaccttcagagatctgtccgtactttgagaagacctgctccagcgactgctcattggtgtcaaaactcagccctccaacaaaaagtttgccttcatctgatgccatggcggcctgtggcagacaccaatgaaatcctcaacaggggtcatctctcaccacctctccccgcttcctattttatgtaaatgacatgtgttttttaggggaaatattagaaaatcagatttttatttttcattatctcaaactcatacctaggacttatttttttggggtcgggggcagtgtgtctaactgtcacccagactggagtgcaggggtcactgcagcctccacctcctgggctcaagcaatcctcctacctcagcctcccaagaaactgggactgtaggtgtacaccaccacgcctggataatttttttaaatttgttttagtagagatggggtcttgctctgttgcccaggctggtctgaaactcctgggctcaagcaatcctcccaccttggccacccaaagttttgggattacaggtgtgagccaccgcacccagccacctaggacttcttaattcaaataatttactccatccacccccaagactgaaggcaggccgcacccatttccacaatgggtgtctcccttcccccacagccttccagttgtgccctgggcaggactgcactctcaggttctcctatttccgaacgggtgccaactcctaccctaaccaactgacatctacttgttgctggaccagaacgtgcttctgctcactgtaaaatgcctcctgagactggggggggggctggctgtcagggaggccgccccgtcctggggggcacctcagggcaggtactgacttccatagccaggacctaggccgggaatcgggaagggatggccccggaagtgataaggcaggatttccaggcaggggaagtggcatttaggagaactggctatttaagggggcggtcagtgctgacacagacaaagcattcactggctgggaatggccgccacccagtggctctgagaactagacttggaagtctggcactgggagctgtgccaacttggaccaaactttgggcgcaaagcacgacgtggcagacgaggaaccacactagaacgggccacgcctacccaagatttacgaggccgtcctttccctcatgcaatcgcaatgggaaaaggaggaaactaaggctcggtaagcaaaagcgttggtgtgtggatacctccagccccaaggccgggaaagcggccctggagaccgggggcgccacgtggccccgcccccgccgcgtgcgcatgcgccccgcgcgcaccctgcgccactccatccgggaactcggcgctcccgccatttcgctgggcacagcctcgagctcgcggccgccattttgcggcggcaaccgggtcgccggcggcccggaccggcggggagaggccctctggccgctactcggcccaatctcccgctgtccctcgccgccggcggggcggactccaccccgggcccgccccctcccaggggcgtgccgctgcggccccgcctcgcctggccgccgcaggccgcccgccgccccgagctcctcggagccggtgcagccagggccctcaccactgagtcgggcaggtccctgacgcaagcgggaagacagcgcaccacaacgacccgagcctcctaacgcgcgagtgaggggggggcgtccccgagcccggccttatatacgcttccgccgggccccgccccctacacatcctgggccaatcagagggcgcgcctgcgtcttatattcatgagctgggggccgagtctatctcggttccgccccctcccgcggactggtgtcgggctcgactattggccgagacgtttgcagtccgcagtcctccacccgcgctcgagggggcgtgaccagcgcgcggcggggcggggcggggctgacccagttacgcgtgcctgctccctggcctgcggcggggaacaaatgggcctctagccccgattcccaggcctcaggcctcatggggacttctgggtgtcactgggaccccgactttgcctgtgctccagcagtcccgacataacaacctagcccagatcccctacccaaccaagacccggctgtcagacatcccaacttcatctgaaccccgacacctgtcgtgatattcttgccaatacaaccgacgtcccagttttcccagcaccccagcactccattcctgccatcaaccccatgcccaccaaaaccccaacagagacaaccccattcatgcgaaccccaatattcgcaatcccaattcttcctacatcgccacactttggtgcaccccaactttacgcaacccagtttgcctacaaactccaacccgcacccaagcctaactcccactggaaccgcgattatcacggctgggtgcgtggcccacacccccacactcgcctggccggatagtgttgtgcgtccctgctgtcgggtgcaggcggacaccccgagtccccactgcaccccagcactccgcccggccctcggcctcccctcccaccgtgctgcacagcaacggcgcactcgctccccacgcggggccaggcccactctgctcctccacccaggccttttctctccttccacaggcctcccctactgagcctggttggcggaggggagtcttaaagccgccgccatctggagaaccagctttacaaggaccctcactcactactcttcggcggccccaaagcctctggggggccctctatggccaccacttgctcctcgcccaggagtcatctcatgccgccgcctcccccagccctggtggaagaagccagcgcggacccctgcctctctgccccagaaagtcttcggagggatgaccctctgctgacaagctgggggaagttggcgtacagagacccccgctttgctgctcatcccagggaaatcccggccccactcctgacctcagactcacttccaccctcaagtggatcgaggtgggggtagccaggggcgctgtctccagtgacaaggtctctgggacccctcatgggctcaagaccccctcccccaggcagcagctgtgtgattcatcaccaccccctctgcacctcgggcccccccactacagccgccccactccccgtcagcggcagccggctgctgcgtcagccactcacgcagggtggttattaaaggagagagacatcagcaccgagctcccctgcgcccgccgtccatgcgggaggggccacccacccactggagccccagacgcgggcgccacatgcccagcctgggagcaattcaggcccattctttctgatctgcgcccccagcccccagccccagcagtcagcgcggtggacgttctctgacccagagcagcccttgtagggggggagttggagggggtgcctggtagtcacagcggcccctgcataattgcgtaattcttgccgctccccccagcccatcgttccctggttctgtgagcctctgccttttcctggttttgcgaagcgccgtgttcattcattcattcattcattcagccagtgcctagttattaagcgcttactacgagcgggttcctgggtgcgggctccgtgagtgtccgcagccatcctgggttcccagggtggcgttgacacgcacctgcgcacacctgccgctttgcatctgtgccgagcactgtgcaccggcttccaggtgtggacctgtgtcggtacctgtgcctctggggtcagctgcgtctg

SEQ ID NO: 1560183 - DNA, 4001 bp, Homo sapiens
gcaacctccacctcccaggttcaagcaactatcctgcttcagcctcctgagtagctgcaactacaggcgtgtgccacacctggctatttttttttttggtatttttagtagagttggggtttcgccatgttggccaggctggtcttgaactcctgaactcaagtgatccgcccacctctgcctcccaaagtgctgagattacaggcatgagtcacggcacctggcctgttgttgttattttaaaggttcgtgcgaggagctggtgagaaggtggaggtgagggtgctgctgggagtatgtgagcaggttcttggattatcaatccaaagacaaagggctgggtcgggggagggctgggtagctgcccccacctctgcctgctgacagttctcccacagggctcagaagggaagaaaagctcagcctctgggtcgtcagaggcaggttcaaatcccacctatgccatttccctgctgtgtgaccccaggccagtcactaggcctctctggacctctgtctcctgtgaactgagcctgccccgtaggattgccaggatcctctgagcttggccatgaggttggctgagcacaggccctggcatggagttggagcctggaaccctggtggctgctattattgttatttgttattactacttttttgcagagatggggtctcactatgttgcccaggctggtctgggactcctggcctcaagtgatcctccagcatcggcctcccaagatgctgggattatgcgtgtgagccactgcgccaggtcctactgttattattattttattcactggacccagaaaggagaagggacccagaaaggagaaggggcctccagcagcggtgggagacggggatgggaagcaggtgggattgtgggagggagattgggaccacggtgagctgaagccagggaagaggaacagggacccgccaaagaccttgggtgctgctgtccagggtggttatttttagaatctggcaactgcctgccatcccacccccagctgctgccccgccccacccccacattccggggctcggcttgcaccaagtcagcaggcccaagacaggtgggccagggtggctgggaggacacgggtccaggcctcggggctcaaggacatcctgggatggcagcccagaccccctcccttcagaggatgcccccctaatccctgccagggacaccccaggagagggcactgaggcagggtggtgaccccccccacaagagacataagcagaaagccccagagccacacacccccaccaccgcagactccccagatcacactgtaaactaagtcacacagtcacacttccaaactcaaggacatgcccaggacactcatgtgtccgctactaagtcagaaacaaggtcacagggacccacacagtagcaaacgcaaagaaagcctgcgacacctgctcttgcagactctgctaggcgacagacacacctcccacggcttgtggcgccagtgttggcgacaaactgtaatgaacacaggcctggctcaacagccccttgcagggggtgacagttggcagctgtcaggacccctttcatctcggatccctccccataacccaagacttgtgccgcagaaatcacaggtcccagtggggggttcaggcagcctcacagatggaggggcctcccagacacacaagggtcaaccttcccacgcaccgacctgcctttgtataggaggatgttggtggagcaaggggtgacacacagaccctttcccaagccaagcctctagcacccacagaaatcccctactctggcccccacccagattcccgccccgtgcagtacctggctgggctgggctgaaggggggctgtctgtatcctggaggtgacactgacccaaaggaagggccagcagccgtggccttatatagggggacctaggctgtgctattggctgggaggggttgtccccagggaggagttctggagggcagctgagcctctcacctccctgctcccgcaccatacccaccctgaacccaggcatgctttgcgcccagccccatggccttgtatgggctgagccgccccaggggctgggctcacgcccccccaccaagctgataccctgaccaagtgctgagttgggctggcggtggggacagctggccccccgccgggaacatgggacggtggctgggaacgtcccaagcacgtagaagccaccgtcccctggcccctgagtctccttcagccaccagcccttcctgtggccctcggctccccctgtgccccctgggccctcacccctacccgagtcccagcggcacctcggggaaccaaggtgtggctccaggaggagcagataccctgtgagctggaggaagcagaggccgggagaaggaccaattgcaatggagggcagtctaaccccagaaacccgcgcttgggcgccccttcctcctagggactgagtggaggggaaactgaggctggctgagttggagagattcaaactcagggcaagggtgggaggcggtggtcaccctcccccccacttaaccctcgccccctcggtgccactgggagatttccgctgtgcgggggacagggagggtctcggtcgccgggaaaggagttatttttagagggcgctttgctgtctcctctgccgcaaaggccgagacccgaggcgctgggtatgggggggttcgggggcaggtgttggaggggggttcgccacgtgtcctggttaattataaccgggcgtctcgggtgtcctcgggcctcgcctccttacaagggcagccacggggccctgggtggccgctcccacctcccggggaagggggctgggcagcgacgccgttcagagcgcgggcgccagactcgcgcagatctgggcagagcaagcgctctcggcgcctcggctgtgagcaaggacttccagggctgagaggggggttctgtggaggagagtacagtatagaggaagccgctttctcctcctgggacgcgccaggattgcaggctgatcgggtctcctcctccagggagctcccaggattgcgacgaagaaaagaatgtcccttccctctgagttcctccctatcccagggtctcctgggtctccttcacatcttcttaggcaggtgaggactggcttagagaaagggagcctctgtgcctctccctcagactcctgatctgaggggggaggggagaggggtgctttagaaatatttacatggggcccagccctttcccagcaagctcagattgccgagggtctccttcacggttacggaaactgaggcccagaaaaccaaatggaactggtctcgaaacagggatctatcaggcacttcctgaggctacaacaaaacacaaaacccccgccgtcctggaggtgatagtgcaagagggtcacagatgaggggacggcacagcagcaggggaggtcgaggcaggcctctttgggaagatgacatctgagcagagacctgaaggagaacagggagccagccatgtgcggctctggggggaacagcaggtgcaaaggcgctgaggtgagaatggctgggcacatctgaggacagacaggaaggaggccaggggactggagcagatggggccaaggagagagtgggaggaagaagatgaggttggaggggagacaggagcagacccatggtgccctaggggctgtgggaggagttttaatcccattgtgattgacagtgaaaatgttagatgggccgggcacagtggctcaggcccgtaatcccagcactttgggaggcagaggcggaggcgggtggatcacttgaggccaggagttcaagaccagcctggccaacatggtgaaaccccatctctactaaaagtacaaaaattagcctggcatggtgacacacgcctgtaatcccagctagccaggaggctgaggcataagaattgcttgaacctaggaggtggaggttgcagtgagctgagatggc

SEQ ID NO: 1560184 - DNA, 4001 bp, Homo sapiens
ccgtgttagccaggacggtctcgatctcttgaccttgtgatctgtccacctcggcctcccaaagtgctgggattacaggcgttgagtcttgctctgtcacccaggctggagttcagtggcacaatctccatgcactacagcctcctcctcccgggctcaagcaattctcgtgcgtcagcctcccaagtagctgggactacatgcacacaccactaagcctggctaatttttgtatctttagtagagatggggtttcacccttttggccaggctggtctcgaactcgtgacctcaggtgatccacttgggattacaggcgtgagccactgtgccaggccaacttaatactcactcctattgtgtgccaagccaaatctcaagagtggctgagctcttctgggaatggggaacacagcaataagcgaaacagacattctggaggtggccagtctaacgtcaggactgctctgagggttacagagacttccctttttcttgctaacaccggatcggcactgggaggccacaccaaacgacacagtatgctacaacaaacagaagcccttgggatcccaccaatgattatcctcaagaaaagattaatgaatatactcctgaggaaatgagcctcttgtcttgacatacttccaagcccagattttaccaggatgaccagctgtgccccccaacccagggtccctcaccccagacaaaaggccagttactcacgatcttttcataatactcccgtctccgctccgccctcttcttgtagtcgaccatcatgcctcgaagcttccgctcatgcttccgagcctcgtgccacattgtggtgaggccaagcctggggcctcaacctgagggatgaagggaccaggaaagtcagatggtctgtgaaacccgtatgggcagaatcaaagtcatctaacaagttggtggcagagtcgatcccaaacaacacatctcttagcttcagggagcagaagtgaagctgcagaacagtatgccagatgttcaagtccatccctaacaacttcgatctagaagcttgggcattctgaaaaaccctcaggtgattctgaggtgagcatcactgggaaaggggtgtcctagattccacgcgctggagtcgggaatgaaaggttttgaaacatcagcagtgtttgaagtagggtcagaaggcaaaccctgagcacttaaggctggagctcaagagaaagagaagaactgaaaaggctcccactaggggccatgcgtggggttgggtatgagtctgggtggtagagggataaggagaataaggatgaaggcaggtggaggaaatcggagaaagcttttaagggaacagtgcagttgtatgaaggtggaggtcgaggacaggtgaagggcgtggcggaagatgaagatgctagagggagtgggaacacggggagggagtgttgcaaggagaccagagtgaagctgaggtctaaagatgggatctagatggcggggtggggagagcatccaaagaaaaagagcgtagagcctgagagaggcggagctggctgacaggagggcgtgggctgagcttgggggcagggcttgcgggaaagggcggagaccgaaggtttggacggggcttgtggatcgcgtcgcggcctgaggatttgggctgggttttttttttgttgtttttttttttgacaagggggcggggcctgtgataagctgctgggccgaaggccgagttcgacgcggcaacttctggcccacagccggggcacgggctcggcctgaggcccgtcaggcctaatggggtgagggacgagcgatcctcggggccgggacgcagcagaagcccacagcagcatggggagagcctgaggaaagggagaagctgggctgaggcctgcccgaaaaccgggaggtcgagccgcagcctgcactcaccggctggtcgccgcctcccaccgctgcgctcgcgcgcggcccgcaccggaagcggaaatgaaaggccgcgctagggggagggggcggagcatggtggagggccgcgcagcgcacttccgccgacgagagaggcgggtcctagagtcgagaggggcgggatcccgaggaagaagtgggagagcggagaagggaagagcttggatgctttatctttttatcttttttattttatttatttatttaattttatttttttgagacggagtctctctttgtctcccaggctagaaggcagtggcgcgatctaggctcactgcaacctttgcctcctgggtttcagctattctcccacctcagcctcccgagtagctgggactacaagcgcgcgccaccaagcccggctaatttttgtatttttagtagagatggggtttcaccattttggttaggctggtctcaaactcctgacctcaggtgatccacctgcctcggcctcccaaagtgctgggattacagccatgagccaccatgcccggtctcattttttattttcattttcattttttatttttttgagacacagcctcgcgctgtcgcccaagctggagtgcagtggtgcggtcttggctcactgcaacgtccacctcctgggctcaagcgatcctcccacctcagcctctagagtagctgggattacaggcgcgcagcaccacgcccggctaatttttgtattttttgtagagactaggtttcgtcatgttgcccaggctggtctcaaactcgtgagctcaagcgatcctcctgctttggcctcccaaagtgctgggatgacaggcctgagcccccagcctggaggctttctttgctactaagggactagggcgtttcccaagcccagaacagacgaaaccccggaggctcaaaaactcatctttattgggaagactctgaacaaccaacctaccccccaccttcaagtctggggagggagggccaggaatctgccccctcctcccatatgtacaatcttttccgaatcctactggagaaggtgcccccacatgtggggacagaggcagctgtaacaagctagtgcacgggagccatgtcccttttcctctccggactcagtttcctcatctgtaaaatgggctcaaggggaaacccgtgcaacggagcttctcgccaaggctgaatatgtccacttcagaagcatgaggaagggccaaggggatgggggtgctagacatcctggttgggattgcacggctcctccacctccctccccacccagtgcccctcctctggcatcgcggggctacgtggcttcaggccccggggataggaggccgcccccaaaggccgcctcgcggtaatgattggggaacatgttgctgcccacaaggctggcggtgcctccatccccggggcccggggcctggtacgagtccagtgtcagtggttcagggccgggggtctccccaaccacggccccggcacctccgctgcacacaacagcgctagcgtgtggcggtgccgggggcagcaggtccagcatggtgaagagtgtgggggccgtagggtcgtaggcaaagccatcgtccaggaggtcaggcccgccagggggctccaggccgggcagggacacggtgccagagaagaagtcagggtctggcagcagggctgacggcgggaggaacgggcctacggggatgaagacaagagaagtgtagtgtgatttagggctaacttctgatcaggccctaaatcaaatgccctactccctgcaaaatgtgatatcaaggtggcctttttttttttttttctgagatggagtctcattctgtcaccctggctggagtgcaatgacgtgctcttggctcactgcaacctctgcctccccagttcaagttgattcccctgcctcagtctcctgagtagctggaactacaggccaggcatgtgccatgcccagctaattcttatctttttagtagagacggggtttcaccatgtttgccaggctggtctcgaactcctgacctcaggtgatccacctgcttcggcct

SEQ ID NO: 1560185 - DNA, 4001 bp, Homo sapiens
tgtttggtgattttatgtttaattttatgggaataccaaacgattttccaatgtagctgtatcattttacatccctccaagcatcgtttgactgtttcaggtactctgcatcttttctaacttgagattgtgagttttattttttattatcattttaaccaccaaaaaaaaaaagaaagaaagaaacaacacttgttgaaagagagagggaaacgaacaggaaagaacaggaaacccctgtgcgtgggaggcacatacatcacaatcatcatgggcaatggacgtccttcccagaaggggcacacattgctgagagcacaaccgcagtacttgcacaaatgaagattgtgggtcagggaagttattggctagaatctataaatggatggtatttttcttttttgaaacagggtcacactgtcacctaggctggaatgcagtggcaccatcaaaactcactgcaggctgggcgtggtggctcacgcctgtaatctcagcactttgggaggccaaggtgggtgcatcacttgaggtcaggagttcgagaccagcctggccaacatggagaaaccccatctctactgaaaatacaaaaattagccaggagtggtggcacaagcctgtaatcccagctactcgggaagctgaggtatgagaatcgcttgaacccgggaggtggaggttgcagtgagccgagattgcaccactgcactccagcctgggaaacagagcgagactctgtctcaaaaaaaaaaaaaaaaaattactgcaggtttgaaggcctgggcttcagtgaacctcttgcatatgccccccagcagctggaactacggtatgcaacaccacattcaataaatttttaaatttttggaaagatgaaatcttgctatgtctcccaggctggtctaccagtcctggcctgacatgggcctttcaattcggccacccaaagtgctgagactacaggcctcagcaaacatcttgatgaatatccactgtaagctctgccttgtaccttcctggttttgggtgattcagtctcttaaatcaagtccctcaatgtccttctctagcatcctggcactcaatgggaaggccaggctagggtaggagacagggagagacctgaggctggaggcaggagccagtggtcactgtgtgcagattccacctaaggaaccatcagccccatcgtctgtttctcacccccattctgcttgggaaaaggcacctgagaattcatgcattctgctctcataaatgctcagagataagtcctcggtaactcaagggccccaagatcccacaagttctgtcaccggggatccacagtgatgcacaagggaagttagacagagtactgctatgtggggaggaaccttcacatgcacagaaggccacatgcatgttcccagttcaacacccagtcacattccagcacacacactcacagtcacacagagccgtgccactcactgagtcacacacacctgctcactgtgcatataaagatgctcatgcactggtccggctgtgctcacacacacactcacatcacagtcatgaagacaaaacacagtcacctgattacaatcacttacacacccacccatatcctggagggccatacacatcccgtctaaagtcacatcatttttagcagagtttactctcatcagataccatcacatgctcacagagggtcacaatgttccagcatccacaccccctacccccctaccccaggagcatctcagataccatagccctagggtctctcttccacacacccacaactctcagtaaagcattcacagtagaaattttcatattttcatcccataaaatctccctcttcccttttctgtgtgacctgagattattgaaggctgtgcctttttaactcacgggtagcagggacattgttgtctccttctgggtggctcttctgaattgtgtccagacttctgtgtgaatctctgagctgcagaatttaaatggcccctatcagccctgcctctggctttattcctgattccaagcccctcccaggaaggtttcctcacacagtgagaaggggtggggtgtcagaaacagactcagtcacaaccacacctgtttggaggcctgtgcctgtgatgcagcagaaacgacagtgagggaggtactggaggaggaaggggtcaccagggaaatgcacagataaagacgatggagtgaggatgagtggtgtgagttccagcctccatgcttctcatgaagccttttctccactgtgcagaatctaccaggaaggtgtgcgttctcctaacctgtgcaatggtaaaaagctggagatcctgggggcaaggcacttggctttgaaagaaaatcctcctcctccttctccagtggttctgggagagcatagatcttgatcattcgcaggacctggggacagaagtagagaaaacacttgtgtcttctttacccaccctcagatcccttggctctgccaggtgagagccactcccactctgtctctcagacacctgggctttaggtacgccctcttatttccctatttcttttcatgtgaatcaaaatctgaggctgtcgttctcctgcagattcttggagaaaggtgagatttctcactcataagtgggagctaagcgatgaggatgcattagcattaatattagttgtgcttgacccgacaataaattccactttccctgatctaaaaccttgacaattcatttccaagcatgcactccaagattctgctcatataaatcagcacaatcacacagttcttttggtatataacgtatttccttaagattaatttgtaatgtcatcccactgcattccttgggttttgactctgggtatggacatggaagcaatgaaaagggtcagaggccacaattaaggagctttggaaaccccgttctaggcaaccaccctcacaccctgcccagaactgtagcttgtaagaaattaccacagaagggaaagaggaactgcttttccttgcaacagatatgcaatagaattttgagtaatatcccagctattcatctgaactggggaagaaatatcagttcagggcgtctggccacctagtaagctgtggataaagatgttgatgttatttacttctcaggcattccagcaatcctttcagtgatgcagagagattgatcttctttaacttccatatcctctgcacaatagcccatacttctgctggttgcaactatttcttcagaaatccattatgccctacgacttgctttcagtctttcttttcaactacatctttccaagcacacactgttcccccgaaaaactttaggttttgtgtatgaaattatataatatctgggatttgctctaaaataatctggggatgacagttctctccttttgcaaacatttgaaattttttacagtacagtttttaattaagtagccagtacatagactatatataaaagaaaaacaaaattatcagtactggcatggctatatcttcaagaaatgctgtagtatgaaaaggcatgaagaaaacatgcataatacgagaccaattattttaacgacaaaaaaataaaattgatctcataagtacacacaaacattcataaatgcactagaaaatgtcaaaagaaggcattccttgtagggggggacactgggtttagaagaaatgaggtcaaggtataaatctgtaatgtttgaattttacccacaagaaggtattatattacttaaatgatttgtataaacattttaaaaataaaggtcataatacagttaaaatttttaaaaaatttaatcacagtttggaacccagcaaccatgcttcttgttacagagcactctttctattttgtgttctgtttttcctgttcctccagcgatgttctaacactctatacagcaaggtgggtttgctcagtcacctctctatcctggaacatccctgcaccacataaattgcctgtcacaag

SEQ ID NO: 1560186 - DNA, 4001 bp, Homo sapiens
cctatgagttcatgtccttatgtcttccctgagcctctatgcaaccccgtgcctgcgtccccacgacccgcagaaaagcacgcggagccgcagcgctaaaaaaagccgttcctttattctgccccaggcaggctgcagtcacagacacacggggaatccactgatggcgtcggtgctctgcatgatcatgtctgccagcagaaagcagaagcctggggggacgggggtgcggagcagggagaggaaggtgggccctggggcggatggccgggagggccccggggactggggtttggggctccaagggggtctctgccgggtctgcgggagtcgttagtgtgttggggagtccccgagaggtccccggggtttcctgggagggcagctggggagcctctggggtgagggtcttctgggcagtctcctccaccctcttcccgctgtccagtttacccgcgagaattgagaagggtaaggccagccacccagaaaaataggaccaagagaagaagacgttgttcttccacgcattcttcacggtgtagcctatcaaggcggtcagcagcagcagtcctgggccccgcccagccgcaagatgagctagctgggcctggtgggggctgcacccaggccacgccccttcagacccgcccccttctatcagaccacgcctatcgcctctcagcccgcccctggcccaggccccttcctgctcctcccgctctgaactctgtctcgagccccgcccacctctctcggcttcttccagccctgcccctcggatcctggccgagtacctcaagcccctcccctggcgaccaggcccctccatcacccagggcccgcccctgcctgcccgcctggggcggtctgcagtctcaccgccgaggaagaggaaggcgctcgtggtctggccccgcagcgactcgccctcgtcgcaccgaatccgcagtcccatcaccatgcccaccacgccgacacccaccgccagcaccatgcacgccacagtcaccgccagcgtggctggggagagcgggcgcatcagcccccgcgggcgccgccccagtcactacgggttcggccgcaaccggaagctctcccgtctcctgcccccaacccggtgtgtggccaggagccgagctccaccgaccgggagtcaggcgtttggattgagacttggaggtcacatcaggacctgcggttactgccgctaccaggacggggagggggtcggggacaagcccacaagtcgaggggcggggttcgtggcggcctcggccgacaagggacagctgcaactgagcccggggtggaaggggtgggcgtctcgccatgggcccagctgtgtgtcccgagccctgggggtctgaaatgccctctgacatctgggcgggcggagcctcactctggcaggggatgctggagcagatgccgtggttgcattcctgccacaggccactgtggccctcttgttggcgggtccagtagttggtggccgtggagagcaccatgaggacgttggccacgaggctgagcagaatgcccccactctggaggctccgcttcacccccatgccactgaggctgcagccgggggccacaagggcaggatgggcccaggcctttcctaccccgaggcccccagctgaggagcccgcttcctccacactcctcccctggtactcctgcctgaggtccctgcttctggggacctggagacccccctccctcaacaaccctgcctgaggatccacaacctcctccctccagacctcgttccccttactggagaccttgagacttcccctgagaggcctctgagaccttcaccacaggctttgctgtgaggaacctgtcttcccagagacctcccccgacagccgaacgccctttcagcccagcctgttcaatgtcctccccagacacccctccacacaggcccacctaagtgactcacacccagtgccctagggctccttagacacagagcccagagagacggggggagggaggctgggtctctgtgaggccaggggttccagaaccccctcccccagtggctgtttaaagggataatcactccccccaccaccatcgcatacacccccgcagctctcaactgagtgactgcttagattcagatctcagctttgggggccgttacatgataggccgagtccttcttttatcattattatcattattattttttgagatggagtcttgctctgtcacccaggctggagcgcagtggcacgatctcggctcactgcaacctccacctcctgggttcaagcaattcttctgcctcagcctcacaagtagctgggactgcaggcgcacaccaccacatctggctaatttttgtatttttagtagagacggggtttcaccatattggccaggctggtcttggactcctgaccttgtgatctgcctgcctcagcctcccaaagtgctgggattacaggcgtgagccatctctctctcccaggctggagtgcagtggcaccatcacagctcactgcagccttgaactcctgggctcaaggaaacctcctgcctcggcctcctgagtagctgggactacaggcatgtgccaccacacctggctaattttcttaagattttttgtagagatggggtcttgctatgttgcccaatctgatctcaaactcttgggctcaagcgatcctcctaccttggcctcccaaaatgctgacattatggatgtgagccaccactcccagccctttcttagaaacttctctttcccttggccgggtgcgcagtggctcacgcctgtaatcccagcactttaggaggccgaggcgggcagatcacctgaagtcaggggtttgagacaagcctgaccaacatggcaaaaccccgtctctactaaaaatacaaaaattagccaggctagccgggggtgatggcaggtgcctataatcccagctactggggatgcgaggcaggagaatcacttgaacccgggaggtggaggttgcagttagctgagatcgcgccattgcattctagcctgggcgacagagcaagactccatctcaaaaaaaaaaaaaaaaagacaaaattagccaggtatggtggcgcacgcctgtaatcccagctactcaagaggctgagggaggagaattgcttgaacccgggaggcagaggttgcagtgagccaagatcacaccactgcactccagcctgggtgatagaacaagactccgtctcaaaaaaaaaaaacaaccttctcttcccttgacattctaggcaccgcagaagctctccaggtccccagctgtctgactgcagacttctgctcctctgccttctccccttcacttgtaaatctgggtatcccttgaagctccaccctgcactctcttgccaggcaagcctcctcacggccaaagtttcagtgctccttaatgctccatccaaaactccatctccaacccaaggtctctcccctgagcctgactcaagttctcacctgctcctggctgcccctcagggccttaatagtcaaccatattccaactgagcttagtgtcttccaccatattagggatggccctgccatcccatccagttcatcgagccagacccttgggcactgtcctcaccttcttcttgcccttcaccctgaaaagccttgggtccctaagtcctgctcctcctgcccctgaatctgtctggctcattccctcctttcctggtcccaggtcaggcctcatcatgtcccacctattgcattgccaagttcctccctcaccttctggcctcccctccatgtctacaggggggtctttctggcacccagagctgacactgtccctcccctgcccacaatttttctcccaactccccatcatgttcaagagaaagtccagcatgacattagaggccacagcccccacctgcctctccctcttcattttccatcccccgccccccacattctatatcctgaccctaaattaccgatc

SEQ ID NO: 1560187 - DNA, 4001 bp, Homo sapiens
ggctgagcggatgcggcgaggcgctgggctgggcgccgagctcggggcggggtgagcgatgccaggcgaagaaggacacgcgctggccgttttcgaagaggtagaggccctcggcgcgccgatcgtgcacgcccagccacacgggccagttgtagggagcgagcgccgcgcgcaggtaccgagtgagcgcctccatctgctggcggtctgccggctgcgccaggctcccgccccgcgccgtgcaccgcgcctgcgccgccgcctgagcttcgaagtcgcgcgagagcaggaagcacttgtggcccaggcgcagccccttcaggcagcctgtgggcggggccgggtagagaaggaggcggggtcatgcattcagagtctggaagggggcgaggacaaaacatccgggggtggagggaggcggggccaggaactcatggggagggctgggaggaggcgtggtcagaaccgcgggagccaggaggtggagagtctggtccgccaggggcggggccaggcggtgggagctggactgtagggggcgtggtgctgccccagtcgggtccgcgcgggtctggagtgcccacccgctccctgcattcagcctcccagctctctaaccccgtccgctagcacacagcagctctcccgaactctcccgccccggacacctagggtcaccttctcaaccagtcccattcctggcccagatagtctcatttttttccaccccgcgcgccgcggactcaccctccaagcggccgtgctcgcgctcggcgcgaccctgcgcctcctgcagggcttgcacggcatcgcgggtgtcgcctgccgcgttccgcagctgccgcagcccctgggtcagctcgaccacgcgggtgtccaacgcgtgcagacggacgtgcagctggtgcaggcctgcgtccaggccggccaggcggcccactgcggacagacagggatcatgctggagggggagcctggagatgcagcggggggcctgaggacctggagaactgggatctagggctcctgagggcggggtggcggtggggggggcaccccggactcctggaaggtagggtcgagtggcccaggcctttaggaggcatggccgtggacctggggctcctaggggtgtgggggctctgggctgggcaatggacaactgaaaggccacttggcagtgaaccgacccttcatttttgcgaaagtgaccgcggcggcctaggagtttgggggtgagggcttctggttactcacggatgtaagtgacgatgtcctcaggggtgggagaggggctggggccggaggatggggttggcgttgcttcctcctcctcttcctccccctggtcctcctccatctcccagtcctcttttccctcaacagttccggcaggattctcatcccccctcccagcaggcagtcctagggcttcctgcagatgctggggcaggggaggggtggtgagccccagcctgccaccaagatgccccattcacccctttccaactcataactcattctctgctgcctgagtcctgtctctgagcccatcaccctcccactcctctgagactatcccaatcgctcctcattgtccatttccctaaccttgcaataccccctcccagacccacagttcaccacccatagctccctgacactccagagctcaccttcagcatcagggcctccctctcccgctcctcctcctgggcacctccccagcctccctcccactccctctctgctccccgagccccatggccaaagcccaagagctgggggaccaccaaagcccccaaaagccaggctgcctgcattaagctggactcttggcacccaaagttccagatgtctggatgtctggggtgggaggggtggcctctgggaactgccgagtgcccctgccctgtgtgcaggtcactagcccccaggttcccgattctcccagcttctctcttcctgttcctctcctcgtctctgtccggtccgttggtctcctctgcttctctgtgtgtgtctctccccgcccctcttggctccccggaggccctgcctctgtggccggaaacctccaacgttccaaagcctagatcccgccttgggtctcctcgcacaccctcctctttccactttccagagctcgcttccgccctgctctttccttctgctgtagcccaaagatcagataatcaggaagaggatggagctggctctccaaggaatcttggaaaacacaggccccggcctcagcccaggaacccgctcagaaccatctcggcagtggtgggatgctgggaccgagcactgctcccttcttccctgcctggccattcctaaggaggggcagacctcagggtctcgctgaggttgttattaccctgtggccaccatcgcctgcacactcaatggaggagactccagggcccctcctgccccctagattgcccatcctaccctccaagcccttgtctggagatccaagtgagtgtgtgtgggggcagggtgacacatgtgaagagcacgcgtgtgactgtgtgcatgaccctggaagacggggctcggggattaattggccactttactagaagcctcctgcaggccaggctgtgggctgggtgatgctggggactccagctgcttgcagaccagcagccagatagctccggggatgagggggctggagatgggagagggtgaggagtctggcggagcagtcagggaaggtttctccaggaggtgaaatcgacagacgctaggttgtgtgctcaaggagctctgagcattcagcaagccacctcatttcagcctggaccactgcagtctcgccctccccctccttcctcctgagcccctccaatcccggctgcttgccgcagccaaagcaatccttccaaaccataaatcagatcacatcactccccactcccctgctcccccaccttcccatcataagcaggagggaagccaagcccgggcctcagtcctcagcgcagcctaccatgctgggggctgggaaggaagaaccctttgcacctctgcagcctcatcacccccattcccttcacccacccccagcctccaccttccctggcctcttggctcatccccaaatactaagctgattacaacctcagagcatttgcactagccctttcctccttctagaagcctctttccccagctccttctcatcatcgaggtctcagctccaggaggtcttccccaaccaccttatctattccgcaagttactttattaaaatgccccatttcatctttttggtataatcaagactggcatgatcttgtttgtttatgtctgttccctgccaatgaaagcagggatttttatgcactgatgcatctcctagcacaaggcctacctagcacatagtaggtgttcaatcaacctgttgagtgggcgagagggtagccgttcctggtggggtcaaaggcctggaagcttcacctctttggtttgctggcacccaagttcccagggtggtggtggcagggtaggtagaggtggtgagggcagtgggagagaggcttggaggcaaggaagaacaatgccatgccatgcccctctatgtcaggcccatgagtcatgcagggcttttcccgcccaggcctggctggtggtgccaacaagcatggggcacaccagccaaggatcactgggcctgctcttcaaaggaggagaccgaggctctgaaacagcatagcctgctggaggtcaccagtgtggcggcagctagccaaggtttctggctccaagagcagggcatctgccctcggctgccgggagccccaggaggggccttggaaatcagtgcctccagccttccgttttccaagaaatcctggtacatcgagggcactgtgaccttgggcagactgctccctgcctcagagcctgggcctctcaggtgcccatcgggaacctggggcccctcaccaggagctacagacctcaagaaataatgcgtatgtggg

SEQ ID NO: 1560188 - DNA, 4001 bp, Homo sapiens
gagaagggatggaaggggatggaggggattttaaaaaacaaaaacagttgcgtttcaggatggggatgaagatgaggtggggtttggattagaattggtgttgggatggggtgggatgggatggaaaatgggttggggacagggatggatgtgggtaaggtcatgatgtggttaggatgaagaacagagtccttgccaggtttgggaatggggaaggagtcgaggctgggctatagtagagagggtgatgaagttggattggagagtggatgctgggctgcatgtggatgtggggacaggactgtgcttttggagcagacgtggccctgaagaagggaatgggattggttggtcatatatgtagacccagggcttgagggtcacattaggaccataaattggaaatggggcagtgaaacaacacagcacaggtcacctcctacctcaggcaagtcccaccatatttctggacctcccaggtggccccactttggactcagagatgggggatatacagcctcagccctcacagaatggctcctgtctaaggtcaccaggaccaggccatcagcatatctcagggattttctgttttgggcctccgggatctctcatggcctcagggtccctggtggcagtaaactcaggaatacctcaaaaacctccggtttcattttctctatttttttagaagtggagtcgcgctatgctgcccaagctggagtgcagcggctactcacaggagcagtcgcactactgatcagcttgggggtgtcgaactgctccgtttccaacctggaaacccctcctcagacaccttaggcaacctggtggtcccctgctcccaaaacatcaccatattgatgccaaacttagtgcagacgcccgatcgcctagttcacaatcgcccagaactcctgggctcaagtgatcctactgactcagcctcccaagtagctgggactacagacatgtgccaccacacacggcccaaacctctatttttttttttttttggcagagatagggtcttgctatgttgccctggctggtctcaaattcctgtcctcaagcgatcctcccaccttgacctcccaaagtatcaagactacagacgcacaccactgcagctggcccaaacctccactttaacaaccacttatcagtctcttgttgaaccctgtgctatgccttgggtttgagatccaagtctaaataaaacctgggctttgggtagaaaggtgaggagactgggagcccacagtccactcccagtttctcaagcaccagcttttgtaactcagagactttgcacctaactgttctctcctggacttctcttcttaagatatgtctactcatccctcaagccccaccccaaagtcccttcctctatttgagccctcagtcccccaaggattttgccaatctcctgacccctcctctctcaccctgctcaccaagactgtgcccaaacccacctccgccatcagactgacaggtcgtcctgggcagggtgtgggttccacagtgcccggcatgggctggatacagaggagactgactatgtgtctacaatgcccaaccaatgcccactggagaccccattccctgtattcccccaggtcacactccaaaaagtcctcttacctggcttgggaggaaggtccttgtagggaggtgttgagttctcatagtcatcatcctcctcctcctcctccatggtcccttccaggggaaaggcaagtcagagcccagccattccctcctccctccatccctcaagccctggtctctgcctcagctgccccatggtggggattctgtaccctgggtcctgaccacacctaggccccagccccagcctggccggggccttacctggtgggtccgggtacccagtgatggaatacagattatgcatgtctagcacagggaacctgacaagtggcagccagggcttggcaacctctgccccctgtctctccgactcaggcgtctgggggctctctcagttcccttttcctttcaaagtcaaatacatgcaaattcattttgacaggaagccctcagacctcacacgtgctcacacaaacacacacacacacacacacacacatacacacagagcctttctccccagtttggattcacgcacagaaggaataatgacaactggcctggtgtggtggctctcgcctggaatcccagcacttttagaggctgaggtggatggatcacttaaggccaggagttcgagaccaggttggccaacatggtgaaacccagtctctactaaaaatacaaaaattagccaggcgcagtggcaggcgcctgtaatcccagctactcaggaggctgaggcaggagaatcgcttgaacctgggagatggaggttgcagttagccgagatcacgccactgcactccagcctgagtgacagagtgagactctgtctcaataaataaataaattaattttttaaaaaacattaaatattaattaattaattaagggtcttgagatggatggtttatcctggattacctaggtgggccttaaatggctttacaggccaggcatcgtggctcacgcctgtaatcccagcactttgggaggccgagacaggcagatcacgaggtcaggagatcgagaccatcctggcttacacagtgaaactccgtctccactaaaaatacaaaaaattagctgggtgtggtggcgggtgcctgtggtcccagctactcgggaggctgagggaggagaatggcgtgaacccaggaggtggagcttgcagtgagccgagatcgcaccactgcactccagcctgggtgacagagcgagactccgtctcaaaaaaaaaaaaaaatggcattacaagggtcctcgtagaagggaaacagaaggagatttgacacaaaaaaaaggcaatgtggtcactaaagttatgctggctttgaagatgcaagaaggagccatatgctaaagaatgcaactgcagaggctggaaacagcaagaaaatggattctcacgctgcagcctcttaaagaagcatggcccagcccatgaacacctgggtttcagcagtgagactgatgttggtctcctgactccagaactataaaataatctggccgggtgcagtggctcacacctgtaatcccaacactttgggaggccgaggtgggtggatcacgtgaggtcaggagtttaagaccagcttggccaacatggtgaaatcccatctctactaaaaatacaaaattagccagatatggtggcgcgcacctgtaatcccagctactcaggaggctgaggcaggagaatcgtttgaactcgggaggtagaggttgcagtgagccgagatcacatcattgcactcctgcctgggcaacaagagtgaaactccatctcaaaaaaataaaataaaataatccatataatccatttctggccaggcgcggtggctcacgcctgtaatcccaacacttcgggaggctcagacaggtggatcacttgaggtcaggcattcgagaccagcctggccaacatgatgaaatcccatctctactaaagttacaaaaaaaaaaagaatagctggacatgatagcgggcacctgtaatgccagctactcgggtggctgcggcagaagaatcgcttgaacccgggaggcggaggctgcagtgagccaagatctcgccactgcattccagcctgggcaaaagagcaggactctatctcaaaatagtaacaataataataattattatttctgtggttccgagtcactcaatttatgagtaatttgttagagtcactataggaaactaatatgtaccccaaggggcaagaccccaatttccctttgtagaggtttttactaaaagtaagaggaaatgcaactcagattggcttcaacaacaaggaacattcatcaggcccatggggaacattaggttgggtttccataactgagactcagaacaagagtgtctcaaa

SEQ ID NO: 1560189 - DNA, 4001 bp, Homo sapiens
ggggtggcgagggtcagagaggtcgcgtgcttccaggggcaacgcaccgagaggatgcagtgggtaggggttcggccccgcgggctcaggggtggagacacagaaccaggccaaggtccaggagtgacagggtccgcttacgccctcacagcccgcccccgaccccccgtctcgctcactgttctggagcctcacggcctccagcgcccggaacagctcagtgcggacgtcctcacggcccctgccggcttcagccaagccctgggtcactgcggggtcaagggagcggggattatggctggggtcagggccaggaccagggtcatgactagctaaaggtcaggacccctgtctgtggtcattgtaccctcggtgccagcgtccaggatggcacagggtcaagggcggttacaactgggcagggtccgggtgtggccggcgctaggagtggcagtcaaggtcagagtgcagcgtcagggtcaggacggggtgcatgatcggggtcgggggtcagcactcaggacggggtcggggtcgggggacgcggccagggctcagggccggggtcgcgtcgggccctcaccgcgctcacgcagttcccgcagggcgctctcctgctccatcagcttcgcctgcgcctccccaagctccgcgcgcgtggtctgcagctgcgcctgcgtccccgagcctgggagccgcagggtgagaggggcgagggcggcgaggatggggcgggacttcggagaccagcccccgccccgcaccacccgccgcaggcctccgccccggcccccctcccatcgcggccgcaagaccccatccctgcgcccacagcctcgaccgcgccccctcacagcagctgtggcagtctccgacctcctccttcagggcacccagcgccgccgtctgcttcgaggctggaacgacccccgccccaaaatgcatgcccctcgggtcacttgggaggactcaggggacccccttccagcctcagggaccatagggcccccacgcactcgagactccatctccggggtctcagaaactcccgcccctcacgccccgggggcccaggcgcccggctctgcacacaccgtttgtcctcagcaggtcgtggccgtcaagcagcgccgcgcgctccgtggaggctgaggagagaggctcctgcaggcgaggccgggaactcgggaatcctcccctcgcccggggggtgcagcgtcccccaactcgggagcacggagcgggcgggcaggcatacagctcacacgatgtgcacacacgccgatgggagacaaacgcgcggggactcgcgcacatacgagcacgccatgtgcacacgcgtgagtgcacacggcccaaagatgtacacacactctgctcacactcagacgcgaacaggaccccaggatgcagctggtgcgccatgcagtgggggttttctgtccccaggggggccggatgcaacacctccccattgagagtcactcacccttggacaataggatactcagaatcacagcccaaaggactgtggtgaccaggacagccagggccaagaagaggggtctcctgctccagtgcacccagcgtccccagggccctggcataacaaggacggcatgctgggtcccccagaactgagccctggaggcctgagttactcccaggaaactgagattcagagaagttaagtaacttgcctatggtcacacagcttctaagcggcagagttggaattggaccctggtccaactggctctatggcctgtggtgtctctcctgcacccacaaccctggcctgtctcgactcttccctcccctcccccatcaaaccccagacactggggcagggatggggcagtctccttgctcatacctccggggacctcctcggagctgccgccccacttgctgtacctggtggtgtccatggcgatgcaggcacccagtcctgggcagagatataaatttcacgcctgttctcactggacctacgcactcccttccttccttcccattttcttggccttaattcctggcaacgggaacccatggaccaatcacaggattgggccctttcaaggctgggctgggctgggctggagtgaggccgggcggttccagcctcctggttctggccactgcagctccatccccaggctggtgctggaggcttctctttggagcttagtcaccatctcttatgggcctggggctggaggcttctctttggagcttagtcaccatctcttatgggcctggggctgggttttatcccgcgagggacacactgaacccgaccaaattgtaacccctgctggctcctgagaaagccccctcaggcatagccccccaggccagttcaggtcccttctcaactcccctgcaggtgcctgcagaggctgggtttgaacctgaccttgatccagtccctctgtaccagaagggaacaaacagttttgttagggaggtagccggcggagctgcaggactctaccactgtatgggttctaggtagcttctagaagccttagttttccccactgtaaaggagatagcgatgggcctctctcacaaagatgctatgataaagaaacaagacagtcttgctggctcacacctgtaatcccagcactttgggaggccgacatggaaggatcactgagcccaggagttccagaccagaccagcctgggcaatataacaagaccctcatttctgaaaaaaaaaaaaaaatatatatatatatatatatatgaaaacaaaaattgaaaaaataaaaaaataaagacaatgaggttatacatgtctacctagcaccatttcaggcatatcaaaaacactcagtgttcatgcattctttcaacaaacattgagcacctgccatatgccaggcattgatcttggaactggggccacatcagagagtaaaataagcaaattcctctcttcttggagctaatattctagaagtgtggggagacagactccatactcaacgtaataaacataattgaaaacataagttgtatagcatagtagttcccagctgggggcaattacgcccaccaggggacatttggctatgtctggagacacttttggttgtcacagaatgtgtgtgtgtgtgtgtgtgtgtgtgtgtgtgtgctccaggcatctagtgggtagaggccagggatgctgcgcaaagccctacaatgcctaagacatcccccatagcaaagaatgatctgactcctaatgtccatagtgcaaaaggtgggaaccgtagtatactctattcaaaagtcataaatgctatgaaaaaacattaagggaagaaaaaatccagtaggataagtacttggcaggactgggatgggcactaggcagtgggcagtggctagggtggccagggccagcctcactgacaaggtgaaatgttgagcacttaatagaatgttccagcccctcttgtagatatgtaaacacacttcatcttcttgagcctctcaaaaacccttatccattttttcatttaaaaattttatttgagccgaggcgcggtggctcagctctgcaatttcaacaccttggggagccaaggcagggggatcgcgagaccagcctgggcaatgtagcaagaccccatctttacaaaattaaaaaaaaattttaaattacctgggcatggtgatgtgtatcggtagtcccagctactcaggaggctgaggctggaggattgcttcagcccaggagtttgaggctgcagtgagctgtaattgtgcccgctgcactccagcctgtgacagagtgagaccctgtctcaacaataaataaataaataaattgtacttattgtctatttccccctttcttcttccaggaatgagagacattcacaataaaatgaaataaaaaaaacaagaggattttgtaaaagaaagatggaagggaaaggaaggtgaagaaaaaaccacacatctaaaaagacaagccttgtacacaaaactcagacc

SEQ ID NO: 1560190 - DNA, 4001 bp, Homo sapiens
cccacctgagcctggcccagggagagcctggcctaatccctcagcaccccaggacccaggaaccccagccccagccccctccactccaacacctgggaatccaggccctagctctaacctccccaggacccaggaaccccatccccagcctctccctccccaagtcccaggagtttaggtcccaacccccacctccccaggtcccaggaacccaggtacctgcgtccacctccccagtggaacaggaatgaaaagaaattaaagaatgtgtaagcaaaaactcagttgtatgtaagaaaacccaattccccctgaggaagagaaagaggtggaatcctttaaaaattaactgcctttttggccaggcatggtggctcacacttgtaatcccagcactttgggaggctgaggcaggcagatcacaaggtcaggagatcaagaccatcctggctaacacagtgaaaccctatctctactaaaaatacaaaaaattagccgggcgtggtggtggtgggcgcctgtagtcccagctactcgggagggtgaggcaagagaatggcatgaacctgggaggcagatcttgcagtgagccgagatggcgccactgcattccagcctgggtgacagagcaagactctgtctcaaaaaaaataaataaataaataaaaataaaaactaaataaataaaataaaaaagaattaactgcctgtttttctgtgtgtggctagtgagccttatctctccctttcccaggcattgtgaagaccctgtttctctagctgtgcagctgcaaggtcactaggcagataaactcaagttgtaaaacatgtttttccttgaaaaataagaaatgacgtaatgcatgtctcaattgaataactatctttgtttctcgcttctgtaatatgcttccccctgcacagatctccccctaccccatgaaatgcttaaaaggtaacttgactctttgtttggggctcagtctttttggatgttaatctgactgggctggtgcacctaaataataataataataataaatcctcctcaaccccttgatctctgtgattcctaaattatcctgcaacaccaggactcaggcatccaggtcccagcctccacatctccaggtcccaggaggaacccaggcccaagctcccacctccccaggtcctaggaacccagatacctgcttctacctccccaggacccacgaattcaggccccagttctcaccttccccaggacccagtaatctggtcccagctcccacctccccaggacccaggattccagtccccagttctcacctgccccaggacccaggaatccaggccccttctcccacctcctctggttccaggagtccaggctccagtccctacctcccatggacccaggtgtccagcttccaacccccacctctgtaggtcccaggagtccagaacccctctcccacctccccaggccccaggaacccaagcctcaacccccacctccccaggtgtgaggagttcagatccctaccccgtcctcttcaggacccaggaacccaggtctcagaccttccttccccagaacccaggattccagaccccaacacctacctccccaggacccaggggtctgggaggctctgtcttccactatctgctccctaactcttgcctacctgtagagctcttgtggccatgtatctgctggaattgaaagtctcttggaaaaagtctgatgccactggttgttggatcttcttctgaattgacagacatcagctcagagcctgggccatcccttccccttacccaggatcccagagttccaacccagccttacccaggaggcccagctgctgcacccttggttccttggagtcactcatgttttcccgctgtccccagatgttcaggactcctggggaccacagcttttattttccaccctctgatcctcactttctaaatctactgtctctcaggaagacaaacaggaagctgggtaagatcacatcaccagaaaggctagtgaaaggagtcagagcctgagatcggcctgaccttgcaggaatttcagggaggtgttgggggatggtctggggttgacagggagaaggactcctccactcatgacatggttgagcgatgggatgcttttaataaaattcaattcattctaatggaaagcgactttgttatgcctccctacgtagggcaggggtgggcaggcagtaccgcctagttcctggaaccaccatgccctctgacctccaggatctgctcttttggtctgcggatgctctcattcatgggaatttcctttgtttttgggagttggagatgaacgatagttgtttatttcatacctatgataggcacatttccaacagctttataaaactccttcatttaactttcctaccctgcagtagatcatgtgacctccagtttacagataggggaaaatagaggcactgcgagattaagaaactagcccaaggtcacacagctggtaaatggtggagctgagattcgaatccaggcagttttcctccacactccacccagttaaccaaagagggtctaataacatcaagggcaaaatagaaagatttatagtaactttagttagactatcccaacccaaattggaacaacccatgtggccaccagcaggtgaatgaaaacaaatatcatggcatattcagagggtggaattctatacagtaatgaaaaagcaaagtactgatacaaacaacaatttggatgaatctcacaagagttaagaaacccaaacagaatgaatacattctgtaagattttgagtttacatgaatttcaagaataggcagaagaactaacctttgatgggactcaaattgggggctttctggaaggagtgggtgtaaactgaccagaatggggtagaaggaaattttctgctgacaatgttccatatttttttctgagaagtggctgcatggatgaattcatatgtcaaaatttcttctctttctttctttctttctttttttttttttttttttgagacagagtctcgctctgtcacccaggctggagtgcagtggctgatctgggctccctgcaacctccgcctcctgggttcaagtgattcttctgcctcaacctcccgagtagctgtgactacaggtgtgcgccaccacatctggctaatttttgtatttttatttatttattggagacggagtctcgctgtgttgcccaggctggaatgcagtggtgcaatcttggctcactgcgacctccacctcccagggtcaagtgattctcctgcctcagcctcccgagcagctgggattacaggtgcatgccaccatgcctggctaatttttttgtatttttagtagagacgggtttcatcatgttggacaggctggtctggaactcctgaccttaagtgatctgccctcctcggcctcccaaagtgctgggattacaggtgtgagtcactgtgcctggcccatatgtcaaaatctcttgaactatatatttaagacttgtgtactgtgttgtaaatgtgttatatatcaatttaaaaatgagaaatacagaggcagttcaacatggcagattggaggcatctggcactcacctcctccccaaagaagaattaaacagtgggtagataatcacactttgaatacagcaactaagagaaaacactggaattcagcagagaagtgataggaaacatctgtggcctggaaggagggaaacaaggcagctggcccagcctggatcagctgggagcaccaggttggggggttcccagtgcaggaacagggtaagtgagagatcccctgcagtgcacattcccaccatgaactcctgaaatcctagctgtgggagagctcctcaaccctcatgggccatgagaccagtataaggtgctgcttggagttcatgtgacaacattactccagagagggagctgactctgggttccacacatcccccaacac

SEQ ID NO: 1560191 - DNA, 4001 bp, Homo sapiens
agaatataaccaaagtcctcactgtagccttgaaggcccttccagatctggcctatgccaacctctcacctcaacctcgatcattccctgaatgcagctccaggatctttctgttccaagttcaattctgcctcagggcctttgcacttgctgctgtctgcctggaacactctttttccagctctcttatggctgattcctccccatgctctgggtcccaaactaaatgttacctactcagaaagagcagccctgactacccctgcaggtagctgccccctagtcattatcgtatctccacctttaatttctttttcttttttctttttttcttttcttttttttttttttcttttttttttttttttttgagacagtcttactctgtcactcaggctggagtgtagtggctcgatcttgggcaacctctgcctcccaggttcaagcgattctactgcctcagcctcccgagtggctgggattacagacatatgccactatacccagccaatttttgtatttttagtagagatggggtttcaccatgttggccatggctggtctcaaactcctgacctcaggtgatccgctggcctcagcctcccaaagtgctgggattacaggcgtgagacaccatgcccagcccaccttttctttctttcatagcacttgctccaatctgaatttatctgatttctgatttatttatctgttcacttgtttagtctctccttctctcctgcaagggaggatcatgcctggatcacttaggattaaatctccggcacccagcataaggcttgtcacagagtagcagcactcgataaatatcgctcggtcaatgattagacactttcagtttctccaagaggccgccctctcagctccataccctcctacctcagatcctttacccagcggttacctctcctgggagccctttcccctgacccttctcttagttaaccccaactcaccctccagtcttctcaactgtaacctcctcagggaaacaatgtcttaaaaaactcttgcagcagcttgtttatggtaaatacaattttcataatgtcttgtaattacatatttatattacattatatttttctttcttgcatataaacctaaatgtgaaaaattacattatggtttaatacctatttgtgtggctgttactgaggcctgtgagttgtctcagggcaaagactgggtctctcttgccccctgctgtggccccagcccctagcataaagccaggtccacagccgctttcaaaaaatgattgttgaatgactaaatgatggaatgatgtgtcatgagtcaaagactaggagtattacaattccattctccaatgggtgaatgaatgaattaacgaggggtgctctgcagccaagattcctctggaccaccttcaaattccccagaattctcccaccatcaccaccagcagagcacagcccaccctccccggccacccaacgctccaggccagattccagggtggggacagtggttaccgtagtccttagggaggggggcaggtgccgaggggtgcacaacaggcttctgccggcgctcctgggtggggctgggggcctcggggacgggttcatcctcctcctcctcttcttcctcctctcctcggggtggcggggccatcggggcaggatctgtcttagtcatggtcctcggtggccctcggggggcgggtgcagagttgggggcagccttcaggcaaatcctggaggcagaggtcagctggagagggtgcccggcaggctccagggtccaagcccctaggagcttccagggccccgggtggcctccgcgcaactggatcttgggcaaccatagggacccccgttacccatagagggccccggtgtgtgcgcccagcgcctgccacctcccccaggcccagccccccattcttctcctcccgcgtcaggcccctcagtcgcggctgccccctccccgggtttgtttatctcgggattcaggatgcttcgcccctccccttctccgcgggccgccccctccccatcttacctcgggcagacagcgctggggaccaaagtggagactggggagactgtgggagcaatggggtgtcggtgtcaggggacgtgatgggggaggcaagggagacagagagaaggggacgaggcccagacgccgacagggggtgggggcggagagggaggggcgcgactgcgcatgcgcctgctgcccccctaccggcggcgggggaggagggaccaggaggagggaccgggaggcgctcgcattgatggaggggccagaggcggcgactgaaaggggagagcctccgggcactgggagaggaagagatggctacggaaaggagcgagatgagcagatacaacggcaaaagagagggctgagagagcggacacagatcttctccatccccttcccccacgcctgcaaaccaggccggtgagggcagtggtcttggggcgtggtgacgatggggaccctctaggggaccctctctctaggaccctagaccggaccccttctccaagctcaccattcataatgggtgcctcagaggggtgatttcctagagactcctatcatgatcatctcatccttaccatcataatgcgaggctcacacactggggcccagaggttaagcagcttgcccaaaagtacatgagtaggtgatggagcgaacatttgaaaccagacagtctgtaaagtctgatttttatttttattatttcctagacagggtctcactctgtcacccaggctactgtgcagtgttgtgatcttggctcactgcagcgtcaaacttctgggctcaagccatcctcccacctcaacctcccgagtagccgagaccacacgtgcatgccaccatgtctggagaattttttttgagacagggttttgccatgttgcccaggctggtcttgaactcctgacctcaagggatcctcctgcccctgccacccaaagcgctgagattacaggcacgagtcaccatgcccagctttgattcttaatcaccatgctacatgcctgtagcagtgtctgggaaacagatctgccgattgacccctccaactctctcagaacctgtatcttccccacggaggcctcctgaagccagcccagggtcctggctccattgtcatggcttggcttcccacctggagctgtagcctgctctgcctcaaatcatcccagcctggatggggctgggtgacagccttgaacacctcatccttctaatgcacaggtccagtagctccatctccaaaagatttccaggatctcactctccccaccgctaccctgggccctcatcttggtccatccttcttcttctgccaccagcactacggcagcagcctcttacctgctgtccccgtcctcctccaacatgcagccacagggacccatgaacacctgtcactttggagccctctttccctcagaggggtctgcctgctgcacctcactccaggtagaagccaaggctctcagccatggcccacaagggcctatgtgaacctgccccatcatctctgcactcacctcctctcaccctcttttgttcactccaccccagccacactggcctccttgcttctccctaccccaggacctttgcactggctcttttttttttttttttttgagatggcagtctcactgttccccaggctggagtggagtggcatgatctctgctcactgcaacctctgtcttccaggttcaagtgattctcctgcctcagcctcccgagtagctgggattacaggcctgtgccaccacacccagctaatttttgtatttttagtagggacggggtttcgccatgttggccaggctggtctcaaactcctgaccttaggttatctgcctgcctcagcttcccaaagtgctgggacgacaggcgtgagccaccgtgcctggcctgcaacggctctttgtgatgcccggaatgctcttcctccaaat

SEQ ID NO: 1560192 - DNA, 4001 bp, Homo sapiens
aaatgttacctactcagaaagagcagccctgactacccctgcaggtagctgccccctagtcattatcgtatctccacctttaatttctttttcttttttctttttttcttttcttttttttttttttcttttttttttttttttttgagacagtcttactctgtcactcaggctggagtgtagtggctcgatcttgggcaacctctgcctcccaggttcaagcgattctactgcctcagcctcccgagtggctgggattacagacatatgccactatacccagccaatttttgtatttttagtagagatggggtttcaccatgttggccatggctggtctcaaactcctgacctcaggtgatccgctggcctcagcctcccaaagtgctgggattacaggcgtgagacaccatgcccagcccaccttttctttctttcatagcacttgctccaatctgaatttatctgatttctgatttatttatctgttcacttgtttagtctctccttctctcctgcaagggaggatcatgcctggatcacttaggattaaatctccggcacccagcataaggcttgtcacagagtagcagcactcgataaatatcgctcggtcaatgattagacactttcagtttctccaagaggccgccctctcagctccataccctcctacctcagatcctttacccagcggttacctctcctgggagccctttcccctgacccttctcttagttaaccccaactcaccctccagtcttctcaactgtaacctcctcagggaaacaatgtcttaaaaaactcttgcagcagcttgtttatggtaaatacaattttcataatgtcttgtaattacatatttatattacattatatttttctttcttgcatataaacctaaatgtgaaaaattacattatggtttaatacctatttgtgtggctgttactgaggcctgtgagttgtctcagggcaaagactgggtctctcttgccccctgctgtggccccagcccctagcataaagccaggtccacagccgctttcaaaaaatgattgttgaatgactaaatgatggaatgatgtgtcatgagtcaaagactaggagtattacaattccattctccaatgggtgaatgaatgaattaacgaggggtgctctgcagccaagattcctctggaccaccttcaaattccccagaattctcccaccatcaccaccagcagagcacagcccaccctccccggccacccaacgctccaggccagattccagggtggggacagtggttaccgtagtccttagggaggggggcaggtgccgaggggtgcacaacaggcttctgccggcgctcctgggtggggctgggggcctcggggacgggttcatcctcctcctcctcttcttcctcctctcctcggggtggcggggccatcggggcaggatctgtcttagtcatggtcctcggtggccctcggggggcgggtgcagagttgggggcagccttcaggcaaatcctggaggcagaggtcagctggagagggtgcccggcaggctccagggtccaagcccctaggagcttccagggccccgggtggcctccgcgcaactggatcttgggcaaccatagggacccccgttacccatagagggccccggtgtgtgcgcccagcgcctgccacctcccccaggcccagccccccattcttctcctcccgcgtcaggcccctcagtcgcggctgccccctccccgggtttgtttatctcgggattcaggatgcttcgcccctccccttctccgcgggccgccccctccccatcttacctcgggcagacagcgctggggaccaaagtggagactggggagactgtgggagcaatggggtgtcggtgtcaggggacgtgatgggggaggcaagggagacagagagaaggggacgaggcccagacgccgacagggggtgggggcggagagggaggggcgcgactgcgcatgcgcctgctgcccccctaccggcggcgggggaggagggaccaggaggagggaccgggaggcgctcgcattgatggaggggccagaggcggcgactgaaaggggagagcctccgggcactgggagaggaagagatggctacggaaaggagcgagatgagcagatacaacggcaaaagagagggctgagagagcggacacagatcttctccatccccttcccccacgcctgcaaaccaggccggtgagggcagtggtcttggggcgtggtgacgatggggaccctctaggggaccctctctctaggaccctagaccggaccccttctccaagctcaccattcataatgggtgcctcagaggggtgatttcctagagactcctatcatgatcatctcatccttaccatcataatgcgaggctcacacactggggcccagaggttaagcagcttgcccaaaagtacatgagtaggtgatggagcgaacatttgaaaccagacagtctgtaaagtctgatttttatttttattatttcctagacagggtctcactctgtcacccaggctactgtgcagtgttgtgatcttggctcactgcagcgtcaaacttctgggctcaagccatcctcccacctcaacctcccgagtagccgagaccacacgtgcatgccaccatgtctggagaattttttttgagacagggttttgccatgttgcccaggctggtcttgaactcctgacctcaagggatcctcctgcccctgccacccaaagcgctgagattacaggcacgagtcaccatgcccagctttgattcttaatcaccatgctacatgcctgtagcagtgtctgggaaacagatctgccgattgacccctccaactctctcagaacctgtatcttccccacggaggcctcctgaagccagcccagggtcctggctccattgtcatggcttggcttcccacctggagctgtagcctgctctgcctcaaatcatcccagcctggatggggctgggtgacagccttgaacacctcatccttctaatgcacaggtccagtagctccatctccaaaagatttccaggatctcactctccccaccgctaccctgggccctcatcttggtccatccttcttcttctgccaccagcactacggcagcagcctcttacctgctgtccccgtcctcctccaacatgcagccacagggacccatgaacacctgtcactttggagccctctttccctcagaggggtctgcctgctgcacctcactccaggtagaagccaaggctctcagccatggcccacaagggcctatgtgaacctgccccatcatctctgcactcacctcctctcaccctcttttgttcactccaccccagccacactggcctccttgcttctccctaccccaggacctttgcactggctcttttttttttttttttttgagatggcagtctcactgttccccaggctggagtggagtggcatgatctctgctcactgcaacctctgtcttccaggttcaagtgattctcctgcctcagcctcccgagtagctgggattacaggcctgtgccaccacacccagctaatttttgtatttttagtagggacggggtttcgccatgttggccaggctggtctcaaactcctgaccttaggttatctgcctgcctcagcttcccaaagtgctgggacgacaggcgtgagccaccgtgcctggcctgcaacggctctttgtgatgcccggaatgctcttcctccaaatccctacgtggctccctctctgccctgttttaggatcttacttgttggtgtcttttcaccttctctgctctaaaactgcaccccttcctcccttccctactatggttttctccatagcaacaccgcctcccagacctgacacatcccagacagcaggccctcactgcaggggttgttcgtcctctggaacctgagcctgtagcgctccaggccagccccttctga

SEQ ID NO: 1560193 - DNA, 4001 bp, Homo sapiens
tactaaatttccaagagaaactagaaatcaggccaggcgtggtggctcatgcctgtaatcccagcactttgggaggctgaggcgggtggatcacttgaggtcaggagttcaagaccagcctaacatggtgaaacatcatctctacgaaatacaaaaaattagacaggcatggtggcacatgcctgtaatccccagctacttgagaggctgaagctggagaatcgcttgaacccaaggaggcagaggttgcagtgagctgagattgcaacactgcactccagcctgggtgacagaacgagactccatctcaataaaaaaaaaaaaaaatgcctccatcataagtgctcaatcaaaattgactactttttttggggagggggaaaaaatctaccaattatgattatttttgagatgggctcactacagcctcgacctcctgggctcaagtgatccttctccctcagccttccgagttgctgggactacaggcacacgccacattgcccggctaatctttgtactttttttgtagagatggggtctcactacgttacccaggctggtcttgaactcctgagctcgagcaatccgcccgcctcagcctcccaaagtgttgggattaccggtgtgagccactgtgcccggcctaaaatctaccaatttttaaatgtcagccgggtcaggttggcagaacagtatgtgcaggatcaaagaggccacatcctgacttgtgaaccgaggctcaaaagccagcaacaggcaccttttggtggtttaaagccacttctggaactctgacgctctgcaccctttcccagagagagaacatccctgacccgggattctggtcccctgagtcacccgtgtgccctgacgagtgcccctggcacccaggaaagaccctgctcaccagggctgttgatgtacatgtggatgggcttcttgttgctctcggattgcaggaagaggagctgtgcgataacaaggctggcaacgctgtcatcgatctgcaggtggagagggcaggggtgtccccagattcggggtggggagagagttttaagggaggctggggatgggtcagggaaccaggaagggggaccagagcccaaagtaaaagggatggggaagaatttaggccccagaaggggatggggagagagtagtggagaggacccagggggtttggagcacaggaaggggggagtcagggggctagggacacaggaaaggaaggggtgagaatggctggggagagtcttgagcgtaggaatgaggggagcggtgccaggtgtcaggaaggaagtcggagattaagagccgaggagcagagaaggggtgaggagcgggttgggggaccgggagccaggaggggagtcagaaggggagggaagggggttagaaggggagcggagcctgagggaaagtctggggccagggaaggaggggcgcagggagtgtcggcaggcgcttgggagagtcctggggagggtcccggcgcggggcgctcaccgggcccatgacgcacacgatgcgctcccgcagcagccgcgagtagatgtcataggcgcgctcgccgcgaccctgggggtagaaagatggaggtgaggggccggggcagccagccgatccccacccagcccggagcccccgaaccgtgtccccgcccggccgccgtaccgtctgctccaccacgatgggaatgagcgggagagcccgggtcgccgtcgcgtgcaggcaccgctgcagggccaggccgttctggagtgtccgctgcggcggccgctgcgctggaaagtgagcggcgaggcgaggccccagcgcggggtacctgcatgacgccacccgggccccccctaccaatattccgggccacatccctccgcacgccccggtcggcttccgtccgatggcggaactacagcttccggcgtgctttgcgcctgggagctcgctcgctaggccgctcacttccaggagtctgggcgggcgccattaagggtgaggcggggatagggacggagcctgaaagggaggagccaatgaagtaaattgagtgggcagggctggagaagttttagagtctccagttcgagtccccttaccgaccaattcgtcttcttttttttttttttttgagacggagtcttgctctgtcacccaggctggagtgcggtggcacgatgttgggtcactgcaacctctgccttctgggttcaagccattctcctggctcagctgccccagtagctgggattacagatgcacaccactgcacccggttaattttgttatttttagtagagatgggtttcaccttggccaggctggtcttgaactcctgacctcgtgatcttcccacctcggcctcccaaagtactgggattacaggcgtgagccaccgcgcccggcctcgtcttcgttttctactgtttctgctttatttatttttatttttttgagacagaatctcactctgtggcccaggctggagtgcagtggcgccatcctagctcaatgtggcctcaaatttctgggcccaagcaaccctccctcccaccttgctctccagagtagctgggactacagttgtgtgctaccacatctggcaaatatatatatatatgtattagagatggggtcttactatgtcgcccaggctggtctcaaactcctggcctcaagtgatcctcccacctttgcctcccaaagtgctgggactacaggcatgagccaccacaccccacttattccttattttaaaaatagctgcagggccgggcacagtggctcacgcctgtaatcttagcactttgggaggctgaggtgggcggatcacgaggtcaggagatcgaaaccatcctggctaacacggtgaaaccgcgtctctactaaaaatacaaaaaattagccgggcgaggtgacgggcacctgtagtcccagctactcaggagactgaggcaggaaaatggtgtgaacctgggaggtggagcttgcagtgagctgagatggcgcctctgcactccagcctgggcgacagagccagacaccgtctcaaaaaaaaaaaaaaaagctgcagtgttcccacagctcatcttggaagaggggtcccagagaggacttagcctgggtcttggccttgaagagcttccagcctggtgtggccgacttctactgagacctcctcattcattttttggccacctgtggagtagattgtgggagcccagagaagggtgttgtggattcttcctggagatcagaccggaaagcattcctaggagaagcaggtattggaattgggctttgcaggataagtaggagtttgttagctggggaaaggcatttccagcagaggaaaaagaatgggcaaaatggtggaagtaggaagattgctggtaatgttgggacttctcttttttgccacaccttctcaagccagattctttttcatcattcagttcaatgtcactatctaagaggtgcccactgcttcatccccaaagtctagaatagtgcctgacacacagtaggtgctcattaaatacacattgaaccaagagatgaagaggtgataaaggaggtaggtagagggctttggaggcatctgcagagtggggataatgataacctacctcctaggtttgtgcagaaagtcctcagaaagggtccaaaaatgtgtaaaaagtgctcagtttgaatgatttattgctgtgttagatcagggaccatggaagtctgagaagtcttcaggtcctcccacatgggagtctacttgaagtgtttttttcttttttttcccggggcagtccttcgaatcacagcagattcaggcgaggtgttgtggtggctcatgcctgcaatcccagcactttgggagcccaagacatgtggatcacctaaggacaggggtttgagaccagcctgaccaacacagtgaaactccgtctctattaaaaatacaaaattatctcggcatggtggtgaatgcctgtaatccc

SEQ ID NO: 1560194 - DNA, 4001 bp, Homo sapiens
tgctgctaaacatcctaaaatgcacagggcagccccccaaacaaagcattatccaattcaaaatgttgatagtgccgagctcgagaaatcctagtctagtctgaagaaaagtgtcggatcgtgcaagactgtgatttattaaagaatttgtactttgtcctaaaggcaaaggggtaactcttgattgtttttaagcagagttggtacaagagaagatcagagtgccatctggaagctcagggcaatgagaacaacctgggccctggtctctcaagccaccatcaacccaataatcaacagaaacccagaggggaaacgacctcctttcagcaagactgggaaacccttgaagacaggaactgagccttcattccagcactaactcaacaaacatttcctaagctgtccctgaagccaggccctggctgagaatgctgaaaagattcagagcagatacagtgggctctatcacacaaatttcatccatgtgtcctacccaagtgataccacttgctctttctctgggctcccccagtccctgacacagacttttgtcaccaacctaatcattcaggattacaactgtttacatgtcagtctcctctcttcgtcccctgacagcagggatatggctggccctcctgtccaacctctgcatttaacacgggagagataaaggcctaaagagggaaaggaacttgcccaaggtcacacagagagtcagcttcattctcccctctcaacccgcactcctttcccctgagctgcctcccacatgtcagtgacatcccagtgggtgggtcgacagcaccttcatgtctctccatctattccccaaatgcctgaacggtagctgcctgaaatggtatgctctgcagtgtgttaagacagcagtggggcagaagtcatccgcaccaggactaattaacccatagaactattttacattaaaaccacaaccataccagtccctgtgtcagcagtgtcttgtaacttctacataaagttacaaacctaaccaggatgaccttctagaagcgccttagtctcactgttccttgaattcccgtctgtaaaatgggtctgtcggccgtgccctgctaatactgacttccccacagctagaaaactcccaattaatcactgcgcacacctcaaacactacaacgagacctgaacgccagaccactctaggaacggcctcagagcatggaatcgcggagttgagaacccagcgcgccaaggtacaagcctgcgcccctccgagccactgtctccccggatcgagcaatgagcctggtggccgcccggctcgagcgtgcaggggaaccgacccgcaacagggccctgttcccggcaccgtccggcctcccgggcggtccggccctgcctgggccgggtattcaaggtccctctggccaaggagcccccagtgcacgggattccgtgacaagaggtaggacacgccccgtgggaggccccccggctggggaagaaccccctcagtcccctctcggcctccgtacctgaccggagctgcctcccccggccgccaccacggcgctgcgggccccgtccgcctcctgcgccgccgccatcttcccgctccgggtccccgcccccgccgccagccccgccccgtccccgacttcgcagcgcaatcgcgcgagatttcacgctttcctagccccgccgggccaccctatccggcaagagtgccgcagccacgcctctcaggaaggccacttccggctatggaaggaccaacctggccaccgtactcgtctttctcccagcccgtttgtttccacctaataaaaacactgtatgctccgaactccaggactttctcggccagcatgtgcctcccgcaagttctgtcccttccgtcccttcacattaacccgccttttcggttatatgagcctttcgggacatcctgtccgcttctccctgccgattcttcgcgtccttttcgttccatgtttcttgagctttaccggccactgtacggcttcgaaccacgcccctctttcgtcagaggaacctttctggccaccgtattctgattcgaagaactagccttttgcccagcacccttgtcttctgacccctcttcctaagacaactctttcgttcaagtctcctgagctcatatcctttctgtgtttttagagttccaattccaggggtcttacggccaacaaacctccgatgagaccctatgatacacccccaagccttcggactgccctgcctagcacgcatgcgcgttccctcagtggtccaaacctcgcatccgtgggctaggcttcacgggctctgagaattccacaatttttcattagctgtgtgtcttcgtacagctctaaacccggccatctgctgagagacccttagtttggagagggtgttacggaggcccagagaggacaagactctcagaggctgttaactgttcacccgtgaaattgggtggatgtctggccagggttctaacccttgtggtgctactgactggataagatatcctggacaagtgacgtctctctctctctttttttttcttttttagacggagcctcactctcccccaggctggagtgcaatggcgcgatctcggctcactgcaacctcggctcactgcatcctcggcctcccgagtagctgggattacaggagcacgccaccactcctggctaattttttttttttttttgagacggagtctcgctctgtcacccaggctggagtgcagtggcgcgatctcggctcactgcaacctctgcctcccggattcaagcaattctcctgcgtcagcctcccattttttttttttttttgtaagtagagacggagtttcaccgtgttggccaggctggtgacaagtgacatctatgtttgagcctcagtttctccccttttataaaccagggatataatcgtactcgttcttcgtcttcccgttttgccccgctgtgttattgggaagacgtagttagatggcgaatggaaaacatcaggccctgggcctcatgcttaagtggtcaatatttggagcgctgtgattatgaaccttatatattacctggaaaaagagtaagctttgcattgggatattctgaatatataattatcattttattatcggtttcctccactttcctctaggtctcagccctgtaacagtagctctcgctctaggaaactctctctgagcccttttcctatcctcccttgccccctcagctcctccaccccatccctgctcactttgtgtcatcactgtcagggatgggtgtgtctccccaactgggcaggctgacctgggactgttgtggtcactgctgtatctccagcactgccctggggatgattgccctggggatgaggctctctaggtgcagaaggtgagtgacttacctctctgagggctaacacaggacaagaaggaaccttagaaaacttcgctcctcagccaggcgcggtggctcacgcctgtaatcccagcactttgggaggccgaggcaggcggatcacctgaggtcgggagttcaagaccagcctggccaacattgtgaaaccccgtctctactaaaaatacaaaaattagccgggcatggtggcggacgtctgtaactccagctactcgggaggctgaggcaggagaattgcttgaacccgggaggcagaggttgcagtgagccaagatcatgccactgaattccggcctgggcaacagagcaagactccacctccaaaaaagaagaaagaaaagaaaaagaaaactcagtgcctcatcctcactgttacagacaataatggtgttaataacgattctttgaatgtgtaggcccagtcttttaagtccagggatgaagtgaatagactaagacagggattgaggagagactttgtggggtctgaagcttatgtgttttgtgggcctctttttttttttttttttgagatggagtcttgctctgtcacccaggctggag

SEQ ID NO: 1560195 - DNA, 4001 bp, Homo sapiens
ctgaagccaggccctggctgagaatgctgaaaagattcagagcagatacagtgggctctatcacacaaatttcatccatgtgtcctacccaagtgataccacttgctctttctctgggctcccccagtccctgacacagacttttgtcaccaacctaatcattcaggattacaactgtttacatgtcagtctcctctcttcgtcccctgacagcagggatatggctggccctcctgtccaacctctgcatttaacacgggagagataaaggcctaaagagggaaaggaacttgcccaaggtcacacagagagtcagcttcattctcccctctcaacccgcactcctttcccctgagctgcctcccacatgtcagtgacatcccagtgggtgggtcgacagcaccttcatgtctctccatctattccccaaatgcctgaacggtagctgcctgaaatggtatgctctgcagtgtgttaagacagcagtggggcagaagtcatccgcaccaggactaattaacccatagaactattttacattaaaaccacaaccataccagtccctgtgtcagcagtgtcttgtaacttctacataaagttacaaacctaaccaggatgaccttctagaagcgccttagtctcactgttccttgaattcccgtctgtaaaatgggtctgtcggccgtgccctgctaatactgacttccccacagctagaaaactcccaattaatcactgcgcacacctcaaacactacaacgagacctgaacgccagaccactctaggaacggcctcagagcatggaatcgcggagttgagaacccagcgcgccaaggtacaagcctgcgcccctccgagccactgtctccccggatcgagcaatgagcctggtggccgcccggctcgagcgtgcaggggaaccgacccgcaacagggccctgttcccggcaccgtccggcctcccgggcggtccggccctgcctgggccgggtattcaaggtccctctggccaaggagcccccagtgcacgggattccgtgacaagaggtaggacacgccccgtgggaggccccccggctggggaagaaccccctcagtcccctctcggcctccgtacctgaccggagctgcctcccccggccgccaccacggcgctgcgggccccgtccgcctcctgcgccgccgccatcttcccgctccgggtccccgcccccgccgccagccccgccccgtccccgacttcgcagcgcaatcgcgcgagatttcacgctttcctagccccgccgggccaccctatccggcaagagtgccgcagccacgcctctcaggaaggccacttccggctatggaaggaccaacctggccaccgtactcgtctttctcccagcccgtttgtttccacctaataaaaacactgtatgctccgaactccaggactttctcggccagcatgtgcctcccgcaagttctgtcccttccgtcccttcacattaacccgccttttcggttatatgagcctttcgggacatcctgtccgcttctccctgccgattcttcgcgtccttttcgttccatgtttcttgagctttaccggccactgtacggcttcgaaccacgcccctctttcgtcagaggaacctttctggccaccgtattctgattcgaagaactagccttttgcccagcacccttgtcttctgacccctcttcctaagacaactctttcgttcaagtctcctgagctcatatcctttctgtgtttttagagttccaattccaggggtcttacggccaacaaacctccgatgagaccctatgatacacccccaagccttcggactgccctgcctagcacgcatgcgcgttccctcagtggtccaaacctcgcatccgtgggctaggcttcacgggctctgagaattccacaatttttcattagctgtgtgtcttcgtacagctctaaacccggccatctgctgagagacccttagtttggagagggtgttacggaggcccagagaggacaagactctcagaggctgttaactgttcacccgtgaaattgggtggatgtctggccagggttctaacccttgtggtgctactgactggataagatatcctggacaagtgacgtctctctctctctttttttttcttttttagacggagcctcactctcccccaggctggagtgcaatggcgcgatctcggctcactgcaacctcggctcactgcatcctcggcctcccgagtagctgggattacaggagcacgccaccactcctggctaattttttttttttttttgagacggagtctcgctctgtcacccaggctggagtgcagtggcgcgatctcggctcactgcaacctctgcctcccggattcaagcaattctcctgcgtcagcctcccattttttttttttttttgtaagtagagacggagtttcaccgtgttggccaggctggtgacaagtgacatctatgtttgagcctcagtttctccccttttataaaccagggatataatcgtactcgttcttcgtcttcccgttttgccccgctgtgttattgggaagacgtagttagatggcgaatggaaaacatcaggccctgggcctcatgcttaagtggtcaatatttggagcgctgtgattatgaaccttatatattacctggaaaaagagtaagctttgcattgggatattctgaatatataattatcattttattatcggtttcctccactttcctctaggtctcagccctgtaacagtagctctcgctctaggaaactctctctgagcccttttcctatcctcccttgccccctcagctcctccaccccatccctgctcactttgtgtcatcactgtcagggatgggtgtgtctccccaactgggcaggctgacctgggactgttgtggtcactgctgtatctccagcactgccctggggatgattgccctggggatgaggctctctaggtgcagaaggtgagtgacttacctctctgagggctaacacaggacaagaaggaaccttagaaaacttcgctcctcagccaggcgcggtggctcacgcctgtaatcccagcactttgggaggccgaggcaggcggatcacctgaggtcgggagttcaagaccagcctggccaacattgtgaaaccccgtctctactaaaaatacaaaaattagccgggcatggtggcggacgtctgtaactccagctactcgggaggctgaggcaggagaattgcttgaacccgggaggcagaggttgcagtgagccaagatcatgccactgaattccggcctgggcaacagagcaagactccacctccaaaaaagaagaaagaaaagaaaaagaaaactcagtgcctcatcctcactgttacagacaataatggtgttaataacgattctttgaatgtgtaggcccagtcttttaagtccagggatgaagtgaatagactaagacagggattgaggagagactttgtggggtctgaagcttatgtgttttgtgggcctctttttttttttttttttgagatggagtcttgctctgtcacccaggctggagtgcagtggcatgatctcagctcaatgcaagctccgcctcctgggttcacaccattctcctgtctcagcctccggagtagctgggactacaggcgcccaccaccacgcccagctaattttttgtatttttagtagagacggggtttcaccgtgttagccaggatggtcttgatctcctgacctcgtgatccgcctgcctctgtctcccaaagtgctgggagtacaggcatgagccaccgcgcctggcctggcctcttttaaaaagtacaaaattggctgggtgtggtggctcacactgtaatcccagcactttgggaggcagaggctggtggatcacctgaggtcgggagttcgagaccagcctgaccaaaatggagaaaccccatctctactaaaagtacaaaattag

SEQ ID NO: 1560196 - DNA, 4001 bp, Homo sapiens
gggagagacctgtgcatagactatgaggaaagagactgagaggcaataaaagaggtttagaaataaaataggttcagagcagcggatcccctttagcgcagttgttctcacgcagggatggctttgcccccctgctcttggaacatttggcaatgtctggagacatatatggttgtcacaactggggaggggcgtggatcctactgacatctagtgcgtagaggccacggatgctgctaaacatcctaaaatgcacagggcagccccccaaacaaagcattatccaattcaaaatgttgatagtgccgagctcgagaaatcctagtctagtctgaagaaaagtgtcggatcgtgcaagactgtgatttattaaagaatttgtactttgtcctaaaggcaaaggggtaactcttgattgtttttaagcagagttggtacaagagaagatcagagtgccatctggaagctcagggcaatgagaacaacctgggccctggtctctcaagccaccatcaacccaataatcaacagaaacccagaggggaaacgacctcctttcagcaagactgggaaacccttgaagacaggaactgagccttcattccagcactaactcaacaaacatttcctaagctgtccctgaagccaggccctggctgagaatgctgaaaagattcagagcagatacagtgggctctatcacacaaatttcatccatgtgtcctacccaagtgataccacttgctctttctctgggctcccccagtccctgacacagacttttgtcaccaacctaatcattcaggattacaactgtttacatgtcagtctcctctcttcgtcccctgacagcagggatatggctggccctcctgtccaacctctgcatttaacacgggagagataaaggcctaaagagggaaaggaacttgcccaaggtcacacagagagtcagcttcattctcccctctcaacccgcactcctttcccctgagctgcctcccacatgtcagtgacatcccagtgggtgggtcgacagcaccttcatgtctctccatctattccccaaatgcctgaacggtagctgcctgaaatggtatgctctgcagtgtgttaagacagcagtggggcagaagtcatccgcaccaggactaattaacccatagaactattttacattaaaaccacaaccataccagtccctgtgtcagcagtgtcttgtaacttctacataaagttacaaacctaaccaggatgaccttctagaagcgccttagtctcactgttccttgaattcccgtctgtaaaatgggtctgtcggccgtgccctgctaatactgacttccccacagctagaaaactcccaattaatcactgcgcacacctcaaacactacaacgagacctgaacgccagaccactctaggaacggcctcagagcatggaatcgcggagttgagaacccagcgcgccaaggtacaagcctgcgcccctccgagccactgtctccccggatcgagcaatgagcctggtggccgcccggctcgagcgtgcaggggaaccgacccgcaacagggccctgttcccggcaccgtccggcctcccgggcggtccggccctgcctgggccgggtattcaaggtccctctggccaaggagcccccagtgcacgggattccgtgacaagaggtaggacacgccccgtgggaggccccccggctggggaagaaccccctcagtcccctctcggcctccgtacctgaccggagctgcctcccccggccgccaccacggcgctgcgggccccgtccgcctcctgcgccgccgccatcttcccgctccgggtccccgcccccgccgccagccccgccccgtccccgacttcgcagcgcaatcgcgcgagatttcacgctttcctagccccgccgggccaccctatccggcaagagtgccgcagccacgcctctcaggaaggccacttccggctatggaaggaccaacctggccaccgtactcgtctttctcccagcccgtttgtttccacctaataaaaacactgtatgctccgaactccaggactttctcggccagcatgtgcctcccgcaagttctgtcccttccgtcccttcacattaacccgccttttcggttatatgagcctttcgggacatcctgtccgcttctccctgccgattcttcgcgtccttttcgttccatgtttcttgagctttaccggccactgtacggcttcgaaccacgcccctctttcgtcagaggaacctttctggccaccgtattctgattcgaagaactagccttttgcccagcacccttgtcttctgacccctcttcctaagacaactctttcgttcaagtctcctgagctcatatcctttctgtgtttttagagttccaattccaggggtcttacggccaacaaacctccgatgagaccctatgatacacccccaagccttcggactgccctgcctagcacgcatgcgcgttccctcagtggtccaaacctcgcatccgtgggctaggcttcacgggctctgagaattccacaatttttcattagctgtgtgtcttcgtacagctctaaacccggccatctgctgagagacccttagtttggagagggtgttacggaggcccagagaggacaagactctcagaggctgttaactgttcacccgtgaaattgggtggatgtctggccagggttctaacccttgtggtgctactgactggataagatatcctggacaagtgacgtctctctctctctttttttttcttttttagacggagcctcactctcccccaggctggagtgcaatggcgcgatctcggctcactgcaacctcggctcactgcatcctcggcctcccgagtagctgggattacaggagcacgccaccactcctggctaattttttttttttttttgagacggagtctcgctctgtcacccaggctggagtgcagtggcgcgatctcggctcactgcaacctctgcctcccggattcaagcaattctcctgcgtcagcctcccattttttttttttttttgtaagtagagacggagtttcaccgtgttggccaggctggtgacaagtgacatctatgtttgagcctcagtttctccccttttataaaccagggatataatcgtactcgttcttcgtcttcccgttttgccccgctgtgttattgggaagacgtagttagatggcgaatggaaaacatcaggccctgggcctcatgcttaagtggtcaatatttggagcgctgtgattatgaaccttatatattacctggaaaaagagtaagctttgcattgggatattctgaatatataattatcattttattatcggtttcctccactttcctctaggtctcagccctgtaacagtagctctcgctctaggaaactctctctgagcccttttcctatcctcccttgccccctcagctcctccaccccatccctgctcactttgtgtcatcactgtcagggatgggtgtgtctccccaactgggcaggctgacctgggactgttgtggtcactgctgtatctccagcactgccctggggatgattgccctggggatgaggctctctaggtgcagaaggtgagtgacttacctctctgagggctaacacaggacaagaaggaaccttagaaaacttcgctcctcagccaggcgcggtggctcacgcctgtaatcccagcactttgggaggccgaggcaggcggatcacctgaggtcgggagttcaagaccagcctggccaacattgtgaaaccccgtctctactaaaaatacaaaaattagccgggcatggtggcggacgtctgtaactccagctactcgggaggctgaggcaggagaattgcttgaacccgggaggcagaggttgcagtgagccaagatcatgccactgaattccggcctgggcaacagagcaagactccacctccaaaaaagaaga

SEQ ID NO: 1560197 - DNA, 4001 bp, Homo sapiens
aatcaattctctttctcagcctcccgagtagctgagtttacaggcgcccgccaccacgcccggtttttttttttgtatttttagtagagacggggtttcaccatcttggccagactggtcttgaactcctgaccttgtggtccacctgccatggcctcccaaagtcctgggattacaggcgtgagccactgcgcccgacctattttttatttttatttttgtagagatggggatctcattatgttgcccaggctgatcttgaattcctggcctcaagggattgtcatgccttggcctcccaaagtgttgggattacaggcatgagccactgcactgggccaggagctagggtttgaagagggagttgggggtcacagtgaggaaagctgagcatgcaaaggggaggttgagggcctgataagttgagtgtgggaaggcatgaggtagtatcctaaggagtgttgggggtctgaggaaagggtgactgttagagtgggaattccaagtccagggaagggaggtgggagtggggttagcaagcggtgggaggaggttggaggtgagcttccctctcctgattccccccaaacccatcttccaccaggcctggagagggagcaggcaggcactcacagacaggcatgtcgttgcagcagtccgtgagacctgtgtgccagtcactgagctgggtctggtagcagctggtggtggcgcactggggctgactggtcacagggtaggacatagctgcagaggtgggagggtaggggtcagctggcagcctcgcagcatctcctgggccccgcacttcggccacccttccctgtgccgggcagtctgggcggggccgccaggccgcccactgaagggacaccactgtgcctcccccttcccttctgctacatctgggcaccggcaaccccagtctgtccctgttgctgctggctcctgcacgtctggttaggctgggggtgggggtctcctgcacatctgaggaagggtggggaccacatctgggtggggcctggcggtgccgcctcctcctccacgtctgggcctgggttctgggttgcagcatttctggggcctctggggtggaagcaggcgccgtctgtcttcgaagcaagggtgcccaggggagggaggcggccaggttccagtactgagagggttgctggtccacccagcggtcccacctttgcctttcacgttgtcgtgcatctcaaactgcatcttgctggccctgaggaggtggcgttggggacggcagaagtggctgtggcaacagtggcagagtctgtccaagggacgctggatactggggaggtgggggcaagggactggggcactgggggctgggctctcagggggaggggagctggggagaaagaggccaagtcagcctgtcaaccaggagagacatggaatagggaatggatagggcgggggcgagaaactcgcccatgtctttccaactgcccgacagattgcagaggaccctccccatacccgagatagagcttgagggagaacaagaaatggagatggacagagtcagagacaaggggagaaagatcagagccaggtgcccgtagagatgtcaccagtaatgcccacatgtgcccagcactttgactcctctgcaagcccatctcacagatgagcactgaggctcagagacatgaggaggaacgccccacgtctgacggcccaggccaagggggttcatagaggtgatgctgggccccaagacttctaaattcagctcagcacaccccagttaagaaggacagatttgggggcattgggaaggacagagatgtcccgagagaccgacaatcagcgatatgaaaggagacagagtgatatgagtgggatgaggaggagggagaacagagcagaggcgcccaacctcaaagaagagggctgcggaggggatgttcctacctgcaggatcgcgatggcagtgatggaggcagacgtgtggagacacgggcactgacttctccgtctcagcccagagccacttatatgggcggccacgcagccctgggcggggctctgacagaggtgcccagggagccaagccggtctgatcgaccctctccccacactgggatttcccgccctccctctccactcccatccccccacttctcctcctgcctcagctcccaggacccagggaaaagaaggtggcggggggtgggaggtttggcgggggcggggggccacagccgggtcaatgcgcagagaccaaaagagagggagagacagaaacacagtgtcagaaaggcaggcagggaagtccctctagacagaaaggagagagaggagattcagagagatggagagacgcaggaagatgtagagagatggagaggtgccaagaaacagaggggcacaaaaatgtgaaaagaaataacaagaagaggggagatgggccaggcatggtggctctcgcctgtaatcccaaccctgtaatcgcctgaggtgagaggatcgcttgagcccaggagttgaagaccagcctgggcaacatagggataccccatctctacaaaaaatacaaatagaattagccgggcatggtggcatgtgcctgtagtcccagctacttgagaggctgaggcaggaggatcgcttgagtccagaagtttgaggctgcagtgagccgtgttcccgccactacactccggcctcagtgacagagcaagaccctgtcttaaaaaaaaaaaaggaaagaaaaggggagatgggagacagaagagagacggagatggaaaagtggagaggcaggtggggggatcactgaacaggcttagagggcagggaaatggggagaggtgatgggtggggagagaaaaaggccgggtggagtgggagagagtgctgtgtgggactcccctttcagggtctcgctcatctctctcagtgatatccccactttcctgggagagggggacagtgtcctccccattcaagccaggagacacatggggggcagtgtgttttggggaatgactcatgttggaaccaaagtaaataaacacacctcaccccagctccaaattgggaagggaggaggctgggaactgaaaagccgcagttcctgaaggacgtggacgtcacctgggactcctgggtcctaatggagcaaaggagtgggggcttggacccctgggtctgagggaggaggggctggggccctggactcctgcgtctcatgaggccaggctgcacatccctcagtagggtaggggtcctgggattccacactgctgggctcctgagcagggaaggagctgggggtctgggtgcctgaatcgccaaagtttccccccaacaggcctgacggggttgggaggtgactcagtgagggaagcagcattagagctgggtggggttctcagcacgggtgtcaccccaaaaatgtaggaggcactagaaaactggggtgtcacctgcagagaaggtggtgtcatcaccccgccgggtatggggtgatggcaggtggatcaccctgctagctgggatcccaggtgtcccctccctccctccctccctccaacacattaggacccaagccttggtctcccagcaccacccagatggttgggtcttcctgtccccagaactcccggcagcgctcactgtcttgccggtgcacgtccgtcattggtcctagagcctggatgtctgggggacatctcctcacttgtgtcctaacatccctgtctcctcatctctgaatcttcgtctctcaccctgcatcttcacctttccagctgtgaatctgtctttctttcctcatctctgcaaatctctttccaaatctctgtctctccatctctgggtccctctccttccaggctctgtgtctctgtgcccttatcccggggtctctgtctcctatgtcaaaatctcttctgaatctcgcttcccatctctgttcatctccagacctgccctgtggaggcagctacagggccccatccccc

SEQ ID NO: 1560198 - DNA, 4001 bp, Homo sapiens
ttttcgcccaggccaaacttggggcttctcttcctctagccctgccccctctgtgccccctgttggaagagagggcacctcaggaagggaagaaggatgtctaaggaggtgtccctgggtgctggcttgcagaggagtgctggtcatacatctctgtctctccgtgtcccccaggtcttcagctccagggctctgtctctggttagtggtgggggcttgtctctgtcttagcccccaccccttgcacgtctgtatgtctctctccctcttatccccccgactcctctgtctctctcttccccagcgctgtcttttcttggcccagtcttgggtccccatctctctaggtggctagtccctgtctggccaggggtagggctcctgggtcttgtatatctgcctctctaggtctttctctgtctccaggtttcctgcctggggtgggggtggtggggctctgtctcctctccctgcccctccatccttgtctaggtcttatctcgctcctggctcgccctcccccgtctgtccctagggtgtctcaggctcccagtatctctgtctgcctctccccccacctccctgcttttccctctctccactgtcccccccctcccccactccactcccatttctccagaaccctccgcccaagcccagccaggctcccagcccctaggggaccgggctgcctcttcttctcccgggtgagtggggggaggtgggaggggcggccccctcacctggccctggccctgccgccccccacgccaccagcccggctttataaagcaaaccggcccttatatagcgtggcccgggctccccgaggccgccttataaggcgcggcgtctctgcgcggctctgcgcggctctggggccggcgctgggggggaggagggcggcgctgggatctgtctctcgcccgaggacccgccccccaccagccccctcctccagccccgagatccctcgacccaggttccaacccagtcccccacttcctcaccatgggaccctgggaaaagccaccctgagcctcagtgttcccctctgtcaaatggggcaggaactcctccctcggcaatactgttggggcgattccagtgggctggaaacttaaagttctccagctgggagaagctgagcccatcctggtgtatggggggtgagtccagggtccgagcgctgtacctgctttacctgggaccccagctatttgcctctcctctccgaacctcagtttacccaaccatagcatgaaggtggtgtccaggtatcttcctagctccacagtcaggagacccctgccgcacttctgatgcccgcttcctgcctttcaccgtccccctctgtcttcaggatctcccacactttcacggcgtcacttcccaggtaccccagcactcaagcgctccccaatttctttgtcaggccgggggatatggaaaaatcaacaagtcttccccctatgttgttccccccaagaacacgaagggttaacagaagactgatcaggtgggtatctttgcaatggactgaccccctctgtttatgtgtggctgtgtgcccccccattccagccccaaccatagctgggggctccgggatgttcagggggagacaggcagcccctatcccatatcactcccttttcccctctcagtttccaagtcacataggataggcaggagggggttcaagggaccccaagctcagggctctggcctggcaggacgtgtgggccaggccagggaggccctccagccctaccttgttcttaacctcggctgacagcccgtaggcagggcctcggttgaagtgagcagaggacatgctggccggtgggctctggcgggggcagtggcggcactgacgctgagaacagaggcagcggctgaagttccgtctgcacactcttccctcctcacatgtttttgaagctccggaggcgacccgggtctcttccagggccgttccattggctgtaggggcctgccaaggggcggggcacctccccccacaacctcagctgccttcccctccccttgtgatgtcaggcccttggtattgggagctgattgtgtcattgtttccacctaggggggcagcctgcgttattctgggggggcttggtcagacagagaccagccttcttccacccacccctcccactgtccattgggcctctggctgggtctgagtctctttgtctctgaggtcatctctctttatctctctggagtcttgaagcaggactgacacccaaggtagtttagtgagcaccatcccgggtttatctccagataccaacagtctatagccttaggtaagccccttctcctctctgggcctctatggccacatctgtaaaatgggctaacgatagtgcctgcctcatgggagagttgtaaagatcagaagaatatgcctgttacatgcccagcacagtgcccggcacagcagagggactcgggccatagcagtctttttaaggcaaggtttcactctgtcccctcggctggagtgcagtggcacaatcacagctcactgcagccttgacctcccaggctcaagtgatcctcccatctcagcccatccaagtagttagaattgcagacttgtgccaccaacctggctaattttattttatttttttagagatggggtctcgctatgttgcccggggtctcgctatgttgcccaggctggtctcaaatttctgggctcaagcaatctgcccgccttggcctcccaaaacgctgggatttacaggcatgagtcaccatgcccagcctatagcattctttatgctgagggtccagcaccccagttctgtctcctccagcccctcataaggacctgggggagaagagatcctgggtctcaccctccccatccacttgtgtgtcacctgaactacagggtgactttgttggcaagtcccaggccgtgaactgtgtccctgtcaaacagccctacccagccagatctcacccctggaccacaggggtggatgctatgcccacatcatgccccacatggcaaggccatgtttgtgacacttggatgacatgtctgcaacctgccacacactaatgatatgttgaggatatgcagtttatcggtcacatgctaatggcatggctgcaatatgccacagactacagcccttatgtcaggccatgttccaactctgtacatatatccattcaattctcatgacgccctcagagatggacactgttattattattattattattattattattattatttggagacagagtctctattccccaggctggagtgcagtgatgctatctcggctcactgcaacctccacctcctgggttcaagcgattctcctgcctcagcctcccaagtagctgggatgacaggtgtctgccaccacgactggctattttttgtatttttagtagagacggggttttgccatgttagccaggctggtctcgaactcctgacctcagttgatctgcccacctcggccttgcaaagtgctgggattacaggcgtgagccaccgtgcccagctgacactgttattattaatacaagtactttgctttacaggtggggaaactgaggcacgggggcttggaatcactttttcagcgtcacacagcaggccaggggcagaggagaatttgagaccatgctccatgaacctcaactatgaggctaaggtggggtttctcaacctccacactgttgacagctgaggctggataattcttcatggttggggggctgccttgggcattcattgtaagacttcaagcagcatgcctggcctctacctgctacatgccagtagcactctcttagtcctaataaacagaaatgttgaggcactgcggcaggaccctgtagtcccagctactaaggaggctgaggtgggaggatcccttgagcccaggagtttgagaaccatctggccaagatagcaagaccatggtctctaaaaaagaaaa

SEQ ID NO: 1560199 - DNA, 4001 bp, Homo sapiens
acccccgccagggcaggtatcaacctgcccccaccccaccccaccccgtctccggaagccgccccaccctcctgtgcccgctcccacttccgcaggcccagcaggtactgggttccggtcttggccctgtcacttgtgggctgtgtggccctgggcagctggaacgacgtctctgggtccctgtggacaccggtgcccttagccggctgtatgcagggtgcggcagggtgcccaccccactgcacggggggctctatgaatgcagggtgcagatggccccttgaaggaggagtcgtgagccccgggctggggaccctggctcaggccttgaccaccccaagcctcagcctccctttttggccaagagctggtctgaaggcttgcaggggctcacagcggggaagcaggaattctccctccagtctgccggccctggagtgccgccgggcaggtggctgttggggctggcagggccggtgccctcagagcgtgcagaggcagtttcccctgcagaagtcagctgtaaggacaccttcccaggtgcccagtgggcgtcgggggagggggtgggcggggacgacacccccctccagctggaaggtcctggagggtcaggtcccggtcctgtccgtgggtctcgcatcacaacccccgccccccactttccctgggaatcctgtccaggaccctgctgtgtgaccctgcagaagtgtctggtcctctctgagctagaaccacaagtgctctcttaaaaagtgtctcccctagccctggcttgtttttaattatagagatggggtttcgccatgttgcccagactggtctcgaactcgctgggctcaagccatccacccagctccgccccccaaagtgctgggattacgggcgtgagcccccgcgccctgccgggccccagctcttctttcgaggctgcaaaaccccacatatctcagggccaccttcagagaacctctttgttatccgtttaaattagtcagatgggagacaaagaccgtgcaaagcggctaccgcccctccccccaagacacccccaaggtgtcccagaggccaggaaattcctgtttgtgggggggtaacacttctcaaaaaccactcggccatgccccttcccctcccaaagctaagaggccccaaaagcagaagtgtggccaggagatgacggggttgctggggtcccccccagacccccagagcgttgtcggaccttgaacggaccttctcgaaggttgagtgggcgccaggggcttcacacgtgggggtcctggggccatggcgaggggacgaagtcagacccaactacccctagatgttgggggggggaatgggtcactcgtcccccagatctcagacctgggtgctccccaagattcgcgggagcctcagggggtgcccgcagacatccccccaccaggcgtcagggagaacaagggcccgtccgccccgggtctccaagctccctgcccgggaggtgccgggggcgcctgggggctcctgcaccggtcggagcgtgcgacggccgcgctgtcggggggacaaggggcgcccctcactcacccggttcttgacctcggccgacagcccgtacgaggggcccttgttgaactgcgtggagctcatggctggcgggcgggcggcgggacggggccgcacaggacgggacgggacgggaccgccgggctggcgcggggttgggacgcgccgggctccgcgcgccacgcccccgccgctgattggcccggagcgcaaatgtccttataaggcctggaggcgccgaattcctgcggccgcggacttcctgagccccctcggtcgcccccggacccccgcctgggcacagcacccccgtcaccagaggcctggaggggcccctcgccccctttgatgccacgggaaactgaggcagggaggggccgaggccgccgggacgtggcactcctgcgggctctctgctcagagctcgtgggcggctctcactctttctccatctcagacttctcttctgccagaaaggggaggggagaaggctacctttggggcaggaatgagggcccctctctgccacttagaggcgtctaaccccttcccagggaactctactagctgggaggtggaccagggaaccagggcaggttcctcagagaaggggccattggagctggggctttgttggatgagtaggagtttgtcagtccaaaagagaataggattcttactgggtgcggtagcttgcacctggagttctagctacttgggaggctgaggccgaagggggaggatccgttgagcccaagaggtcgaagctgcagtgagttatcatcacaacatgacgctccagcctgggcagcagagcaagagcctctctctaaaaataaataaataaataaaaataaaaatccgagtggctcacgcctgcaatcccagcactttggaaggccgaggcgggcggatcacttgaggtcaggagttccagaccagcttggctaacatggcgaaactccgtctctactaaaaatacaaaaattagccgggcatgggggcacatgcctgtaattccagctactgaggaggctgaggtgggaggatcacttgaagccaggaggcggaggttgtagtaagtcgagatcgcgccactgcactccagcctgggcgacagagcaagactccgtcttaaaaaaaaaaacaaaaaaaaaaaacacaaaaaaaccctaataataataaattattaaaaagtctccgggacagtctcctgccaggcagtgctggctctcaggagaccttagctctggcccagcccatgcccaggaagacagagctggcacagaccaacccccaacccggattccctgtatgagccagcacaggcggaacccccccaccccgcccaccctgtttccctatatgagcaagtacaggacagaatgagaggcttggggctggaggaactggagggagagttggggctctgtcggaggaatcaaggaaagctgcatgtaagaggaggcaagggagatggggttttgaagcatcaataggagtttgacacattttattttattttattttattttattttattttattttattttattttatttttagtagagatggggtttcaccatgttggccaggctggtctcgaacccctgacctcaggtgatccacccgcctcagcctcccaaagtactgtgattacaggcttgaaccactgcacctggccgacccatgtcattttagaccagtgctgaccatttctgttattctgagatgaaggaaattttcaatgtggcactatctactactgtagccactggccatggggctactgagcactggaagtgtggctggtgccatcagggaagcaaatacttcatgttctttttattttattttattattattttttgagacggagtctcgctctgtcacccaggctggagtgcagtggcgcaatcttggctcactgcaagctccacctcctgggttcacgccattctcctgcctcagcctccccagcagctgggactacaggcacacctccacacccagctaatttttgtatttttagtagagacggggtttcactgtgttatccaggatggtctcgatctcctgacctcgtgatctgcccgcctcagcctcccaaagtgctgggattacaggtgtgagccaccgcacccagcaaatacttcctattcttaaatttcaattaaaaattaaaaactggcactagattccattttttgaagacacatatatataaatacacatatatatgtagctgggactccgagtagctgggaccgtagacacgcaccaccacgcctggctaatttttgcatttttagtagagatgcgggtttcaccatgttggccaggctggtcttgaactcctgacctcaagtgatccgccggcctcagccttccgaagtgctgggattataggtgtcagctgccgtggccgggctatttcaattaatt

SEQ ID NO: 1560200 - DNA, 4001 bp, Homo sapiens
tatgccttaccccatacagtgacaaatcaagagggggttttggaagcattagccgggggcacctgcatccgagaggggtcctcagccttacggtggggacacatgcagaggcgtggacacctcaaatccagaaaagcagccataccaataccaaggatggcaagaaccttatccctgggggaggtgacaccaagaaagggtccttaccctggagagaaggcacagccccagagggaagagcccccacctcgcagtacaggaacccgggtctaggaagcttcctactctcatggggtaccagcagcggggccagaaggcgaaacccttgttctccaactgctgacacccagcgtaagggtagatgggaagtcaacaaacccacagtgtgggatctgatgcaaatatcaagggcagtgggcttcttggtccttggagagctgacaccctaaaggaggagactggtgtgaagatggaagaagcctcatactcaggcaggggtgaagggagggaggggagacatcaaaacccctcaccaaaaggacaggagagctcaccccggggtgggtggccgccctgcactgagaggcagggactgctcagaaagaggggctggtgctgcccgcagtgggagctcactaacatggacagcgtggcggcttagtgtctttcaccaggcacctgagcgccaggggatcccagcagcccccagcaacaagaccacagtggtcctgatatcactgggagacgcccacacccagaaggtcggagagtcacgatgcaggggagttcaaggctgcaaagccaggggcagacgccaggatcaaagaagtgtgagagctgagaccagacgtgggccacactgaggacggtcctgtaccccaggtgggggaaagccaaactcccccaaaaaggcaggcgcccagtgcagcgggatggcgaggctggagccacccagggcgctactcgctatgagagggaagagctgcagactacagaggtggaaacttcggcaaaggctccaactaacggggagtttctcctccactcctctcccaagaggctcccatccgatacagacgggcagctggaacctgagatccaggggaggctgcgctcccgggagcagtgaggagggatgcggagggcggcctcggtcctgggaagggtgactcccccacccagctggggtcctcgtcccgaccaccaccccccctccccgccaccgtcgagggagaagccccggcgcggaggctgccccacaacgcgaaggaccgaggccgaggggggcaggcacctgagccccgagagggcgggcacctgggaccaggggcgcctccatccttccagccaggagccaataccgacgcggagaggggcgggcacctcgcgcccgggaggcttcgcaccctcacacccctaccggggggcccgacgcgatgccacgcggggaggcggcggcgggcggggcccggggtccgggtcgcggaaggacccccgggaggcgctgaggaacgtgaaagaggcgcaggaacgggagggcgagagggagggagccgccccccgccgggagccccgcgctgcagaggcggcggcagggggcaggcgaggggaggccatgtcgcgacagacggcggtgtcgccagggcgggaggcggcggggagggcggccgatggcgccggggggaggaagggaaggggtccggcccagtcgagcctgacgctctcaccacaggagctggcgccgccgctgaggagcgtatcgcgacaggcgggggaggcgagcgcccgccgcctttttctcgcgccccgggcccgggcgctatcgcgatagcggcgcgaagcggaagtggggttgggggagtgggcccggggttgttctgacgacgggggtcggggctcaagggaggccgcggcgtctgccgatggctccgcggaagctgaccgggcccggtccaagatggcggcggcggaggaggcctcccctcctctcttctcgtctctggcgccgacccgcccccgagtcccgaatataggccagtcattgctcccgctgaacgtcgctcctgacccttggaggctttctattggttcctggcagggatgcgccctgccccctttcgcggattgggtgatcgctccaaggcgcggcgttcgattggcctcccgcgcaggctgctaggattggctcaggttttcctccccgctcctcctcctcctcccgcctcagggcacaacacgccagcgcgaggacccgaacgtcaatcaagagacctgtgtcgtgctgattggatgtatccgcccccctctcttaaaacaattggtctgggggaggagctacgacagtccaggggcgggaagtcgtccgtcaagtttagagctctttttaattggttgcgggggcatattctgccttgaagtcattggttggtcctggaagtgggtggggaaagcggaggaaggcatggagtgtgggcgttaggggccgcgtacctaatgggagacagacaggtgcctttaaagcgggggccgagccgaagtcatctgccaatcaaaacagccacagggccaagtgggaggagctgggcaagaaagtccacccctttttcttcgttggccctaaaagttatcattcatgctagttggaccaatagcgtggcgagtgggcggtagctgctcgtagagcgtgtgaaagagggtgtatgtagctggcagaagtgggacttggtcgcaaccgttgcgtcccggccaggtaagcagcttccctctcagctgcctcgtctttctccaagtgcctctatgttggcacatctctgaaattcattatttgctgagtgaaagaagaaagggaccagagacactgctttaagtctctggcaccgtgcatagcagaattggttgggaagcgtgaggcatggagtttttgtcctgcccctgcctggttaggcgaccagatggtgggacagtcattctcctctgcgtctccgcttccttagtgtgttgaggacgctgcagaaggtacagaggagacgggtggctccctaatgcctgctcgtttcaggtctcagctctgttgtcttcttggagagaaaacttccctgacctccctcccgggcggagcgctcctgcgcgccttgttcgttaggatttatttttgtacgtctaccgtcattttcgtaattattcggtttccctgtctggattttgcatctccagcacttagcacgcaggaagtagtcagtaaccatttgtcaaaggaatagatgaatgaatgtgaggaatgacttgtgattgaaaacttaactagacactgagacttccacgaactgggaggcatttgcccagggtcacacaaccgagatgggaagccagattcgccccttcctgtctaggtggtggaaagtaagataaatcccagggagaggtgaacgtgaaggaggatggagccgttcagcaccacccgcatcagaatggtctgaggcaagggggaggaggaatgcttgcgaaaatgcatattcgtaggcccacacacagacaacgggaatgaagcctagagttattgttctagagctttgctattcaaactgtggcccctggacaaagtatcgcttctcagacatctccggaatcacctaggaatgtgttaaaatgcaaattctgcttttctaacaagtgccgcagtccacggtccgcagttcactttgcacaccgcggatctagcgatgactttccaacttggctgcacatcagagtcacctgaggaacttgttgttattgttgttgttgttgagacgaagacttgctcttgtcccccaggctggagagcagtggcacaatctaggctcactgcagcctctgcctcccggggttcaagtgattctcccgcctcagcctcccgagtagctgggattacaggcgcccgccaccacgcccgactaatttttgtatttttagtagagacggggtttcaccatgttggccaggctggtgtcgaactcctgacc

SEQ ID NO: 1560201 - DNA, 4001 bp, Homo sapiens
ctcagccccccacacccttccagatacctacgtgcacctggaccagccagtctaccaccagggcgcgcatctccggggtcacagcgcggggcagggctctcaggggcagcacgcggcacacctggggttggggcagggacgcttcactctccacacctgtgcctctgcctttctcctgagctccagccctggatgcagcagcctcctccagtcagttggacatcttaggcatgccacacccaaactggcctccaaatgagctcctcttacgtgtcctcacctagaactctgggcttcgttccagatgcctccatacccacctctccgccacgtggactcctgggcgtctccctctaggttcccagacttcactttttttttttttttttgagacaaagtcactctgttgcccaggctggagtgcaatggcgcaatcttggctcactgcaacatccgcctcctgggttcaagcgattctcccgcctcagcctccctagtagctgggattacaggcatgtggcaccatgcccggctaatttttatatttttgtagagacggggtttcaccatgttgaccagactggtcttgaactcctgacctcaggtgatccgcccacctcagcctcccaaagtgctgggattacaggtatgagccactgcacccggcctcagacttcaactcttgaccacgaatcctcaacccctctgcctcagagcacccagaagcatcttcccaaagaaagatctgaccaaggaactccccagcttaaaacccttccatggctcccagtacccttggagaaaactctgatttctttcaggctctgctccagcatcacctcttccctctctctccccacaacccatgcgtcagccacagctgccttctttttagctcctagactataccaagcccattcctaccccaggccctttgcacttcctgtttcctctacagagagggtccttccccagccccttactcgacctttccgtcattcagctaacatctccatgactttgtctatactcctaccacccgatcactatctctttgtctcagcattttcactgtgaagatgtctccctgtgtgctttgtctatttggccgctaggctgccagtcccacgagggcagggacttctgcccacaacacaagtgtctctcaggtcctaacagagatcctggcccaggagagtcgcaggcaagacgttcaacaaactcctcccttcagtcttccttccgcagcaaccctctcatagggatatctgaaggctggcgaggccaatgttttggtttgcgtggcctttccctagttgttctatgtgtttgctcatctccccagaacgaggccagcattgcagcatctccagcacctaaaacatttgctactaaaccattaaatatttgttaaacaaataaatgtggaggacaagtacaggggaccataaacaccccaggagggactgcaaagagcccggggacggtgggaaagggcattcccagcggtagaaacggcgctgtgtgaaaacaaaacaaaagcctggacgttgcagggaaggaacgccggctgccagtgatagggaggagaggctggagcggtgggagttcagagtggtgttgagtgggtgccgggcggtgggccggcgtcgccctcaccagggcaggcggcgggtaggctcaccatgacttcggcgaagatgtccccggcgtactcgcgttctccctgcagccccagcgcgctcagcgcctcctccagccccggcggcctcgccaggcgtcttggggagacagtggggcccgcggggaagccgtcggggactgcggcgcttgaaggctctgcgtcgagggaggcagcgagactctgcaaaggagagggcctgggggcccagcgcctaacgataggcccgagccgggagccggacccctggtccctgcctctcaccagcatcctccaggagggtgttgcgggcgaggccaagcaccgacccttgcagctaggggaagagacgcgcggcgggcgctttaaaggcccctgggcgcgtgcgcactgagcccgcctcgcccgggcaggtgcacaaaggtgagtgccccgcaggctggctctgtcctctcgaagccctctaaggtcggacagctggagacagatcctcatcctgctgcccggaagcagcccctctgggcctcgctttcctgaccataaagtcgggatgatttcaaaatgtagaatcagggtttgcaccgtcagaggatggatgtacaaacatagatcggaggttagaatgacccttgtggtgtcggtgtcgcaatggaattggagataaaattgtgtgaacacatggttgtttacatagaagttaagtgttgtgtggccgggtgtggtggctcactcctgtaatcccagcactttgggaggccgaggcgggcggatcacgaggtcaggagatggagaccatcctggctaacactgtgaaaccccatctccactaaaaatacaaaaagttagctgggcgtggtgccgggagcctgtagtcccagctactcaggaggctgaggcaggagaatggcatgaaccctggaggcggaacttgcagtgagcgagattgggccactgtactccagcttgggcgacagagcgagactccgtctcaaaaaaaaaaaaattttttttaaaaagtggtgtgtatgcaaacatgtatttcctagcttaatccactgggagagcttaagagcagcgacaccccaatagtgagaagcacccctaacatccaaaccctggccgccacatcccattctccactaaaaggaaccagggctacctggagaaatggctgatcccagggtcatacaagagaaggtacaagatctggaatatttttgtgtggcagaaagtgtcccaacagcagggcaagtcacatagatgcagaagtcactagctaaatctagaaaatgtgagcatcaagatgatagtcatagatcacaaaccactgaataaaattaaaatacaagtttattctgatataactcaggcagtgggaaagaaaagctcttctaatctttagaaagtgaactaataaatgtgttttgttttcagacagggtctcgctctgtcacccaggctggagtgcagtggtgtgaacacggctcactgcagcctcaacctcctaggctcaagtgatcctcccatctcagcctcccaagtagctaggactacaggtgtgcgccatcatgcttggctaatttttaaatttttctgtagagactggggtatcactttgttgcctaggctggttttgaactcctgggttcaaggaatcctcccaccttggcttcccaaagtgctaggattacaggtgtgggccgccatgactggccgaactaataatgtagaaggttggaaaatcctatttggcaaccaccacagcatcgtttcatgcaagaaatatcaatagatgttcaaactagtgggtgaacatctgataggaatcgggatatctacaaaatgtctctacacaagatgtttattaactgtgtaaaccaaaaggtatctgagataggtgtcaatcaatttagaaagcttattttgccaaagttaagggtgtgcgtgtgacacggcctcaggaggtattcggggcacagcttggttttatacgttttatggagacatgagacgtcctcaatatgtgtaagctgtacattggttcggtccggaaaggcaagacaactcgaagcaggggagggggcttccaggtcatagacaggagacaaacggctgcattcttttgagtttgattagccttttactgaatgcacaatttacaggaagagccatccatgcctagtctgggtcaaacaataggacggaggaagccatcagatatgcattggtctcatgtgagcacagggatgactttgaactctgcctgtcttctgtccacaaggaatttccttgcgggcaaatggagagacgtaagtagctttaaaaaaaaatatatatatat

SEQ ID NO: 1560202 - DNA, 4001 bp, Homo sapiens
gccccctgccactctcccctgtgctggtcagggcccccacggggatgttgggtggggtctgggatgtggagggacagaggcggggactgagtcagggcatggctgggaaccccccaggtgtgcgatgtgtgtgcaaatacgtgtatgtgcatgagattgtacaagcgtgggtgagtctgagtgagacaggcagagaatagctgggcatatgtcgtttctccaggtgtcaatgtgtgcaaatatttggcttctaatggagggattagatacacttgcttgacgtgtggccatgcaacgcttgccgtgagcttgcaggtgtgtctgtgactttaacacctcggacttctgatgggggagtgccgttctgtgtgagagtgtgacccagtgggtgagtgggtgatgggttgtgaatgttgacagtgtttgttcggatgtcaggggcagcatgtgtgagaatttgagcacgtgggagggtcataaaagctgggaccatttggcgggtggctgaagggggttgcctggacacggtgtttcacattcctggagtcccaggggacttatattcagagtggatgcctaagattccatgaccatgtggatgtgtgagcgtgggaatgcggcatagtccaatcagggattaaccatatggacaggcaccttcctggactccaaagtaagaagtgtgctgtggtgtgtgtgtgtgtgtgtgtgtgtgtgtgtgtgtgtgtgtgtgttgggagactgagctcaccttagaaagggatttccaggaggacctagtctagggtctctcagatcagggaagccccatctccaacacttgagaagctacgccatcccctgactcccgaagcgccccccactctgaaccctgaggggcgggacagggcgcccagccagatgcgcgcagctgggcgtgcgtcagcgctgactcacccatccggcggcccccgggaccccttgggggctcctgagaaattcctcgggaaaaacacccaaggctccagcagctggggtggggagggggggagcaacttccactcctgccccgccctgcgccccgccccgtctcgcccctcaccgcggccctccccgaagccctgtccatggtgctgatcgcggctctggggaccgcggggtgggggagggggcaacagggagggaggggaggagatgggcgctcgccaatttggggcagaggaggaaaagggagaatgaggtgaagccatttaaagagacgcaaaggaaactgtgggttcccgaagagcaccccccaatacttgtccccacccaccttcatcctcatgggcaattatttgcacccaaaaatcataactacacccctcatagcggcactcagagacacacaatcacacgcataaccactcacacggttaccctcgaaaatcagcacatagacaagagcacaagtgcatactcacctgtcgcaatacacaccgtcccagcactgccctgtcactcacagtcacactatcaccatcaacctccacacgcaagcacatacgcaacttcactccaaatgcacacacatgctacacacacatacacacatgcacacacctgcacattgcatgcattcccacgcgctcgccagaaaacgcactcacacatccccacccccaccccgagctgtcacacccacaaatcacccagagtcagatactcatgcgcccacatcacaccggggccgcacgcggcgcccacgcccttcccctccacgcccctccacccccctccacccctcgctcttttagagcctctctgagtcgtggaccctgggtcccatctcttccctcccggctcaccggcctgcgtccccggcagaagctgcagcgcggccaggagcaggcagagaccggcccgcggctggcccaggtcccggcggttccccatcccggcggggcccacgggcaaggcggggaaccagtcggggcggctgcggggcgcggcgacttctcgggctcggtgcagtcactcgcggcggccgctcctctcagggtccgcgggaaactgcccgagaccccgccctggcctcgccctgcgctccagcgcctggccaggcggggctttttggagggggagcgctgacagctggactgggaagttgggaaactttgtgctgagggctgattggctggctggggtggagcccagcgccaggagctgggttgttcctgccccaccccactgtggaggagaagggtcactcccacccagccctagagttcgagggttccagtcttaccccaaaccttttccgcctagcagatcccctcaaaggagaccttaacctcattcaagacttcagcctccatccaggccctagaattaggaggaggtgcagctttataccaaatcttttttattttctattatttttacattttattttggagacagggtcttgatctgtcacccaagctggagtgcagtggtgcaatcatagctcactgcagcctccaactcctgcgttcaagccatccacctgcctcagcctcctgagaagcaggtaccacaggcacacactgccacacccagctaattttaaaatatgtatattttgtagagaccgggatcttgctatgctgcccaggccggtcttgaacttctggtctcaagcgatcctccggccttgccctcccaaagcgctggagttacaggcatgagccaccgcccctggcaccaagtcctttctgcctcactcaggcccccaactggggtcccaacctcaccccgaactctcactcacctacctgctttatcctcagtccctcagctgcacaataggaggtaccagcctcagccccaaagcctttccttcaagtccctaacgggtcctcatcccacctcaaatctcaccccagatcccaaaatggggtccccagccttactccaaaccttcatctgtccactcaaatccctaagtcacgtgtcctggtcccaaattctcaccacagatcccaaaacacagttttcactttccccaaattcttgattcctcaaataaagggtctcatctccatccctaaccctcatctccccccgccccaactcaggtctccagtggatgccccggcctcaatcccaaatccccaccaaatgagggagtctgagctgggtgcggtggctcatgcctgtaatcccagcattttgagaggctggggcgggcagatcgcttgagtccaggagttagagatcagctggccaacatggcgaaaccccatctctactaaaaatacaaaaattagccaggcattgtgactggcgcctgtagtcccagctacttgggaggctgaggtgggaggatcacttgaacacgggaggtggaggttgcagtgagctgaggttgtgccactgcgatccagcctggacaacagagcaagactctgtctgtctcaaaaaaaaaggccggcgcgttggtgggaggtggtgggaatctgtccctgtcgcaaagcaacgcacagccactggggaggaaggggtggattcttgccattcttgggatgaggcagaggcccccctcaccgtgctgggacccccacctccagcatgaagaggcccccatgaggtcaaatagagcttttatgcaattggacaagcgcagacacgcaggatgtgagggtgtttccccagggaggggaggaaccaagaggcgtattctgagccctgaactgctccccgaaccctgcttcccccacctccgccccaggggaagagggagacgcaagcagtgcctccctcccagcctctgactccccagacaaagagtctctgtgtccctgaagaggaggggttggggccccatcaagcctgagggggagatgggggccccccagggtgggaggaggagagggtatctctgtaagctgtgcctcctcccaccccagggacatctgaggctgagacttctccaactaaaagactctcacaaaattcctgccctgccctgccttgctggaagttcttcctatagtctaact

SEQ ID NO: 1560203 - DNA, 4001 bp, Homo sapiens
ttgagcccaggagggggaagttgcagtgagctaggattgcaccactgcactcccgcctgggcgacagatgtaaaaccctgtatcaaaaaaaaaagtatatctcagcagggcgctgtggctcatgcctgtaatcccagcacttagggaggccgaggcaggcagatcatgaggtcaggagatcaacacaagcctggccacaatggtgaaaccctgactctattaaaaatacaaaaattagccaggcatggtggtgcgcacctgtaatcccaagctactcgggaggctgaggcaggagaatcacttgaacccggaggcggaggttgcaatgagctgagatcgtgtcactgtactccagcctgggcgacagagcaagattccgtctgagagaaaaaaaaaagtatatctcaaagtatatctcataaatcccttaccctgccttcatcttctcctgtgagccacaccacttcagtgggctgcagtcaattattcattcaacaaacatttgttaagtaccaattgtgtatttggattatccagactgagaaatcaggtggaaggaaaagcgacatttgggagtttagtttgaccgtagtgccaaaagctaattctgcccaataaattaagttgacaataacaccagcaatgacagtaatcatgataataaaatcactgagagccaagcccatgccagacccaagggctccacatccattaactggataatcttcagagacaaacccaaaaagagaattatattaatacgctcattttcttttctttttctttttttagaggcaggtcttactctgtagcccaggctggagtgcagtggtgcaatcataggtcactgcagcctcgaactcctgggctcaagcgattctcctgcgtcagcctcctgaatagctgggactacaggcacacaccaccgcacctggctaatttttgtattttttttctagagacggggttttgccatgttggcaaggctggtgtcgaactcctgagctcaagtgacccgcttaccttggcctcccaaattgctaggattactgcgtgagccactgcacccggacccattttccatttgagaaaactgaggcagggagtgagaagtcaccagtcaaaggtttcttcagagctctgccccattccctaccaagaaagcatccacttcctcctgggccatctggtcctggactccacccacgccggtctgagggcaggggtttgactggggcctggagccaggctgagttcaagcttaagggcagcagccggcacagaaaggcttgctgttagatgtggcctctggcaacgccccagtgggggctctgggctccgtcctttggaggtgtacgtgccccagagggagttagagccccagttagtgaggccggagctgccctagtagggtccagcaggcagaagcggtgcccagcccaccccaaaggagccagcaggaggaactcggtcccgcttgtgttgtggggagggctgtgtctggccccatgggaggacagcaggcagggggcacgcgtggacccgtcccgatgggggcagcgggcaggggcatgcgtagaaccgtcccgatgggggtagcgagcaggaagcacgcgcggacccgcccagaagaggacagcgggcaggggctcgcgtggacccacccctatggggacagcaagcaggggctcgcgtgacccgcctgatggggacagcgggctcgactcaccatagcgccgtgcgctcccgcgggtgccgcagccgctcgagtgcgcccagcgtggtgggcaacgcgtgggccgcgtttcgcgccaacagcgcgatgagcacgcgcggcgcctgcaggggcgactccgggctccagcgctcctcggggaagtaggcgtcggcgcccggcggggcccccggcggcagtggcgccagcagcagaagcagcagcgccaggagcggctgcccgcgccgccggcccgcgcgtggggccgccgccatcgcgccacgcgtctcctttaagtcgtttttctgcgggaggactctggccgcgccttaaaggggtcataggggccccgcccggccgcgcgccttaaaggggaggagcgcgccgggcgtgaagtccaggccccgcctccagacgctctccgagtcccaaggcccggagtgacgtcacctgcagccctacccaggacgccccgcccccgcaccgatcttaaaggcacatagcgctcggagcgcgtggaagggatgttaggggtagcgttagggttaggaacccgcgcttcctccaggcgcctcctaccactgagacctccgccagatgcgccgcccaatttccccatgtataaaacccgggctgtgccaccaggcggacttggctacttaggacctggtttgggacccaagagaccttagcctcagtttcctctgctgcaacgtgggttttgccatcctggttttggatctcacagggatgtcattgagggttgtggagaataaaggtcatgacgtccacagacctggcgtcacattcagtccccgccttgggcttgctatatgtgagcctcagtctgtccatctataaaatgagatcatagagaccctatagggttggcgtgaaaatagagccagggcatgataatggaccgttctgggcacaagctcttccagagacaagggccatgttttcatggaaacgctgtcaagggattgttttccaatactctagagccgcattttcaaattgattgacttagtatcacacttttttttttttttttttgagacggagtctggctttgttgcccgggctggagtgcagtggtgcaacatagcaagaccgtgcctctatttttaaaaacaataaaaactttaaaaaatacatctgaacattattattattattattattattttctttttttttttttttgagacagcgtctcactccattgccccggctagagtacagtggcgcgatctcggctcactgcaacctccgcctcccgggttcaagcgattctcctgcttcagcctcctgagtagctgggactacaggcacgcgccaccacgcccggctaatttttgtttatagtagagatggggtttcaccatattggccaggctggtctcgaactcctgacctcctgatccgcccacctcagcctcccaaagtgctgggattacaggcgtgagccaccgcgcccagcttattattattttcacagagagggtcttactctgtggctcaggctagagtgcagtggcatgatcacatgatcatggctcactgcagcctcaacctcctgggctcaactgatcctcctgcctcagcctcccaagtagctgggactacaagtgcactcaaccacgcccagctaatttttaaattttttgtagagatggagtctcgctatgttgccccggctgttctcaaactcctggtctcaagtaatcctcccccttcagcctcccaaactgctgggattaccagtgagccatcatgccccgctaaaacttaatttttaagaatgatacaggccaggtgcagtggctcacgcctgtaatcccagcattttgggaggctgaggcaggcggatcacttgaggtcaggagttcgagaccagcttggtcaatatggtgaagcccccatctcttctaaaaacacaaaaaattagccggtcatggtggcgcttcgcctgtaatcccagctactacggaggccgaggcaggagaatcacttgaacccaggaggtggaggttgcagtgagccaaaatcgcaccactgcattccagcctgggtgacagagtgagacaccgtctcaaaaaaaaaaaaaaaaaggtaaaaacaaatttacactctgtggacttgatgaggaaaggtcttttcatattaagtaagaaaaaggaggtgacaagatacatcccatcccatctggaaggatttagacccaagggcaaacaatgtttttctcaaaaggggcaggatgacaaattcttgtagctgcaat

SEQ ID NO: 1560204 - DNA, 4001 bp, Homo sapiens
ggaggggccacagagggtcagagggcttcgagctgggccctgggggccgcacctcgtagtgtctcggatgtggaaagttcaagggccatatgccagtgcttggagctctgagatggaagcaattgtcgcaggggtcaggcacgactttgccttgatgacggcaagggcgcaaccgggagaggagaggagagctgttccctcatgggcgaggggaggaaggatgagggcgggcatccccagcagaggggggcaggggtcgtcggggcgtgcgtgcccggcggtggcggggggtctgggcgtgcgttccctggctgtggaagggtcgttgggactggcgatcccctgcggcgaggagggtagctggggcggaccacccctggcggtgagggagtcgtcggggcgggcgtcactagctatgtagggggttgtgggggcgggcgtcccgggtggtgacggggatggtccttgggttgggcgtccccccgcggtaaggaggtagtctggccgtgcgcccccggaggtgagaggctcttcggggcgaacactcccagtggaggaaggggtctcccgggcggcgagagattggggggcggtagagggagtcgtcagggcggtggagtgtcggggctagcgcacctcgttgacgtcggtgcagtgcgagccgttgcccgtgaagcccgcggggcaggggccgcagcgcgcgccgctctccgtctggatgcaggccacgccggggaagcagaagccgggcgcgcagtggagcaggggccgcacgctgggtaggccggtgcgtactgactgctgcatccctgcgggggggaggggggagaagcggcggggctgatcggtggctcgcccgggggcagagcctatcatggccacgccccggggctggaggcttccccttcccccccaccccccgccccggggcggcccgaaatcctgcgctgtccgcgatcccgccccagaggctgcgcgctctgaccgcggggtctccccggtctcttctctgagtctctgtcccgcttttctgccccgtggcgtctctcacttccccaaaactctctcaccgcttctgtctctttttgtctctgtttctacacaccccatcccattcccgttcgtccgtccacctctccgtcagcctccatctccttccgtctcttttcctccccagctttccctggctctctgtctctgtctctgtgtctctgtctcccgtctcttctctctcccgaccgccccgccgcgctcaccgcacgcgtcacactccatcaccgtgtttttcaggaacgtgatctccctgacctgcaggggtgggatggaatcagcggggtcccaacctctcctcatccctcgggtctcccctctctctaccccggggtccctttctacagcctcttttcgccaaggactccctacccgccgacccccttccctccccatctcctctccaccttctcgggtacttcctctctcctcgctgggaactgagacccccttccgttccctggcactccctgccccgcacccgggccccgcacctgctgccgcagcagctcccgcacgtcctgcagcgccgcgttggtttcctgcagttcccgaagcatctgcgggcccaggtctgagcctgcggcggcaggggacctggtgaggcgtcatggggccggggaatcccaccaccaactcccaccgttgcagcgaacccggacctccgaggccccactgcgctcctctagtctcggtcccgccacctgctttctgcgcccggcacgtcccctacgaacagtccgtgagccccaaacagcctggatcccgggcctctcacgggtcctacagtccgttgtggggccgtgggcacggcgcgggtgctaacgcggcttacccaacgggctctggccctgtccggacgcgccgagggcagccagggtgagcagaagaacgcaggcggtgtcggggaccatggcggtggcggggagctgggtggctgctcgctttctaccgcccacgaggcccgcggggcctatttatccccaaggcacggccggccccagggacggcccaccacagccctgcccaacgtccagcctcaaggtaaacagatggcgctggcccctgcgttcaagtccccgcccggaatgccccgcgaagtcgcccgcggctgaatccgacatggtggggaaactgagtcccggggtctgtggagagagctggtggggcagggagtcagggggtactgcccccactttcattcactgtgtgtgtgcgtctgtgtgtgtgtgtgtgtgtgtgtgtgacggggtgtggctgtatcgcatcctcttgcttcagtctcccatgtagctgggactacaagcccgcaccaccaagtccagctaatttatttttatttttatttttatttttagagaccgggtctggctatgtcctgcaggctagtagtctcaaactcccggcctcaagcgatactccccacataactgggattacaggatccagccatagcattcagctcattgattgattgattgattgagtgcttgctgtatgccaaacctgagttccagttccaaacaaggcaggctccatggccacgctctcagctcacacttcgggaaacagagtcaccagcgtctgaaaaaataggtccacccactatggatcagactgactggccctccactcctcctgaagtgcttcaaaactgggtaagttgctgggtgcggtggctcacacctgtaatcccagcactttgggaagccaaggcgggcagatcacctgaggtcaggagtttgagaccagcctggctaacatggtgaaaccccatctctactaaaagtacaaaaattacccaggcgtaattcctcccttgcacaatggaggtaataagttaataattattaattaatgattaatagtaatgatgattatgatgatgaatggaaaataggggaggggcagttgagacctgggactctcaattttcctgcctctgtccaaggaggccgcttctggccccaacgctggagggctgcaaatgactccccccaacccaactcattgctggtgttccctcccctccccatggtccctcggctggtggaggaggggacagcgttcaggatcttgccccaacccctgtccaaggggacaggcccacttggttttccaatctgcgcaatggggtgtgaggcccccatctggaggggagcaagttaaagggctctagcaaggggaggtccggggcttctgtttgtccaggctgtgccataccttccaaactgtgctccagctgctgtgggaacagcctgtaataaaaataaaagttaccgctaactggccagccacactctggagttacaaaaccccttaacctcctgcaatcagttaacactctccactcccaccttccagtactcacagcgtctattctatagacagagaaactgaggcccagagagaaaaagtgactggcctaaggccactgcccgagggcaggggtgaatctagactcagagccagatatgttttctggggagcctacagagaagtcaccgagggcttcctggaggaggtagcaaggagacagacataaaagaaaaggaggacttggatcagcagagggaaaaggtgagggcagttttggtggagggaagcatgtgaagcttggaggtggggacatttctagacacaataattatttcacaaacatcaaggactgttgtgtgtcatgtctcctgtgctgggtgatgggcacacagggtgaagaagccagacccagtctctccttcaaatggggagcccagtgggctcatggctgtgacgggacacacagacaatggtaggagtccccaggaaattgatctgtttgaaaggggatgggtcagggcgggcttctggaggaggagggaccaccaagctgaggaccggatgatgaggaggacacagccaggcagaggtagcagaaagtcattccaggtagaggaaacagcataggcaaa

SEQ ID NO: 1560205 - DNA, 4001 bp, Homo sapiens
gaagtctcgctcttgttccccaggcttgaatgcaatggctggatcttggctcactgcaacctccacctcctgggttcaaacgattctcctgcctctgcctcccaagtagctgggattaaggtgcctgccaccatgcccggctaatttttgtattttttagtagagacggggtttcaccaagttggtcaggctggtctcgaactcctgacctcaggtgatccgcccgcctcccaaagtgctggaattacaggtgtgaaccaccgcgcccggccaggaaatcacttctaactacaagcagccagaaagaggagacagtaaaacacagaaagacagctcggacagagagagagtgggaagaaaatttcttgggtaactgccaaacttcaccttcatacaacgggccccagtaaaacagtgggccttaataagcacattcctttcccttcaggtgcactaaaataggcaagctaaaagcagagtaggggggtatgcctgcagctgcagaaagatgtatgggaggctgggcacggtggctcacacctgtaatcccaacactttggtaggccaaggcgggcagatcacaaggtcaagagatggagaccatcctggccaacatggtgaaaccccgtctctactaaaaatacaaaaattagccgggccatggtggcgcgcgcctgtaatcccagctactcgagaggctgagaaaggagaattgcttgaacctgggggcggaggttgcagtgagccgagatcacgccactgcactccagcctggcaacagcgcgagtctccatctcaaaaaaaaaaaaaaaagaaaagaaaagaaaagaaaaaagaaagatgtatgggaacagacacacaactctccctcccagataagcacaacgaagagacacagaagcagttcaagcctctgataaactctccgaccctgaatccttaaaaactcttagtctgtaaaagagtgttactctgacccaactccgccagaaggcgcctctcaggtttgttttctctaaaataaacctgtcttgactggcaagccacctttcgtgtttctttcctctttaattcttacaactttgtcacccaggctggagtgcagtggcgcgatctcggttcactgcaacctcggcctccgggttgaagcgattctcctgtctcagcctcccggtagctgagattacaagtgcccgccaccacgcccggctaatttttggtagactcatggtttctccacgttgcccaagctggtctcgaactcctgggcgcatgcgatctgcccgcctcggcctcccaaagcgccagaattacaggcgtttgagccactgcgctgggaaactgtgtttatcattctgagtccagcggaatacagtgcccgtccaaaaaagtgctcaatgaagaatgaatgaatgaatgggtaagctctgggagaaataaccaggctggttgggcagggaaacgtccttctctgaactttagggttctcatccgtaaaatgaggataagcaacagtctccatctcacgggaactgaaggtatggctgaacaaaataggcttattgtcactacagtggcataaacacctcccttactcaaaacactttcaagggcgcagagagaacgctgtacgagtgagcagtaccgtaaactgttactgctctgggttctgtcacgggacagtgactactcctcactgaactgtggaagaggtggcccaaaaaacgcgagaagaaaagagaaagtttttagacgcagaacgcggctcgcggccaccagaaagcgtcctccgcctccgcccccagcgtccccgcgcccctgcgcggccgcaccttcacccgctgcgcctcgtttatgcactgctggtagctgccgatgtagaaggcgttctttacgtcgaacagctcgtctacctccccggagccgccggaggccgggccgggggccggaggcgccatttcgctgtcttctcaccagctcctcttcctgaaagacacgtcagccggaagcaagacacgggcacgctaggaaatgtagtttactttttccgagcggcggcgaagtaagccaatgggaagctccacaataatatgcaagggggcggaaggcgtaagtgcgtcacggagagcatctcgggaattgtagtgtgtttctgcaagccaatgggatccggggaaacatgataaggatgcggtcgaggctgggaataggctgagggagctggagagggtgggaccacgcaggaggcagatccaataaacaggaagatttttctcgtgacgtcgtcggcgcgcgccggaagcgcggatcacacgggcccctacaaggggcccctacaagcggccacaaggatggcaggcttcgcggagctcgggctgtcatcgtggctcgtggaacaatgtcggcagctgggtttgaagcagcccacgcccgtgcagctcggctgcatccccgccatcctggagggtgagtatggcccagggccttccccaagaggcctctccgctcctctcgactcctttcccttctcgcaacctttgcttattccggtcccacgaggcgaggggcaacctcgggcgttacaggagatccggggttccggaggacgactggacagtgttggcatttaggttgcatgactgactcgctttgtgttcgtacgcaagtgatgtaatctctgaaattttcatagtctcagcacagggagggtttgatggatgactagtccgatagtatcgcaaaatcctgcagacctggtactgctatctttattttacaaatagaagttgaggctgtcaaaattgctggtagatccaggactccttggtcctgtgattgctcctctaggagaaggtcttctctctgctcctctagcccaacccagtttcgccattaaagagaggcccacaggaagcctaagatgtgataagtcagggattaaataaacaaatgaaggggtcaacagggagcacaagatgcatatgagggaagggaattctggattccccaaattcacgtgctcctggacggagttagaacgaggtggtaggaagctgtgggcatctcgggtcaaatggatatgggttccagtccagcctgccactcactggcagtgtgtcctgggcaaggtctctgaaacccagctgtccacacatggagggtgttgatgctgctttgtccccaacccaggtcgagactgcttgggctgtgctaagacaggcagtgggaagacagcagcgtttgtccttcccatcttgcagaagctgtctgaggatccctatggcatcttctgcctcgtcctgacacccaccaggtaagcccccagcaggcctcctgggtatgggttaaccagctgtgctctcttgggcaagcacctttccctctctgagcgcccttttcccacgtgtgagatgagcatgaaaatcttgctacccgcttcttaggggtcctgcagaattaaacaagatggccccggtgcagtggctcacacctgtaatcccagcactttgggagctccaggtgagcggatcacttgaggccaggagtttgagaccagcctgaccaacatggagaaaccccgtctctactaaaaatacaaaaaattagctgggcatggtagcgcatgccgtaatcccagctactcgggaggccgaggcaggagaatcgcttgaacccaggaggcggaggttgcggtgagccaagatcgtgccattgcactccagcctgggcaacaagagcaaaactctgtctcaaaaaaaaaaaaaagaaagaaagaaagaggcaggcagcagaaagggtactgggacctgggcatattggagccagtttgagaaaggccttgaatgccaggcggagggttagaattgattctgggggtgtgtgagcaggaaaggtcatgagccagggagaggccaggacagagttggttgggggcagaaaggaggctgatgcttgagaccctctggctggggcaactggctggtggtgaggccattgctgaa

SEQ ID NO: 1560206 - DNA, 4001 bp, Homo sapiens
aagaccagcctggccaacatggtgaaaccctggctctactaaaaatataaaaatcagctgggtgtggtggcaggtgcctataatcccagctactctggatgttgaggcaaaagaatcgcttaaacccaggaggcggaggttgtagtgagccgagattgtgccagtgcactccaacctgggcaacagagcaaaaacactgtctcaaaaaaaaaaaaaaatacaattttgaagtaatcatgaatgaatatagtattttgtgacatttgctgttataatgtggtataagaatacctgtgattttgggtggagcacaatggttcacacctgtaatcccagcactttggaatgctgaggtgggaggatcgcttgagcccaggagttcaagaccagcctgggcaacatggtgaaaccccatctcatctctacaaaaaaaatattaaaattggccggaagaggtggctcacgcctgtaatcccagcactttgggaagccgaggtgggtggatcacctgaggtcaggagttcaagaccagcttggccaatatggtgaaaccccatctctactaaaaatacaaaaaattagctgggcatggtggcgtgcacctgtaatcccagctaccagggaggctggggcaggagaatcacttgaacccaagaggcggaggttgcagtgagccgagattgtgccattgtactccagcctgggcgatacagcaagatcttgtctcaaaaaaaaaaaaaaaaattaaaattagccaggtgtggtggcgcgtgcctgtggtcccagctactgaggcaggatcgcttgcacagggaagcagaggttgcagtgagccaagatttctccactgcacgccagcctgggtgacacagtgaccctgtctcaaaaaaggagaaaaacaaaaaaaaggaatgtctatgattttcattgctaacaaaatcaccgctgctgctagtactaccgaggttgctgcctcaaaaggttagtaaaaacacagatgcaattccaccccccaccccaattcaagtactagcattccttgaattctaccaactctgcggacccagggttaaacacctttaatataatgtctctgaagaagtgacagtgttcgtcgggagcctgagagaaaagtatctatattccagggaatcctaggagtcgtggggctatacagagacttgcagagcagtgtcaaattcaagcgacgcaaggtggtggtgggggtctggagcactaaaacagtctttcggtggggaagtggggtgtaaaacaccagctgctggggcacagacgcagtaggaaggatcgttaccggcgagatctctacccggtatctgaggatgagggtgcatcggagatgacgctgcggcccctccaacgtccaaaagggaggatggactggacacccgggagccaggctgcggcccaggcaagccgcgagaggccacgcctgtgaattagccatgaagagccctggaggacaaactcctgggccaaatcctggtcgctgtgtaggttcagctaggtcgcttggtatctctgagcctgtttactgacaaaaggggataatcgcaggccctatctcatagggctggtgggagagttaaataaattaattaaagttgtttgggatgttgcctggcatcaaggaagaaccgtatcattgttagctcttacgatgaacagaacagggccccggggtccagggaggccggacgccgccagccggaagcctcaacccgttctcagggaagctggggtccggctcctcagcccgctagactggggtcccaggttacagaaccctccacactcacctaaaggcaccccggattcaacctgcagctcaatgtgaccctcagcaaagacaccacagtcggacaggaagcggaactactaccagccggaagctgagagaggtggggactacgggagtcttgcgagcggcttcagctccctcccaggaggaggccactgaagtcattcaagccacgcccagcaagagaactacgactttctattgggctaaatgcttgttcatcctcacttctggcccaatcgtgagcttgcgcggctggggctcgggcgcccgtgggttacccgatctcatcacctctgtgtcttcactcggagagagtgttatagatcccggggctggctggagggtaggtgtggagaaaaatgtcccagcgaaagtacttttattcatgcaagaaatatttattgaacgctttttctgtgtcaggtatttcttttctttaaattttttttttcttttttttaaatttttgagacagggtcttactctatggcccaggctggagtgcagtagcgcgatctcagctcactgcaacctccgcctcctgggttcaagcgattctcccgcctcatcctcccgagtagctgggattacagatgcgcaccgctactcctggatatatatatgcattttatagagatggggtcttgctgtgttacccaggctggactcgaactcctggtctctaagcgatcctcccgcctcggccttccaaagcgttaggattaccggcgtgacccaccgtatccagccatcaggcactttacgggttgagaaagcacgctgcacaaaacacaaaaatccctacccttaaaatatatatatagagagagagacggagtctcactctgtcgcccaggctggagtgcagtggcacgaacttggctcactgcaacctgcgtctactcggttcaagcgattctcctgcctcagcctcccgagtaggtgcgattacaagcgcacgccaccactcccggctaattttggtatttttggtagagatgggatttcaccatgttggtcaggttggtcttgaactcctgacctcaggtgatctgcccacctcggcctcccaaaatgctgggattacaggcgtgagctgccctacctggccaatttggctttttttttttttttttttttttttttttcagacagagttttgctcttgttgcccaggctggagtgcagtggtgtgatcttggctcactgcaacctccacctcccgagctagagcgattcttctgcctcagcctccccagtagctgggattacaggcatgcgccaccacacctggctaattttgtatttttagtagagatgcggtttgtccatgttggtcaggctggtcttgaacttttgacctcaggtgatctgcccgccttggccttccaaagtgctgggattacaggcgtgagccaccgtgcccggctatatctgttcttttacattatgtttacctctttttgcctccctcaacagaaaagaattatcataaaggaagaatttttgtctgccttattcattcaccattgtatctaaagcagtgcctggcacacaggaagtggtctataaatatttgctgaatgcaagaatttcttgtggaaatgaaggaagcatctagggactaggagagggagctatgaaagagaactgctttccttcctcccccatctggcctctaaagcctctcacataccatctggggtgcagtgtccagatggaattgggtcagggacctcttcttacacattctgtgtccatcaacattgtgattatttgtggaattacctgtttacatgcatgtattcatcccctgcaatgagatcttcctaaaatccaaatccctttccctgcttaaaaccccttgatgggggccaggcacggtggctcactcctataatcccagcactttgggtggccaaggcaggcggatcacctgaggtcaggagttcaagaccagcctgaccaacacggtgcaaccccatctttactaaaaatacaaaaattagctgtgcgtggtggtgtgcacctgtaatcccagctatttgggaggctgaggcaggagaattgcttgaacctgggagtcggaggttgcagtgagctgaaattgcatcactgcactccagccagagtgacagagtgagactccatctcaaaaaacaaacaaacaaacaaa

SEQ ID NO: 1560207 - DNA, 4001 bp, Homo sapiens
aagaatgattccgagggagctctgagcgtcctctgggtgctggcagtctggcgggggtcacaggagaaattgcggcgatgtgtgcggtgggagagactgacagcggcctctgcggggtgggggtgcggggtgagcctgatgcattggagaactgagcaggctgctacgcctggctgtgggtgcgggtgccgaaagcgtggacaccaggggattctgttggaaataagctggctcacatgatggggatctcgatgttctgggaggggaaatgagccaggtgggagcggggtcgtgatggagagtggtggagagcccagagagtgggggaggaagggatggagtcagcgctgggtggtacaaagaagacccctcaggacccgagatgggatggatcaggggtgggatggggaaggagcctggggagatggtccaggcaggaggggagtagggaaaggactgaggtgagaggtaggtgtggtgattggaggcaggagcaccttggagccatctgggtgggacagtgttgagaactggggaccctgggctggctcgtagctgtcaacgcgaggcatctacctgctggaatggagagggagaagggggacgggaggcattcggcttcctgtcttagggccttgactgcctgctgctacctgatggagcagcagtcccccacctgccccttatcggaaaaagcagcgttagcccggacacaggcacacggaggatccccaccaccaccacgacgcatcgctggctgggcattaagaagaaacatcagcaacagcataccattattcgtggcttagacactgggaggtaggggtggataaccgagacccggggctccgcgagacaaaaagatgcaggatcactgcatcttcagaggaagccgcgctggggcagtcagattttgccggcgaaaatcccgttcttgatctgctcgttccagctctccacctgggaagcagaaaggcagggagcgggacgccggctcagcctcggccgagccctgcacacgcctggcccggcgccccctctgccgactcacccagctgatggggcacagcgagtggtacacgcggaaatagtactcgcagggctgcgtgctcttcccgcggcgggtcctggtcttgaggcagcggtggtagtctgtggcgggcgggggtcacgcggcaagccacgcccattccaggacaggacccgcccctccactgctcgggccctcccagttcttcgctgcttcgtcccgcctccctctcccctggaggcctccgtcccgcccctcccagccaggccccgacccctacctccctcacactgctcctcctacccagaccctgcccctacctacctcgccccgcaccttcacgactcggccccgcaccttccagatcaggcctcgcccctaccaacctcgccccgcccctccaggctcagccccgccttttctcgaccaggccccgcccccaccaacccggccccgcccggcctcccaccctaacggtctccgcgggacttagggtgggagtgcccctccctgccgtcccttgtcacaccctgctcctcccataacctggctgagcaggtctcacccaggaagttctggtagcagttacggatctggttctggctggggaagcgcgggtcgaagggcggcgtcgaccatttccccttggggggctcctgggcttccacatccaacatccacgaaggaggcaactcctgcgagacgggacgggacggggactccgtggggccgagggggcgccctcgctccgacccgtctccccatcctgacccccgcccctgaaccccacccgtcgtgccctcaccagcctgacgttggcggccactggatctgctgtgggatggtcccggggtgccgctcgcttctgagtccgcggggtgcggtcccacccgggtcaggagaaacgcaccccgcggccggattggctaggacgcccgagccccagccaatgggagccgtcgtgcaccgcggggctggtaggggcgcccccaccccaccccttgctcccccgacgccccctcgggggcctgcgcgtgcacacaggcaccgaggtgcgactcgctgagtctcaggctcaagctttaatctctgcgaagttgggcggctccacgggctcgcccccgcccccccccgccccccaatatataaaggcatatccatagttctggtatctaccagagggggcaaatccccccaagcggctttcaacattccgcttcctacagtcggtgcgcacagaaccctcggggcctgtggggttaagaggaaagagcagcggtggggtccgggctcctgggaacccccccgcccccctcgtcctcccccctccgttacccgccccccccaccctcctccctcgcccccctccccccgcccccaggtctaaggcagatctccagggtcttaaagggtacctggcagcgctgggctcctctggacagtttccaactgaggttaagcccccgcatccggccactcggagtgctgggagtgctgcaggctgcagggagaaagcaagccagagagagctttgggggacagggtagggagagaggggtacccagggctttaagagctgcagatgcctggcttaggagagcgtcccccagggcgggtcttgctgtgtgtttggctcactgttgtatctgcctggggcagagtctggcagtagtaaatgcacaataaatccgaggcggaatcaatgagtcttggctctaggggcagacaagtaactggaatctgggcaggtggtttcacctctagatccctgctaagcttctctccctcctgcctggttaatatcaggcctgactcaggattgtttacactgacagccaaatgtacgaattaagaatcccggccaggtgcggtggctcatgcctgtaatcctagcattttgtggggcagaggcgggaggattgcttgagtccaggagtctgagactagcctggacaacatggtgaaaccccatctctacaaaaaataccaaaattagccaggcgtgttggtgcgtgcctgtggttccagctactgaggaggctgaggcaggagaatcacctgagcctgggtagcttgaggctgcagtgagctgtgatggcatcactgcacttcagtctgggcaacatgtgagacctcttttctacaaaaaaatcaaaaacttggctgggcttttggaggctgaggcaggaggatcacttgagcccaggaagataaaggctgccatgagccacgatcacaccgctgcactctagcctggcaatagagctcacccctgtaatcccagcactttgggaagccggatggatcacctgaggtcaggagtttgagactagcctggccaacatggcgaaaccccatctctaaaaaaaaaaaagaaaagaaaagaaacagggtgtcactctattgcccaggctgcagtgcagtggcacgatggtgggtcactgcagcctcgacttcccagttcaaccagtcctcacatctcagcctccagagtagctgggaccacaggcacatggcaccatgcctagttaactttttttttttttgagacggagtctcgctctgttgcccaggctggagtgcagtggcacgatctcagctcactgcaacccgtcgccatgcccggctaatttttgtatatttagtagagatggggtttcaccatcttggccaggctggtcttgaaatcctgacctcgtgatccaccctcctcggcctcccaaagtgctgggattacaggtgtgaaccaccaactttttttgttttcacattttgtagagatgaggtctcactcttttgcccaaacttgtcaccattttttaatgtaccccttaaagtggcattcggcacattcacaatgtcatgcaaccacctctacctagttccagggcatttgtatcacccacaaagaaacctccaacctggctgggcacggtggctcacgtctgtaatcccaacacttttgggaggc

SEQ ID NO: 1560208 - DNA, 4001 bp, Homo sapiens
tggtgggaggatgggcttggtggggaggggtggacacaaacacagacacacacagaggccagcgtttattgacacttgttcaagtctctcaggccccccaggcttcttggtcttaattcctggggaaggaggcccagccaagggagtacaagctgtagacagtgcctagaaaggggaagcgttggagacagaatgagacctaatcccctccctggacatcccaggcttttaaggccttcaggctccctggttcccagcctggaccccagctctagttcggactccagctcccttcccagattggactcctattgtaaagccccctggctttgatctagaccgggctgggagctttctccccgactcctccctgggcctcagccccaccactaacccagcccccgtcctgggacaagagcccaaaccctagttactcccctccctgcaggcctgactccagctcagtactcgacccccttcctaaacgccaacccccaacccagatcctggtcagtcctgcccagaaaccagccacctcttactctgggtccagccccgcctcccccgcagcccagacgggccctgcgctcaccgcccagacacagcgtcattgtcactcggtacaggatgttgtcaacgatgccgcccttcaggtacaacgggatgtcattgtcctcctggatgtgggggtgtctgatgagaaaggggtgctggctgctccttagagcgcgccccgcctgccccggctcggcgcgctcccggctggcgcgtcggatccccaccccccccgaccccccacctggaagagcttctgtttctcgcgcactcggttctgaaagcggttccgggcggtggagctgaaggagcggatcagcgcctgggacacctgcggggtgggaggtgggcgggtattggaggcacctggaggggtgtcctgaagtgggaccccgctctctgaggcctggacgtggggacagccccatccctagcgagcgtcccaaaggcgaggagggtaatagcttggattctgttacccgcgaactgccagctgggttgggaggggactcgccctggagtctggcctgggggtgaccgggctgcctagagggtcctggaagggagaggacccagaaggactttgttctggggggcctaagtcctgagatttttgttgggggagggtttcctggattaaagggaggaaaccaggtcccgggaacgtggggaccggaatggaggtccccgggagcgtccaggctgcctgagaaggcccgggtgaggccagtgttaagggttcccgagatgtcaagttcaaacccggggctttgggccggggtgggggtccccagttgtctccgaagagtggattgtgggggaagggacccaggctgtttagcggggagtcccaggccctgaaggtggctcacgttccaaggccctagatgcgggggcacttggagagtcgcgtattagggcggggttttctgggtggggggctccggcccagcccatgggggcctcacccgaagggcctgcattctgccttgtcctcttccgccggagtcacctcccttctccgcccaaggacacgcgtagtcctcctctgtccaggaaccccaggccccacccgctgcgcgcagcgtgacagctggggacgcggcggggctggggctggggctggggctgggttgcggggagtcctgctcctcggattcgtccaccacggaggaggcggtccagacccgcaccctgggccgcagcgcgcatccgtttcggtctcggaatttcgcttggtcccaccggagcccaaagcggtaccagggaatacatttttgcagatttttggagatttccgccgggggcaagtgcaactcctccccggatctctccctgcccgctggtatgtgagagtgaggaaacgcataaggccgtgttccaactccctgttctgtctacacagccagagattgcacctccgagcctgtttccgtatctgtaacgtgagggctaaggcaggatctttctcagagatttgttgagacattaaatgaccttgtttttaggaaacacaagctaaagtctttgggagtaaaacggtattttatgttaccctaagaaacacatcatatctatttatagctctctaattctggcagtcaacggggtgcagcacagttgtcctaatggttttagcaaccaggaaagatcctggcctagtctacaaggttttctttttcttttcttttttttcttttttttttagacagggttttgctctgttgcacaggctggagtgcagtggtgcggtcatagctcactgcagcctcgacctcctgggttcagcgatcctcctgcctcagcctcctgagtggctgggactacaggcgcccaccaccatgctcgaactaattttcgtattttttgtagaggctgggtttcaccatgttgcccaggctggtgtcgaactcctgagctcaagaaatttgccggcctcatcgtgagccacgcacccagccagcagacaatgtttgtttgtttgtttttgaggcagtgtcttgctatgttgcccagggtggtctccaactcctccaagtaatgttcctacctctatcacccaaagtgctagaattagaggcatgagccactatacccagcttgtaaaaggttttaacaatctcttttatttatttatttaatttatatttttagacagagtcttgctctgttgtacacgttggagtgcagtggtgtgatctcggctcactgaaaccttctgcctcctgggtttaggcaattcttgtacctcagcctcctgagcagctgggattacaggcacccgccaccacacccagctcatttttgtattttttagtagagatggggttacaccatgttggccaggctggtctcaagctcccaacctcaggtgatccgcccactttggccttccaaagtgctggaattacaggcctgagccaccgcttccagccacggtctcttttaaagagggcttttatgattattaaattcccctaacactttcaaactatgcttgtaaatttaatgttaggtttttccatttaagagccacaagtagggctgggcgtggtggctcacacctgtaatcccggcactttgggaggccaaggcaggtggatcacttgaggctgggagtttgagaccagcctggtcaacatgacaaaaccctgtctctactaaaaatactaaaattaaccaggtgtggtcatgggcgcctacaatcccagctgcttgtgaggctgaggcacaaaaatcgtttgaacccaagaggcacggaggctgcagtgagccaagattgcaccactgcactccagcttgggtgacagaacgagattctgtctcagaaaaaaaaaaaaaaaaaagctgacttaccagataaacagatgactctttcttcaattcttaaataacttttatgaataaaaaattcataaactgtacataaacagatttcaagtaagtcttagtcaccagctgaattccacattttacaatggaattacaagattgacctgttatttgaataggccagtttaccttaaatattacaaattcttaaaataccaagtattcacagattctctaacacaaagttaataccatgggggccaggcactgtggctcacgccagtaattccaacactttgggaggccgaggtgggtggatcacctgggtcaggagttcgagaccagcctggccagcatggtgaaaccccgtctctactaaaaatacaaaaattagccaggcgtggtggtgggtgcctgtaatcccagatactccggaggctgaggcaggagaatcacttgaacctgggaggcggaggttgcactgagcagagattacgccattacactccagcccgggcaagagagcgagactccatctcaaaacaaaacaaaacaaacaagttaatactatggttttgactgtcttaattttcttttttcttttttgagacgga

SEQ ID NO: 1560209 - DNA, 4001 bp, Homo sapiens
gtagacagaattgctcttacaactgcaaactgtgctgctttctgggatcagagattcctcacacaaaaatctctcaggtgacagaagtgggcatccagagctattcctaagacgagatcctttgggctgggtgaaccatgcccctggcttagaggccagctaatctggaatcccaggtcggtcatttggggacatctcttccccagtgtgtctctcagcacagggattccatgtcacttaacagatggtaagatcacagggtgactttagtcagaggaaaacgccctggagaactgtttaaaactctctaacgggccaggcacggtgactcacgcctctaatcccagcactttgggaggcggaggtgggtggatcacctgaggtcaggagttccagaacagcctggctaacatggagaaaccccatctctattaaaaatacaaaaaattagccgggtgtggtggcacacgcctgtaatcccagctactcaggaggctgaggcaggagagtcatttgaacctgggaggcggaggttgcagtaagccaagatcgtgccattgcactccagcctgggcaacaagagtaaaactccatctcaaaacaaaaacaaaaacaaaccccaaaaacaacaaacaacaaacaaaaacctctgtataaggcagggtctctcattggagccaaggtctgtcatgtggggccgcgtcattccttgcagtggaagctgacctgcacatcgaaagctgtttaccagcattcctggcctgcacccacttaatgccaacaccaaatgcctctccctatttgtgacaaccaaaaatacctccagacatttcccagcggcctcagggagacaaaaatcccccccagggctgagaaccactattctaagggatgccagctttgaaagaagcattaggatgaaaatttgtagggttccgatttcacgaagcctaggagagggaagtctggatgctcagagcgcagtagactgtcttgcttttaaaactgtgaccagcaaggaccaactactcactgcaaataacgacacccacctagtctcactgcttaccagttttctggaaactcctaaacaagggctgcttgaacaagccgccttctaaacgcccagctggactaaaaggctggtcttgtgcagaccagggcagcccccctgaacccgcagccctgcagagctcacccgaacttgccaggtttagaaatattctctgtgaagccaacttagcagtactccccagcagttagttaattcaccttctccccgctgtcaacccaccagaagcctgcaagcaaacctctagaaaaatgtagaagcaaaacaaacacttcctcctccctcaccacgcccacccacgggaaagtgccccttcgcactctcctcccacttctcagccaagacgctcctcttaccttcataccttggacaactggaaatcgccacccatgatgacagcccgggtcacacgaagggggcgaggtggggcggggggagctgacctcagcacctttagcttttgggagtccctgtacctccacagagccacttcggaaactttagggcgccccctcctcaagacgattcgggaacaagaggccaggtccagcccagcgcggaggctgtgtggccttgggcaggtcgctgcaacactctgagccagtacccgcgacccccaccccagaaggcgaccgacctcctctgtcgccggaggatactcacggggcctgaggctgcgcggcgcgcacgccgtcccgcgccgacagcagcaggagcaggagcgggagcaacggccagagcagggcgccgctcatttttcggctcctggggggcgccgcgcctggggagggggccgggccagggctgggccagggccagggtccgagcgcggccgtcctcgcgccgccgccgggggccctttgttcgcagcccccgcgcagtgcgcccggcgccatgcgccccgctccgcgcccggccaagctggggcagccccgggccagccccctccccggacccgcctcgtctccgggaccgccccgctcgccccgctcgccccgctcctgggcgcaccctcccgggacgcctgctccgcccatctccggaccccgacccgccccgatcccttccggggatcgtcccctcacttactcaccggacccacccgggccctgcccgattccttccgaacccgcctcctcaccccctacccggattcgcccccggatgcccccctccccaccagccccgcctcggacccgaccccccaccgcccccactctccctctcctctccacccagcgtccactcggaacctgtcccttccctggcctctccctccctccctccccagccagccccttatggccccctccccgggcccgcccctcaccaggggcccctgggtctggacgccgcctgcaaccccgatcccacaggcgccgccgtgccctaagccctggcctgtatctagtgcccagtgcagtgcgtacagcccaaggagcagaggaccctttggggaaacagtctagccaggggtcgaacctcccagactcacatctgccccaggtccctatctgtgctctctgctcccctctcccccacccccactgtccacaaatcccttgggcccgtcccctctctcgctgggcctcagagtccccctttccccttcatacagcaggggtggatgggcaccccctttctctccaagagcagggtgtcccctcctgcccctccccgtgtggccacctcagtgatggtcctgctgtcctaggtcccactggcaggcggcacatcctataccatgtccaagtcctggaccccctccttccagtgtggaacccccttcccccagctaccaactgcccttcttctaaaattccagtgctgaccacaccccctcctgcccggaatcctcggggctccctgtttattttacattttatttttatgttttgagaccagagttttgctctgttgcccaggcaggaatttagtggtgcagtcacagctcactgcagcttcagactcctggagagtagctgggactacaggtgcaagcccgcacccagctaatttttatatatttttttttagaaacggagtcgcactgtgttgcccaggctggtcttgagcactgggctcaaatgatcctccctcctcagcctcccaaagtgctgggattacaggtgtgagccaccacatccagccagggcttcccgtttattgagaccaaatctaaactctggctttgatggcagagacctcagcctagttcctccaacaccctgttcttactccactgcctgcttctgcctaatctctgtcttcctctacctgcctcctttgccagtccaactcctgatccttccaggaaactcaagggaagcttctcttgccccctccctgcccctagggatgtgggtcctctgggggcttctcagccctgtcaacagcctttggacccaacactgatcacccaggcagcaccaagccctgggctgggcaatgaggaccctgggacatacaggacctgctgccactgagcacacaacccagaggggacgtaactgatgatggtgtgttggtgtgtgtgtgtgcgtgcacgcgcgcaggggccggagtagattgagtagccgtctctcctgcctggagaagaggaggagctgcctgcctccaagctcagaccaggccaaccccaaacaggctgctaaactcacatggaggtgcaaaaatctagcaccaagaagcagcatctgatctcaccctcatcatcgaagtttgccccatgccacccctccgggcccctccaggccaactctgactcctacctaagccaacctccactcctcagcctccaggccagcctttgagccctccgcctcccccttgaccattgggctctggccacatttgctcctgagatacatcagacccccacccaccaccaccatcttgggccaaggtgccagctgtcccctctgcctgg

SEQ ID NO: 1560210 - DNA, 4001 bp, Homo sapiens
cgagattagcctggccaacatgttgaaaccccgtctctactaaaaatacaaaaattagctgggcgtataatccatgcctgtaatcccagctactcgggaggctgaggcaggagaatcgcttgaacctgggaggtggttgcagtgagccaagatcaccccactgcattccagtctgggcaacagagtgagactctgtctcataaataaataaataaataagccaggcatggtggcgtgcgccaataatcccggctacctgggaggctgaggcagggaattgcttgaacccaggaggcggaggttgcagtgagctgagatcccgccactgcactccagcctgggcgacagagtgagactgtgtctcagaaacaacaactacaaaagaagctggagatgaaaggaagaaatgataatttcaccataagggaaggatatggagttctagaaactggaagtgggtagtttttggggggcccagttcccctcttgggtgaaagaagtgagcagaggttctcagcaggtggggctgtggatcccagaagtgagccacggagaaattgctaaaggggtcctgggagcagacatcaaaattctaagaaaaaggggtgatagtctcccagaaatgaaccagctgaaatgccggaagtgagcctcagacatcccggaagcagaaacctggatccccggaaggaaaccgaccagcaccgctcctcacccagaaacgtgagagatgccttttccaggagcgcaggccagagaggtagatctcctgcagcacaggggcactgagttccacttcagccccgtccgaggtcagcgagggtcggaagcccacggcctggtgcgcttcagccatgtcacgctggagccctgagtcgggcagagtcatacttcaggaccccagcccctccgccctcagactcaggagtccaggcccccagcccctcctcctccttcatacccaggagtccaggccccagtccctcctctctcagatccaggagtccaggcccccagcccctcctccctcagacccagaagcccaggccccagcccctcctctctcagatccaggagtccaggcccccagcccctcctccctcagacccagaagcccaggccccagcccctcctccctcagacccgggatctcacgctttcagctgcctttttgcgccgacccaggactacataacctagctcatccttctctaagcacctgaagggtcttgagggtcctggtttgtagacccggaggttttgagggaaggacgtcaattcgggacctctgggaacgcatagagaggccagagggatagctcgcgttaacccctttacctgctctcccaagaacatggtgcgggggcagtgccctccccccagtacaggattctcaagattcgggggtgggtggaggagggaaactggtccaggctgagttgcggggtcttgagaaaagcattagttttagacccatatgaaacaaacacctgttagacattgacgctgtccaccccattgccgcttttcatgccaaggcgagggggatggtgtctataaattcatccgctcagcgtcccctccccccgcccgtgctggagggaatggggaaggaagcacccactgcgcatgcctcgcagcctgggatgctgaggctgtgagcggaggcgagcgtcgaggacaagtgatggagaggcttgcacgcccaaccctagacacaggactccaggccccgccggagcccgagcccctggggtccagtacttaccacgttgaatcaagggtccgctgatcggatcctggggtccaaacccgagtccacccccgccccccgattttgagcgccggccccaaatctcccgcttgcatatgtccaatcccagtgcaaggagtccaccaccgggtcgacgggcctttggagtcctgcccaccccgagatcaccgtcacccagaaaccccgattcctctctctcgtgtccctagccgggtattcaggtcccgggttttatccccgcctccttccaatccccgcgttctatccccgcccccttcgagccacggcgtccaatcccctacatccgttcgatccccagtcctccgtctccttttacccggccagattctccaccatttggccgctcgcattctacgcagctgttcggaacccgggttcctgggctcctcactcagctcattgtctcttagtctcctgtctcttcgaggaacaaggctcagctgggaggtcgcagcccaccccaggtgcattataacgtcaggcgcgtagggtgccggagcaaatctcagccctttcacgccagggagggaggagggatgtttgggggtcaggacggcccgccaaaaccacccacggaaggtgcatggattgagttggcaagaaaggcgccacagcgggttggattcaaggtagacagtgggacttccgtgagggagaagcagcatggctaatagagaaaggtatattagagacccagcctcgactgagaggtcgaaataggtacagagaagcagagactgaaacacggaactcttgtttattcggctctgggcgtcagtgttcttcgcccagcctggtcccgtgtgcttctaggtccaacctagtcgcagcccggggagggactggggaagacggtttcaggggctggagttaggggagaagaaatgtggagtagaagctccaacatacagataggcaaactgaagccgaggaggggacgagccgtgcccgaggtcacccagcgagctgggcactgcgctagccccctcgctgcaggccggaatcctgggaaccgagccgggcttccgcctcgcgccaccggcggcgcccatagctgtaggggtcctggggctcgtggctggccttccccgagggctccttggtggagacagcgaatccagtatatgatctccgccaggcggtgggtccggcatacgcccaggtagcagacgtgcccgcggtgctgggggacctggtgctggcctcgcctggagagggagcgtgggagaaaaccgggttcaaaccgaattgagagatggagcgtgatggaggtgggcacccaagcactccaagaccagcggggaggcttacagatcacctgcccgttccgcggccgggagagggcgctcgccctttacggtctccctcccgccctgtccctgctgccacccgggtttctcacctggctgcagtgtccaggtccccttgggcggagaaggcgaggagcaacagcaggatgaggatgtggatagtcatcgtgggcagggcgggtcaggatccgtggcccgtagttgcggccaccccgccccgttcccgcaccgggctgatcgcctctgggtgcagctctggagccaggtaccagggccagtccccacttcccaggcggggaacactgaggccaaaagtctgtgggaagaggccgcaccacaccagaggggcaggattcaaacccgggtccccgcttcccgcaccgcggctccagagacctcactgggtgtgtggggtcacaccagctgctgtctatccccctaggaggtctgtggagactcgcccccttcaaagcgtggggaaatggggcggggccaatgacacccgcaggtagctaagcagcgggattccaagaaaaggggtggcggcggggaagcgctggctctggttgtagatgcgacctcaccctcaccctgtcgggaagccggttagtagacagttgggaccctggaacctcgggggccaggcaatgcagggcaagtgcacatgcggccccctggagggcgtggagcgagggagaccccaaacacactgaggagcgcccctccggaagagaaaaggccgaggtgtcaggcactcgccggtgagggctccagttgcactgaagcaggtgtagccagggctgttcaacgaggagggtgtcctgggtcaaccaggtcgagtgcacagtattgtgggggacccaggaccccgtggccaggccctgagggtggaaggg

SEQ ID NO: 1560211 - DNA, 4001 bp, Homo sapiens
acacccctcgcaagcacctgccatgtctgggactccggcttttttttttgagaccgagtcttgctctgttgcccaggctggagtgcagtgtcacaatctcggctcactgcaacctccgccttctgggctcaagcaattccccctgcctcagcctcccaagtagctgggattacaggtgtgtgccaccccgcctggctaattttttgtatttttagtagagacagggtttcaccatgttggccgtgctggtttcaaactcctgacctcatgattttcctgcctcggcctcccaaggtgttaggattacaggcgtgagccaccgcgcccggccgggactcctgctttcatcacatctaccaagtctgagctccttgctcccccacccacctgagaggcatatggaattcctgagcccacacatctgacagctacagtattcctgcccactccctccagggtgtcctagtcttcttggtctaagacttcaggtctctcctacttagagctctccaaagccaccctgacctgccacctctggggggagggggtgtctagtcctctctacatgctatatgtgtgacccctagataacatccttgctgccatcttcccacatatacctccaactcaccaggttgccatcggagctggagctggtggatgaaggcaaaacagtgctattctcatttgcagaagtggtctgtactgtggagggtgaaggcagagaataactcagtctccatctttctctcccatccccgcccatctgcacctgctttgggcattccccttcacctccccctagcaggtcccaattcaaactctgcctttcattcgcacagagatggttgggtgtcttgcaggtaagacctctcccttgggtgtttgctccccaggacacccccccgacccagtcccgcagagcccagtagggtgtccagaagtccacccctcccctactcacctctcggccctgggcccttaaggatctgggcgggcctagcttttccctggagtgtctgactcacacctccccacaggctcccaaaacaaatctaagactgaatggctggggtctacaccttcagccaaccaggtcgacccggctcggcaggcctcctcccagctcccagttcacccaaaaacacctgcactataccaagactcaggtacgcagcccttacctccccccaagtcctacttaggagcccccactccaacacacaattccacctcgctggggaactcaggtctcctagaccaactcccagtgtccaaggaagaaactagaaatcttaatccccccgagccctaaccctgtagacccctccccaaggtatttcttccccgctccccaattcttgaccctctctgcgccccagatacccagcgcttctaagccacgtccccagcagagatccaggaatccagacccctcccccccagcgctctcagctggtacctactttgcccccaggctcggccccagcgggccagcaggaacggcaggcccagcgccagaagcagccccagcccggggttcgccatgggctgggtggcgggttggcagcgccgaggaaggggcttctcgcgctcgcccctcctaccgcatctccggccaggggcacctgcgacggggcacctggggacaggagaaggagaggcccaggcgttgggatcggggtggggaccccggcgcaggcccacaggagagacaactggcgccagggcacccatgagtcccgccccgccccagccgccagaggtcagcgattaaagattaactcccaggagcgcgttcctgggctggggaaaggaaggggacgggacgggacgggacgggacgggcagggtggacgggcgagggggcaggcctagcggtgcgtcctgccttcctacctggcccgggcgtctttgacctagctcaggttcctggtccgtgtccctccctcgaaccctcggtccgtcggtcgttctgtgggtccgaccccaccggctccgccctgtcacgtgacccggaaagtttagtcactcacctgggagagcgcacttccggcttgtgcacctgagcctcgctgagagggcggagtcaagaagggggcggggccgcgctgtgggcgcacctgtaacgggaccccagtcccttaatggggatgcggggagggagaccgcggaagcgcgcaggtgtgagggggaccttacacctgcattgcgagcatatctgtgggagcgcacaggtgtggagacgcacggggtatgtatgtacccgtgcactaggcactcctgcctagggcagacttggatggggagcgcttaatgagaaaaaatacctgcccaggcgcaatggctcacgcctgtaatcccaacactttgagaggccgaggcaagaggattgcttgaggccaggagtccgagaccagcctgggcaacacagcgaggcctcattctctacaaaaaataaataaataaataaacaaataaataaaaagaagaaaataagccgggggcggtggcgtgatcctgtaatcccagcgctttgaaaggccgaagtaagagaatcacttgaggccaggagttcgagatcagcctggcccacagacggaggccccatatttacaaaaaataagaaaattagccagatgtgatggcacgcacctgtagccccagctacttgggaggctgaggtgggaggatcgattgggcccaggagtggaggtaacagtgagtgagctatgattgtaccactgtactccagcctgggtgacaaagtgagaccctgtctctaaaaaaattttaaaaacaaaaaaacagctgtatggtaaacacctgtgtggaaccaaacctgtacagaagacaactgcacaggtgttcacatataagaacatacagaaaacagatggccgggtgcggcggctcacgcctgtaatcccagtactttgggaggcctaggcaggaggatcacctgacgtcaggagttcgaaaccagaccagcctgcccaacatggtgaaaccttgtctctactaaaaatacaaaaattagccgggtgtggtggcaggtgcctgtaatctcagctactcggggggcgctgaggcaggagaattgcttgaactcaggagacagagattgcagtgagccgagattgcaccattgcactccaccctgggtgacaagagtgaaactccatctcataaaaaaaaaaaaaaatctgcattgaatcacagctatacgaaatatagccaaggctgggcatggtggcccacgcctgtaatcctagcactttgggaggccgaggcaggtggatcacgaggtcacgagttcgagaccagcctagccaagatggtgaaatccccgtctctactaaaaaataatcaaaaattagctagcgtagtggtgggcgcctgtaatcctagctacttgggaggctgaggcaggagaatcgcttgaaccctggaggcggaggttgcagtgagccgagatcacgccactgcactctagcctgggtgacagagcaagactgtcaaaaaaagaaaagaaatataaccaaatggatacataccaccagggtggacagtatctctatagaacacgcctgcattatcatcacaaacagctaactaaggcactctgatgtggaatagacctgttttaggaacatatctgcatggctcacctatgaaatgtacggcacttgcattgggggaattcctgggtgtcagtgtcttgtaaatacctgtatgagacacacctgcatttacgtaaacctgtatgggactcggttgtatggaaacatacccagatgggtgtatacttaactgaaacacacctacggggcgggagactgtagaatgcattcatgggtggagggaaacctgctcagaaacatacctgtgaggtaagagaaagcaccttgtaggaggaacacctgtatggaattgagctcaagtgaggggaagaacttggaacatctgcacggggcacactcacattgacacacatctgt

SEQ ID NO: 1560212 - DNA, 4001 bp, Homo sapiens
ggtggatcacaaggtcaggagttcaagaccagcctggccaggatagtgaaacccatctctactaaaaatacaaaaattagccaggtgcagtggcgggcgcctgtaatcccagctacttgggaggctgaggcaagagaatcgcttgaacccgggaggcagaggttgcagtgagccgagatggcaccactgcactccagcctgggcaacagagcgagactccttcaaaaaaaaaaaaaagaagaagaaagagagaaaggaaggagaggaaggagaagagaaccgaacctagccagggagatgccccaagtttgagtttgaacctaactccaaattgctgtgtgactttggatgagtttccaccctgctctgggcctccattccccacctgtaagaaggagctgatgctacccgctaaatgatgtgcttggctaaaatcaagcaccgtgacccattagtgcatcgtagagctgagcagagctctggctgggctctggcgggtctagcaccttcgtggggcctcagttggcccgcctggagctctgtggtcccggggcaactgcagtggactcctcacctggtccttgacgtgaccccagccctcgcccagctccacgtgtctcaggatgccgtcctgccggtcaaacaggagatccaggagctcaaagctgtcgatggggtccatggagcaggcagcagaagccatctggggcgcgaggaacagatgtgagggtcacatacagcccctgtcctccccacctcccatgtgcacataaccctggctctttccggctagagttcagttgccgctctgcctccgggttgggccagctgctgcccctcgctgagactccctttccaaatctggactttgaggctgatagagagaattccacagtgtgagagccaatttctcttaaagtgctggagaggctggatgtggtggctcatgcctgtaatctcagcactttgggaggccggggcaggaggatcacttgagcccaggagttcaagaccagcctgcgcaacatagagacccctatccctactgcaaataatttaaaaaaattagctggctgcggtggcacacacttgtcgtcccagctactggggaggctgaggtaggaggatcccttgaacccaggaggttgaggctgcagtgagctatggccaccccactgcactccaccctgggtcacagagcaagaccttgtttcaaaaaacaaaaaagtatggcaggcacggtggctcacatctgtaatcccagcactctgggaagccgaggcgggcagctcacctgaagtcaggagtttgagaccagcctagccaacatggtgaaaccctgtctctaggaaaagtacaaaaattagccgggcgtggtggtgcacacctgtaatcccaactacttgggaggctgaggcaggaagatctcttgaacccaggaggtggaagttgcagtgagctgagatcgtgccattgcactctagcctgggtgacagagggagactccatctcaaaaaataaaaataaaaataaaataaaataaaataaaaagtgctggagagaggccctagctagagatgccgcttgcctctcaggccttcacagcctccccaagtgcccgctcctaggaggcagggggacctggaagaaagacaagggcagccccggggcaaaggcacacagttttgctcattgcatcctttctctgggcctcagtcttcccatctgtacaataggggtggagatggggtccttccagctctggcagcttgggtaggctttcccagcctagactcccgctctccctggggacctagtagggctcacctttccagcagctaaatccgtattcatgggtccatccagttctgtctgcagatgcctcggggggtctctgctccaagctggaggcccacccaccgccagcgttacctggggccgggcaagctcacagccctctgtggctctgtcaccactcccaaaagatgctgaagcggtcacaggcagctcccagcccacctccaggtgctgattggtggacagggtggagagacagggttgagggccagtgacactggggcaggcaggagcaggggagggaagaccgttatctgggtgttttgtggttttccagccctcagtgagcaaaggtcgaagtctggggtacctccactctgccgtgacctctgccctacttatgaggactttttctttttttctttcttttttgagacggagtctcgctctgtggcccaagctggagtgcagtggtgccatctcatttcggctcactgcaacctctgcctcttgggttcaagtgattctcctgcctcagcctcccgagtagctgggactacaggtccccatcaccatgcccggctaacttttgtatttttagtagagacgaggtttcatcatgttttccaggctggtctcgaactcctgacctcgtgatcggcccctcagtctcccaaagtgcggggattacaggcgtgagccaccgcacccggccagttacaggactttttctcttcagaattcccagatgggttctgggatagcccagggcccttacatgggtcctgtccactccctggacagaaacaaaccaagaggaccagaccagatcttcactgaagccagttttcctgccagcagctagcggctcccatccttcaccccacctgccaacctccggcccccagccccctccgaaaccagcttggactccgcctctgagtccccatgggtgattctgtgcaatcaattctctctagaatcttctatcgttcattgagtcaacaaatatttatggagccaaactggttcctgcttagggcctttgcacctactcacctgctcgcccctctgcctggaactctcctcttgtaccctccctcttcccctctggctctaggtcactgtattgacattttagtgaatgttcgatatttgtgaatcagcccgggtggctgagaggtgtctctgacctcccctccaccccctaccaagagagaggagccctgttttgtttttttgtttttttttttggtgttggtggaggacagggtctcactctattgcccaggctggagtgcagtggcaggatcatagctcactgcagcctccaactcctgggttcaagtgatcctcccgtctcagcctcccaagtagctaggactgcaggcgtgcaccaccacacctggctaattttgtttttttttttttatagagatggggtcttactgtgttggccagtatggtctcaaactcctgggctcaaatgatccacctgcttcagcctcccaaagtgctggatttacaggcatgagccactgtgcccaggcaaagtccccctttagcagatgacatattagaccaagcgtggtggctcacatctgtaatgccagcactttgggaggccgaggtgggtggatcacctgaggtcaagagtttgagaccaacctggccaacatggtgaaaccccatctgtactaaaaatataaaaattagatgggtgtggtagcacatgcctgcaataccagtactcgggaggccgaagcaggagaatcacttgaacccaggaggcggaggttgcagtgagctgagatcacaccactgcactccaacctgggcgacagtgagactctgtctcaaaaaaaaaaaaaatgacatgttcagtgcagtcctgaaggatgagatggaactggccctgggaaggtctggggaaaggtgtcccaggcagaggcacagtttgtgcaaaggccctgaggcaggtccgtgcctagcgcattggaggaacagcaatgagacccctgtggctggagcagagtgaggagaggaagacaggcaggagaggaagacagggaggaggggaaggcagggaggaggggaaggcagggaggggacggggcaggtcgtgcaaagccctgtgtgttgtggcaaggagtttggtttgtgctaaacagcagggcactgttggaagtttagcaaataggaga

SEQ ID NO: 1560213 - DNA, 4001 bp, Homo sapiens
tctctcctcttttcccaatctggagccactgccgttattaaaaaggaacaccatgtgttttaaaagggaaaagtgtgagattctctgcaagcagggcggaagggtggcctccatcccagggtccccacgggggtccccatctcccgtcccgctggtacctgcagacactttacgacccacccgcctgctggtcaggtgctaagacacaccgtaagtagaaacatattgccgaggtgtgagaatcttttatttaatttcttccccccttaaaggaaaaaacacacttacagtgcccccccaccccctacaccttcgcctgctgctctactggctgaaaacaaagcttggcgctcacagtggcactcacaggcgctgcccaccgcctggcagagccgtcaggggccctgggagggcccgaggtagcccctcacctgaaagccaggggagagccaggctttcagcaagtgcccctagaagatgcccggaccctgccccttcccggaggagccctacaggcagcccgcaaacagcccagcacagggtggatgagcctgggagcagtgtgtgcccggcgacccccggggtggcccgtgcgcctggatggggtgcgtggagtgactgaacatctggggcgagtggtgcctgcctctgtgcccctgggtcgcctcccctgtgggatgtgtgtgaccgtgaatgtgtgtgtcggggatggaatgtgtgtgcgtccgcgatggtgcgcgaatgtgcacctgggatgcagtgtgcgcgagtttgagggcgagggtgacgggccacaagccagtgtgattctttgtgtgtctctgggtgtgtcccagagcgggtctgcatacggagacgtatccttgcgggggtgttccttggatggggggccccagagtgcctgaggccagaagtccctccagggcaggggtcttggcccgtagggcagcgggttcccagtgggccccctcaaagtttgggcccgctggtgcccggactcactggctcccgctccctctccctctcacccactcgctcacaaagattcctctcgctggaggctctccgcccgacgcagcctggctgaaaacggttctaagcgccgccggtggcggggactccgcggacccccgtgcgccgggtcccgcagggggagggcggtggcgccggcccgtggagacacaagtcccccgggaccccgggctgcgcgccaggcggccagagcggcccccctgcagccccgccctccccgtggggctcatccctccgcctgggggggcccgctgggggcccgcacccagcgcgccaaccgcgtgcgcccccgcctgggagcggtgccctgcagtcccaggggcccagagtccaccgaagcagacgcgtgcgcccgccacgtcctggcatgcagagggtctcaggccgcgatccccccagcccccgggggcctggcctggcgccctcggcccagctgcccaggtaacagggcctcgggcgcggaagcaggactctctggacagtggactgcggcgccgtgtgccccgcaggtgagggcgccccgagggctgcgccgggggcgccttcctttgttccccggccgtccaggtggcgcccgcgccccctccccccgcggctgcccccggggcgcccgccctctgctctggcaggggggaaggagtggggcgccgggtactcacgggctcctgatccggctcgcggcgccccgaggacgcagagcagcagcagcaggggcagcaacggcggcggccgccgcgcggattgggcggcggggccccggcggccggcgggcatggggccggcgctgccgggggcgcgcggcgggctgcggctcggcggcggtggcgcagggcgcgggacgcaggccgggcgcgggagggcgcgggccaggccgcccgcacgtcgctgggcgcggacgcggaggccggagcaagtctgagcagccgaattgacaaggcgctaatgcgccgctggccccgcccggccccgcccccggcccggcccggccccgggggggcggcgggccccgcaccggcctccccgccgcccgcccgcccgcgggcaccgcgcgccccgcccgtcccgcctccgccccaccgagaaccgcgcgcgccctatcccgcggcccaaagccccctaactcaacccctaccggcccaggacctccctctccaaccctgccagctccaggcttcccacccccagtctgggacccggcacccccaatcccgtttccataaccctgcccacttccctgcaccctcctctcagcccagtgcctcttcagtggcccctttggtccccaaccctgccccactcctccattcccccttccacggcccaatcttctgtctcggcccccaccccagctctggccccgccccccccaccgagcggtccttgagtcccgcctacccccatctccagcccctcagccttcccaggggcctaaaagtcacccccagccccacgccctcggcgcgcgggttccagccctcccacctcatcctgcctcttttcgattctccgcgagtagcctcggccccaggctttgctggaagaaaggagaaaaagcaggaaggcacggagtccctcgccttcgccctggctgcgctgtccccttcgcgcgcgggatgggtttgaggttgctctgggcgccccgggggcctcgggagggagctcctgcgtgggcagacggggagatgtagtcccctgtgggagccgggacccaggcctgcgcgggaactgggtcccgcaccgcagtaagagggattcccaggaggagagcggtaagaagctctttccccgggacctattcacaccccgccacggaaaaatccactcagcggcccgcgggtggggtgcgccacgcggtgagtaatcgcttcggcggccaccgcccgccgactccaggtaacgccggctgcccggagcgacgcatagtttgtcttccttcttttgcgcaaagagccttctccgtgttattatttttggccattgctcgagtttcgggacccctcccggtccgggcgtctcatctccctcctcccggtccccacccgatgcgggcgcccaggaataaagggttcctggcctccaaggctgctgcggatgggggtgcctgaaatgagagttggggggtgcaattacccacttttggtcgcagccccgcccccagctgcagcgcccagggaagggaacggctccaagtccccttttccaggagtcccttagaggcctggattctctctcctggtccccaaccagccaagggggtaaaagtgtctgaggggggctcaggagcccccatttgtctgcccaagactgaagccccaccctctcctacttaaatctccagttcagactccagactgtcaaaaaacaagattgggggatgggagcctataggggcccagggcgcccctgctccatctgaattctggatggagaagacagacaaggagagacgctgccatttacttcgggaaaccaggccttttgtgcctcagtttcttcctctgcacagtgggcaccacccagtctaggagcttctgtgggaagacgcagggcagcagaagtctctacaatccaagcccttagcacagcactggaggatatcctggagcagaggtgacccccagccctgcttgtcccctctgaaacatggagccatagtcccacctgccaggggacccagagggttaagtggaggtggcagtccttggctggaattgagtttttaggatactcaccactactcccccatggctcctgtctgcagatgctctctgtgtggatagagacgcctcactccctcctgggaggacttcaggcttctggagcaaaaccttgattttttcctccctccatttctgcttctcttccagtcattttggttttgggaaagggctctcccatccatccaggtgctcaggccagagacctggaagcgcacgtgacaactctctcctttgctcatccctcatgtc

SEQ ID NO: 1560214 - DNA, 4001 bp, Homo sapiens
acatgatctcggctcactgcaacctccacctcccaggttcaagtgattctcccacctcaacctccccagtagctgggattacaggtagctaccaccacgtccggctaatttttatatttttagtacagacagggtttcaccacgttggccaggctggtctcgaactcctaacctcaggtgatccactgcctcagccttccaaagtgctgggattacaggcatgagccaccacacctggccattttcttatttttttttcattcattcattcaccagccatctctttctctacatcctgagcaagaatgtagctgcttggagctgggaggacagatgtggcacactcaccgagcatgcctaaagcagtacctgggtgacagtgagctcccaatcattaccaacacagaaatgaagacacaaatcctagtctataaggtcacaatctctcagagaaacaaacaactagttacaaagtaacacagactgaaagtgctacctaaggaatcagagactgaggttaagtctacctgagccagtcacatcagtggctgaatctggaaaccagggatacgagcatctgcaaagcccacccaaaccctccccaaggccccaggatgcaggagagaggtctcaccacactgcaagaacaaagtggagattcagcatcacctttgcagagtgtgctcaccaccctgccccaagaggaaggtcttgctagaatgcctgacaagaaactgaggcctgaggaactcgggtgccttgccgtgctcagacaccagccccaagcccctgctcctggcccacagcaacttcccaggtgagatttgcagggtatctgctctgccagacaggagcctggcagaacctggcctgcccctgcacaccaaatgcgcccagccacctgaggcagacctggccctccaccctggtcctgagagggcaggggctgtggtcagcatcccctgttccactgggaggaacatcacctggcccccaccatatgggctacatggagaaggggcagctgtctccactccaagttccaggactgagcacaatctgccttcttggcccccctctggaccccctgggggacaggatctgaccattccctcagctgtccaagagggagagatccctgtcccacctcagctctgcaagtggggacatccgttcctcccccaacacccagggagtaaaggcacaggtaaccatgacgtagagacaccggtccccctcaggtagcaagaatgggagggcatctgtccctcccaggtagcaaggatgcgggggcacttgcaccctcacccccagctaccaatggtgcttgcaagcagcacccagctcatacacctgtgtcatcctgcccccccaggtagcaatgatgcgggggcacctgtcccttccaggtagtaataatgtggggcacctgtccccctcgggtaacaatgatgtagggacacctgtcccctgtcaggtaacgacgaggtactagcacctgttccctcctagtagtaatgatatagaggcccctgtctcctccggggagcagtgatgcagggcacctgtaccccatcaggtatggattttgtggggtcacctgtcccgcccacgacgcccggggcgtggggacacctgtccccctcgggccgtgccaagccccgcccccgccgcgcgcgccccgcccccgccgcgcccccccccaccccgccccgtgcacgcgccggacacgcgccccctccctccctccgccggccctgaagggtcggcgcgggcagcccccttacccgcgcggcccgcgtcaggctcaggtccttcatgacctcctcgaaggccgccgtctcctccgcctgcttctgattgtgcagcgcgatcttctcgctgaatttccgcggattgttcgaagtcgccatcttctcgccgccacctcctcctcctcctcctcctcctccacctcctcgcccccccactcgcccgtgccaccgcgcaagcgccggctgggcccacgggcggcgagcagtgcgcaggcgcgccggcggtcgtgagcgcggcgcaggcgcacaggagcggcgcgcggcgcgggggcgaaggcgcatgcgcgcgcccaggcgcgcgctcggggcccgcgggaagggcggtggagcgcgagtggaaatttcaacgccgacgcagtgatccgcctcctggcccgctggacagcggcctctgggctgttggacaaggaccgcggatcggctggggcactggagcccccaagagggagacggcctgacccagatcctcccaattcacaagggtggggccaggcacccccccccgcaaggattggtggcaccccaagttgaacctgggtttggactaagagctctgaaaacagactagggcgttggtcactcatgcattcattcattcaaggaatatttactgagcacctactatgtgccaggcaaactggagtacaggcgtgaacaagcagaggtgatccctgcccttatggagtgtacagtcagagagggggcagacatagcacacaaataaccaagaacttttcagatggaggtaaatgtgatgcggtaaataagaccagtggccagccacagaacattagggagggaggctcctgcagccaccacagacagggaggcggaaagttatcttagctaagacctgaaccctgcaatcggctctctcagtccataaacctagctgttgcccttaacgactttcttttttttttttttttttcccttgagaccgagttttgcccttgtcgcccagactggaatgcagtggtgcgatctcggctcactgcaacctcctcctcccaggttcaagccattctcctgcctcagcctctccagtagctaggattacaggcaggcgccaccacgcccagctaatttttttattttcagtagagactaaagaccatgttggccaggctggtcttgaactcctgacagcaggtgatccacccgcctcgccctccctaagtgctgggattacaggcgtgagccaccatgtccagccgacgactactttttcccattcccttgcaatgggcatattgctattctctggatacctgagcccaaagaactggagttacagagcttcagccttccctctgcatacttctccagtccagtcttgttcaaggatctctattttgcaacaaggtgctaacagaagggtccagaaatcccatcaagactcagcagtgaaggaaggagcagagactcccccgatggcagagtggtaagccagggaagcaggagggactctaaccctccctccctcaagagagggacccccaaccaccaatattgaaagtttatattcaggaggctgcagggatttcagagtatgggctgggtggaagctaggaaggtcagctgggggaattgatgatggctctaatggcacaacaagcacacattttattggactgaggatggctggaggggatgctgacatcttccaaacatgctttgattcatgctttacaacaggtaataaaatgctcatgttaaatatatatatatatatatcgattttcatttagaatgccttggatattgccactgccctactttatctttgttttgagacagagtctcactctgtcgcccaggctagagtgcagtggcgcaaccttggctcactgcaatctctgcctctcaggttcaagcgattctcctacctcagcctcccaagtagctgggattacaggcatgcaccatgatgctcagctaatttttatgggattttttttttttttttttttttgagacggagtctctgtttcccaggctggagtgcagtggcacagactcagctcactgcaacctctgcctctggggtttaagtgattctcctgcctcagcctcccaagtagctggaattacaggaacccaccaccacacccggctactttttgtatttttagtagagacagggtttcaccgtgttggccaggctggtcttgaacttctgacctc

SEQ ID NO: 1560215 - DNA, 4001 bp, Homo sapiens
ccccatctctactaaaaatacaaaaataagccaggcatggtggtgcacgcctgtaatcccagatacttgagaggctgaggcaggagaatcgcttgaacctgggaggtggaggttgcactgagctgaggtcatgccactgcactccagcctgggccacagagtgagactccgtctcaaaaaaaaaaaaaaaaaaccagactcatgtggcttcatgccagcccttggcaagaccctcccagctcagccacattcagggccctcccttgtcagccactccagcctctctctgcagcctctgttggctcctctgtccagcggggacaaggagctgggtggatgcacccactgccggccatgagacctgggggaagctgggatccacggcacagttagagcctgagcaaatcaactccgtgatcaacaatgtgatccctgaagcatccagaaattcacacacagtgggcagccctgaagtcggacctcactctgtggcaatcacagccctcgctcgttccttttgggaaaaccgcatcacacctcctctctgtggcagtctgtctacctgcttctacccttctgcccttcattcattcattcattccctgcatattcactgagcactcactgtgtgtctaggactgacccaagcactgggaatacagccgagagcaagacagacaaggcctcagccctcctgacaggggcagacgggaaacaaggtgtcaatcaagagttttgcaggagaccggctgggcgcagaggctcatacccataatcccagcactttgggaggctcaggcgggctgatcacttgaggtcaggagttcgagaccagcctggacaacatggagagaccccccatctctactaaaaatacaaaaaatagctgggcatgggggcacgcgcctgtaattccagctactcaagaggctgaggtggatggactccttggacctaggaggtagaggttgcagtgagtggagatcgtggcactgcactccagcttgggcaacagagcaagactccatctcaaaaacaaacaaaaaaaaactttgcagaaagaagatcagagagagtgactgtgctggaagctaagagggcgggggcgtgaggattccccagtcccgaagtagagcctgggctgaaagccagagcctctgggtgcattgaggccctaagtgatcaattcaccagcacagtgatccccagtcatcacattcctggctctctcgggcaggcccaagtccacccggagttcttcctgttgcagccacagacctgggctctctgcgtatatgtctgttccgtcccttgtctgtcattcatccatccatctatgcaacacatatttaggcaaatcccaaccacacgctgggcactggggaaaaatcagtgctcaacaagggagggagacaggccatttgtggatcatcgcgcaaatgaaaatttcaggcagtgctaagagttttaaagaacatccaacagagcggtatgctgaggagttgccttagaaccacggtgagaagcccccaaccccggatgccgtcagggcttgaggggacccccttgcccacaagccaccctgaatcctcccaatgccccgagtgccatcagccagtccctgctgtctaaccttactccctcctgctgcaatcacagcctagccccgtttccacaaatgccaggacggcacctctgttttgtgtgtgactattcagcaaacatcacctgcagagcacggcaaacacagccacgaataagataaacccaacttctcccctctcttttttctcccctcctcggtcccctccgcctctcctgcagacgctcaccttcagaaaggagggacggggctctcccgtggcccaggacctagacagagcggccagacagcagaggctgaaggaaacacatcccctcacatggggagattttaagcctgggccgggagtgatgtcatttgtcatggcctggaactcggagggtaatcccggccaaggtgggggactcgactgggcaccaggaggtgacattggctgggagggggaggggcacccgtctgcttaatcccctcctcttccccccatgacatcttggcaattagggctgatggggaagggaggccccagctcctgccggtgaccataagcccctactcctcagggaagtccttccttaggtctaactggtgtctctccagcttcagctagtatcccaagagagaggcatcaaagaggaaggagagcactgtcagatggtcctgagagatcgtctgaaaaaagagaggcacggagctttcgggatccctctcctgggtccccctttctctccacaacagtctgtccgacagctagtttatctctgtagtgcctcattggtctcggtttctgcctcagtttcccctgtttctctctctttgacttggtcaagtcttgtctgtggcctctctgtctctgtgttgtcagacatgatattctcctctttttgggggcggaggtggcaggggctgcttccagcactgaaaataggcagacttattagaaagggtgttttgtttttctgtttttggtggagtttggggtttgggatttttttcttttttttttccttttttttttttttggttgagacagggtctcactctgtcgcccaggctggagtgcagtggcatgatcacagctcactgcagccttgacctcctgtgctcaagggatcctccctcctcagcctccccagtagctgagactttacaggcacataccacgatgcccagctaatttttttattttcgtagagatggagtcgctctatgttgcccaggctggcttcaaactcctggcctcaagcaatcctcccacctcggcctcccaaagtgctgggattgcaggcgtgagccaacaaacccagcactcaccatctctctacacaccattggtctttgtctggcttctctgtacctcagtttcttttcctgtgggccttaggctgtggcatttctgcctactttcctgaataccactctttcattctccatctgctcctctccgtccctgtctctgttgataaacctgcattatccccttggtctctcttattctttttctctgtgtctccctgtctatcttgctctttctcccctctccctcagcctccatgtccttctgttcctgtctgtctgtccctccctttgctgtctttctgcctgtccacctgtccctgtaactccagcctcatctctgtccctctgtcctcgcttatcctctgcagctccaatctctgttcctccttctctttttccctgtctctctctctctctctctctctctctgattcttgcttcccctctccctggattgcccttcatttctgttttgttttgtttttgtttggagacagagtcttgctctgtcacccaggctggagtgcagtggcaccatctcggctcactgcaacctccacctccccggttcaagcaattctcctgcctcagcctcccgagtagctgggaggatttcctttcatttctgtccttctccctgtcttggtacctctgttgctctgtatttctgattttcctggtctctggccctctttgtgtctctctcctctcgtctgtctctctagatattaatatgtccctgagctcctgggtcccacacgggtctgtttcacttccccgtgcacccaaacacgcacgcaagcacacacacacacacacacacacacgcccggtaatccctccttgtggctgggtcattgtgtctcagccataaggggccctttctttctcctcctccctcccccaaaccccctgctaggagagattaaggctacaggcctggctgaggaatcaggacaggtctcattagcttgaagagccagggatgacagcaagagagggaggggccgtctgaccctcggcgaccagtccagaggctcctgatgggagaatccagtcctggaacagaccccctggccctgcagcagggaaggaaggtcag

SEQ ID NO: 1560216 - DNA, 4001 bp, Homo sapiens
tccaacatctcaccccatttgcccgctgcacggtcctgcaggacacatggttggcctctcacccccagacctggccctcccattgggaccccgtccagacccggctcccctgcatgcaggtctcccgttccctctcgtctgtgcaggagcggctctcagagctcactgtggggggctgagcaaaacactctcggccctagagacgtcaaggcaggcgtgcgcgtacctgcacacactcccgggggctgcctgcctgggaaactcatcagtcagcccagcccagagcgtttcgttttggtggagacacaggggaaaacaaaacaaagtaccagtgacaaccgcgaacttccccctttcaaacctgggggccctggcacacagtctttcctctgcacagaggcaccccaggctaggctgggctgtgcagggcagagtagcccggggtgcttccatccccagctgccaacccccgcccagccccctccctaatccgagcgccttcccgtggcgggacggctgggtttttcccccagacaggagcctttgtaccttcctgctcagctcccacacccacgagctaccagggcctccgggagccaggaaacaccaagaaggctcctgcatgtcctggggtggggaggcagagccccacatggccttgtggaccgccccggcgcactgggccacacggtggagcgtaacggggagaagatgctggactccacctacacagacaaccctccggcccgcttcctgcaaacaatgccatccggaggccacaggaataagaaccagctgtcccaaagccattctggctcaagacgcaacagtccccgaatgtcctctcagcccccacgcccctcaacgggaaagtcttcccctaagaaagttgggagagaggagccaggcggggatcggggatcggtgaggccaccgcaggccctgctcagacatctcaccctccctccctgatccgtgcgtttccggaaaacaaagccggtggccacagcggaagggggagggggcagcgagcccagccgggagttcccaggcagtgccgcaacaggtccctgcggatcagaccaccttcctcccccccaccaccccctgctctccccctcaagagctttaggaccacaaagtgaggacggggacacagctgcgtggggaggggccaggccaagacaggaggaggcgatggggccaggtgggcaggggcctcgggaccagaacgcggggaggcgtgagggacgcgggtgagtgggcggtgggcttgagcactgggtgggggaagaaggcgggaggtggggtggggactaaaggctcagcggagggcaggagagttggagcacgacagtcaccggggtgcagagtgggggggtcactggagcggcgggggcagggtctggagtgtgagggtcactggggcggcagactcctgagtgtggaggtcagcgtggggctgtgtccggaggtcctgagcgcgggttagggcggtgggggacgctggggtcccgagtgcagggtcaacggggtgttgcggcggtggggccctgagtgtgggggtcagcttgcggggcggttagacgggttggggggcgctggggtccggagcacggggtcggcagggcgcaggagggcagtggacaccgagtgtgggggcgggggcgccgggggtcactgggggcgcccagggccagggtgcagggggcgaaggggccggggcgggcgcgcgcgtcgttaccttggctccgccgtggccgggcccgcgggcagcgtctgggcggccggcccggcctcagcagcgcagcgcggacccccgctccgggccccgcgccccctcgcgctccggctccggtgccgcttgggcccccgctccggctcccgcgccgcctgggccggcctccgcatgttcgggacgggaggcgccgggctcgccgcgctccgccgcgcccgctccggggcccgcgcgccttacgccgccagcgtctgccagcggggggcggcagccatacgcgccccactgcgcagccgcggccacggcgccgggggcgcgcgccgccgacgtcacagcgcggggcggggccaacacccggctgggcgtttctcgcgccgctttgcgacaacggatggcgccgcgcgacggccacggcgttttgcggccgctacgaggccgccgggccgctgcccgcgggggacaccgaaagcgcgtggccgcgagggcgcgcgcgggcaggaaagggggtctaacggtttccacacccttctaggggcgggccttccgccgcccgcccctccccgcccgctgttgccatggcgacgcgtggctggtcgtcctggcaccgccctgccgccgtgtgttacgtcacagtctcgccacctgacgtcacggacgggcggcgccgcgggatgttccgtgcgtggggcggtggcgggcgcggcgcggggaggcggcgggctgcgcgcgctaggccgcgaggtttccgggacaggcgctggaaggggcgactggccagaaaatgagctggttcagggcaagagggtttttccatctggctttcctgggcgaggaggggaaaacagttctagaataactgctccgtgttcagggggagaacagcggtgacgtgggtgccccgttgtcttcatccaccgtgacatcagcaaggagcagagaggaagtggccccggacccgcggccggcagctagacaaatgcactgctgggactgccatgcccagcacgggccgctcccctggggctctgcgcgtagagccgactccttgcttgtacctgcctgccttccggcctgcaccgggcaagaaacgtggggaggggatccacaggccaaggcgccgcacagtgatgccctgctccatcccatgacagggcctggaaggggactggcagctgcagaaatggtttccggccttcccacatcccccacgcacttcccggtgggggcatttttaaagtcgaaggagacacattcattcaaatatgtattaagtgcctgccagtggctctgagaatagaacagtgagctagactcttggcatcgtttcctagggagtcctcggtcctagggggaggagagagccctgtgtaatgatttcagatgatgttataaggtagggtgtggggcgggcgcggttgctcacgcctgtaatcccagcactttgtgaggctgacggaggaggaggcttcgttgagcccaggagttcaagaccagcctgagtagcagagaccctgtctctacaaaaaataaaagtagcgggacgtggtgacgcatgcctgtggccccagctacttgggatcctgaggcaggaggattgcttcaaccaggaggtcgaggctgcagtgggctgtgattgcaccactgcactctagcctgcctgacagagcaagactgtcttaataaggccaaggccgggggcggtggctcacgcctgtaatcccagcactttgagaggccgagatgggtggatcccctgaggtcaggaattggagacagcctgaccaacatggcgaaacctcgtctctactaaaaatacaaaaattaggcgggcgtgatggtgagcacctgtaatcccaactagtctggaggctgaggcaggagaatcgcttgaacctgggaggcggaggttgtagtcagccaggatcgtgccactgcactccagcccgggtgacagagcaagactccgtctcaaaaaaaaaaaaaaaactgtaaaaaagctgcgattccaggtgtaaaccaccgtggccaaccttgctttctcatttttaacccacttcaaatgtggtccacatgttcctgattcatttcagctttaatcatgaggatgtcattggggacagctggtgggggggtgagactagcccctttgagggtttttatttatttatttatttagagacagagtttcgctctgttgcccaggctggagtgcagtggcatgatctcggcacattgcaacctccgcctcacgggttcaagggat

SEQ ID NO: 1560217 - DNA, 4001 bp, Homo sapiens
ctcactccttctgtgctcctggatttcctgctcaattctcttttggggacgcctcttcatgtcctcaggtcctgcctagcacccatctctttccattttttaaagatttttaatttaatttaatttaattttttgagatggagtctggctctgttacccaggtggaatgcagtggcacaatctcggctcactgtaacctctgcctcccagggtcaagcgtttctcctgccttagccacccgagtaactgggactacaggcgtgtaccaccatgcctggctaatttttttttttttttttgtatttttagtagagatgcggtttcaccatgttggccaggctggtcttgaactcctgacctcaagtgatccgcccgcctcggcctcccaaagtgctgggattacaggcgtaagccactgtgcccagcttctttccattcttatgagcgcctctgaatcatgatattcagatgtccctcctggctggtcctccacatggctggggcaccttaaagatgttcagaccctaagcgcccagacaacctatttcttcctcgaaaggcagaaacctgttcttgcccatctgttccctctcttctgagagcagccaccacctttcatccagcccatctgcaggacaggacgtaacgtcaccctggactcatctctcctcaccccctaaatctacagtcacccagtcctggggggtccacgtcctgaggaagggagacgctcgcaggggacaaggctgcacaagttagcagagcctcataggccatgatgtggaattttaggtttattcaggaggagatgggagccttgggaggtttttgaacagtaaagtggtatgatctggcatgttttaaaaggattcctagactggtcaacatagcgagaccccatctctaaaaaaataaataaataaattagctgcacctggtggcacaggcctgtagtaccagctactcaggaagccaaggcaggaggatcacttgagcccaggaggtcaaggctgcagtgagccatgatcgcaccagtgcactccagcgtgggtgatagagtgagaccttgtctcaaataaaaaaagtgggattcgtttggctgctgtgtggggaggactgttggttgtcagggacaaggacagaaggctggaggtcagcacactagacaggagtgctggcagtagaggtgggaagaagtgaaattttggatctattttgaaggtggagcccacaggacttgtataagactgattggagtggggactggggcaacgacgagagaaagtgatgaagggtaactttgaggttctggcctgagcattggagggacggtggggccattttgtgaggtgagaagaccaggaattccatttggccacgtcaggtttgacatgcatgttaagcgtcttccctcaaagactttatggaccctcgtcactgagtcgagcgcctccaccagggccctcagagctgccctgatcctgactagctgtcactggtgacaggtctgtctctctgcttcaaggcagggacagggttggtctggtgccctcgctcccgccgccctgcgcagagtcggtgctcagtaagtatctgtaggatgagggaataataagtgctcccagaagagaggccgcggaccccagggatgcctctggattgcagccttgtcaaaaggacagataatgtgtggcatgggggcggggacaggcagatagtaacataggggcgggggcaagcagatggtcttatcctgtcttggggaagggagtggcccggtaagagacaggccggaccgcagcgttcaaagtgggaatcctggctacaaggcctcagggacacgggcgctgggaaatcacagaggccttacgctcgaagagaccctcaaccctcccacggcaccgcaacaaagagccggagtccacatgccgacccaccgcaggaggaaatactcacccgggcagaactcagtgctgggatgcccacactgcccaccacgcggaagcctggcccggaagtgactccgagactaccactcccataaggtcttggggctttcttgcctagaactcccagaagcccatgcgacacttccgctggatgcgcctacggctccggggtcccgcttggcctacaactcccagaaacacttgcattgctctttctgccgctcccaaaatacactgctccccctccccccgcgtttactttctgcgcctgcgcgcggccgcagggagcggcggagctgcgtgtactgttgtcatggcagcgcgctgtcacccggcaggttgctggatgggcgaagtagttgtattctgattaactgattttgtgggattattataggattttaaggggattacagggcctatgatttctgccctttgaggcggggttgcgggtgggaattgaaggtggaactgcaggggttggtcgctagtgtaaaaggcgcagatagcgcatgcgtagagcagacttcgaggattggagtggaactccgcgcgcacgcgggggctgtcgtgatgcgcgtgctggagacccagactctaaacagaaggatccaaagacccttctcacctaacccaggagcccagaggctcagagactcagacccttgagactaagggggttaaaaacgcagacccctggcaccaaagcacctgagagaaccagtagacctggagacaaccgtctgcaccctagacacagggatctggaggcctccaccctccccacaaggcccaagggtcttgaagaccccggtgactcaaataccggggcacaaggagtttaaggactcagatatctgagacccttgagatccaggtccccaaacctaggtcctcgaaaaaactgaggctcaaaattcctctagacggcgcggtggcttacacctgtaatcccagcactttgggaggccgaggcgggtggatcacgaggtcaaaagatggagaccatcctggccaacatggtgaaacctcatctctactaaaaatacaaaaattagctgggcgtagtggtgcgcgcctgtagtcccagctactcgggaggctgaggcaggagaatggcttgaacccagaaggcagaggttgcagtgagccgagatcgcgccactgcactccagcctggccacagagtgagactctgtctcaaaaaaaaaaaaaaaatcctctagattaagggaccaccagagccttagactgagatgtggagatgtgcagagagccccaggatgtgtaggtctacggccggtgatgacgtgagaaggaaccccatgcaccctgtagcccatttttttcccccataacaggaaaccatgatgccttcctttcatattaaatgagctccgtgaggtcactcttaagccttatcatgggccagttctgttcatctgtgtgcgttggttcatttgttgaatttatttcctgaggtctccttgtgccaggctgcccctgggctaggtttaggtgacacaaatgaatcagacttggttactgtcctctgagcatcccccaccccttacaccaccaccctgtcctcctggtgggggagacagggacttagtcaatatggagtgataaagcttgacatggaagtgttaagagccttgaaagctcaatttcaatcactgccagccagggtgtcagaaaaaaaaaaaattcaacaaaggctgctatgtgccatgcatcatctcagtttgttcatctgtgaaaggggggcaataatagcctgcctcataggatttatgcgaagtcaaattgaattaacaacacctctaaagaatttagaacagcttctggcacatagtatgtgctcaacaagtggttattattctcatctcaattctcataacattaagattatatgttacatatgagttgggtacaactgtaattcttcttcttctttttttttttttttttttgagatggagtctcactatgtcacccaggctggagtgcagtggcgcgatctcggctcactgcaacctccaccttctg

SEQ ID NO: 1560218 - DNA, 4001 bp, Homo sapiens
tcaacagaattgtgtgtggaggggaggcagctgggggttacacatcagcccccccccccaaagccggtgaaaggtgcttgtgatcttggtgtctttgcagccctgggaagctttaaaaacatgcaaaagccagacctgggttccacttccagccctaccagactctagccatgtgactgtgggcaagtcagtcactggagctgcctggccctcggtctcctggcctgtagaatagggatgctaacagggcctggctcattctcacgatcccgaagaggagacaggctataaacaggaggtgccaactcagcacgctacttggcatgcagtaagcgctcaataatagcttttattatcatgttcggctcagaggcagggaggagtggaacggcatgggagggctgcgggaggcacggcaggggggtcaggggcaagtggcaggagggcggatggggggcagcggtgggcaccggggcagggcgcgctgacctgtcctggggcccgggttgggggcagaaatgagcctgcccacgctgtcccgccacggcaggcgccacgcatcctcgacacagccgccatggcaggccttcgggctccgtctccgggacaggcggtgcagggcaaattggtatgcagcgtccgccccgtgggcccgggagagcctgccccgcagggaccagagcccaaggacgggctcaacactcagtcaaggtggggttgacgacggccagacaacaggggagggaggagggacaagggggtccccacttccagggacgcacaatagcagagccacttacacgctggggagggggcggtgcgggggtcctcctcccgcccgggattcagagtcgggggtgggggccagccgggcgggtgagatgcgcagagaggaagggacagggcggataaaggcacgaggtggggctccggccaggccaggaagggacatgggaggggtctcgagggggaggggctgggcttctcccaactccctccccctctcccccgggctgggggctccggggcgggatcctgagcgcagtcctggccccgcggcgccccccgccgggccggccctctgagaccccggcgcagggccggctagggggcgccgcgcccctcacaccaacgcgtagtcgaactgcccgcgctcgagcgcctccttgtggtcggtccaggacgaggcgggcatgcggctgtaggggtcgagcaggatgcgcacgcagcgcaccatcaacagcaccagcaccacgagcaggcagagcacgaaggcgaacaccgtgcgctgctccgcgtccaggcccgcgcccaccgggggccccgtcgacggcggcaggggctccggcgacagcgtccacgtcgcgctcatggctcacatcgccgcgcgccctgcggaggaggggacccgccccgggcgccggggatgaggctgcgccctccctcccgcgcctcctccgcttcgccccctcctgccgccgccgccgccgcctcccttaacgtgcccgaccccatcccccgcccgcgcctcggtccccgggctacgcccatgcccggcccgccggatcgccgccaccaccacgcggggacccaactctggccgtgcgcgcaggtgggggcgctgagagccgggaaacggagccgcgcccggcctgggccgcacacaacaggtgcgaaagcgcggccgcggcccgggcgcgcggcgtggggacggtccccgcggcccctgcccccgctccctttgttctcggcggcctgggaccccctcccccaccgcccccgccccggcgcgcccctcaccctggcttcgacccggacggggaccgaccgcccggcggccgcgctctctcagggacccgcgccggctgcgcgttcggcctctccccggcggcggcggcggcggcccgggctccggctcagcccaccccacccgcccctggagcggcggagaccgaggcaggcaagcagcgcgcgagccgggccgccgcggctgttcctatggcgacgggggcggggccgccgcggggggcggggctgcagggggcggaggctgcgcagggagcggcgcgcgagccagcgaccccgcccgggcctgcgggaggacggaaccccagccccgaggacccgcgagcacccacgacctcgccggggagtgggcagctgccactcccacctcccctggcacttcgggccccccagcctgccctgtgcctgcattctcctccgcgatagaccccactcgagactccctgtttgtggggggacctcagtggccctaaaacactcatatgggcactcaagctcccccggccctggggacctcaattctcagagagctcaggcaggtcactgggatgagtaagtccccctagttttgtctgtcactggcctcgtcttccaactcagggtccagccctgggcaaggcgtccacccactgcggctgcagttcctcactcgaccttgaccgcctcccacagcagccgcctgctcccacccccaccatcgcctcggccactcccgcgccagagaagacacttcagactccgtagctgctcttctgcaattcggtgttttattctttccaaatctcaggcttatgcacaagatggaagagcactgttaaaattaaaaaatggacctaaagtggcttggctgacgtggctagcgggccactgagccgcgggtcccgggtcccaccctgctgtggggggagtccctgggccctggggcctcttggcactgtgtgacctgtgtgcaccccaggtgaccaggcgccgggacccctgcagggcagagcaacagggcaggggttggccctgcgggggagtgtctccagctgccgcgcacccgcaacagcccgttgtcccctcccgggccagctggtcttgcagccgtcctggcagagctgggggcagagcccgcagtcttgttcccagaggtctggagttgccgcaggtggtgttgcggtgcctctgtgcctgatgacccaggccggggctacctggctccggcaccacactcagagaatctgctcggtgctggaggccgagatgtccaggagccgccaggccgcgtaggggttgagctcgtcctggtctcggcagagcgcccacacgtacagcatccgcagcaccttgtcctgcagggtggggtgggaagggcactgttgagagggttgaggtgacccaggcagctctgggggggggccaggctctgtggggcaggagccaccggcaacttccccaggggctgggagcagaggccagcacaattgcctagactcaggaaccactcagccttggtaaaaacagacaggtctgctggtctccgacctccctcaaccccaaactctggcccagaggtttctccacatccccacccagtcccagagcttcagggctctgagctggggtctctgccaggtggccacacacagatcttggggacaggcggtgtcatgtgcctgccccatcccactccctcactcaccgggtcaccctccaccacctcgcctttggggttcctgaccaccatcaccagctgtgcctggaaggtgatgatcagcaccggcccctgctccatcatcttgcccatggccagctgcagaggggccgagaggggggatgtgcctcagaggacagcccggctgctcccctggaggtgaaacccctgcgcctaggccctgctaggagaaggctccagcaccaggcccagcaccggtccctccccgtgggccttgcctctcaggccaggaccaggcctccctcgagaccctccccttggacaagcccaagacctcttggatcagcccatggcccccagcccctggcaaggccacctcctgggccttgtctgggccatagttcccacccccgatggtggcccgggcccccactgcgaggtgcttacgtcgacgttgtcaatgtctaggatgcgagaatggaactggagacccagtgccttggcctgctggatggggtgggccagctggctgtaagtc

SEQ ID NO: 1560219 - DNA, 4001 bp, Homo sapiens
aatacacagaacagcccccaccgcaaggaactgttcagcccaaatgtcagtagagctgctatgaagccctggtttgatttagcaacctgaggatgcattcttgcagttagctaatgtttgctgagtactgagctggatagcgtgagggatatggaaacagtgcaccagtctgtgtcaccaagtagtttgcagcctagaaggacagggggtgggggcaggaaaggcacatgaaggccctcaatataaggcagcagatgataagtgcaagaagagagtgtccagcagggctaagccagcgctcaggagggagaccacatgtctggctgtgggaggaactgaaggaagctgtgggaaggtggttttgagctgggtgtgtgagcaaagttgaactggtggaaaaacacaatacctgttcagggaagggcaaacaggttagtttggttggagaaatagtatttttagtgagtagagggaggtacactagaaaggcaggttggggctacagctttgaatccaggcagaggactctagcctgggtgtctgtcatagtgatggaaaagtcttccctttcagaacagtggtctaggccctagggctatggggcttaacagcttccagagcactctctctacaaaggaggggatgttggaaattggggtggagaagggagaatgcctcctgattttaggaccaagttgatgctgagtatgtaacatagccatttcacctcaaagtggcctttggggagatggtgctcacaagcggaaatatacatggggatcaggtcttttctgcgtggttgctctgtgcagggctgggccactttatagtgaaagctggagcagatttggaacccctaagctaaagtcggcttcccaaaatgtgagctgttacagcagggcttgctatggataaagcttcaaatatggacactacctggtgacaggctttttctagtttattacgttaccagtaaatagcattaagacatgttggtggcattccagtgcactgtaaagaatagaagcaaggacttcctgatcttctataaaggtaccattgccttcaacactctcccaccatcatcattaagtttagccatgagaattatgttactcttttggaaaagtgttgggggagaaggcatgggagcaaatctttgttgagctagtatatacatacatacgtacgtgtgtgtgagggggatcagctacaattgcagatatcttcttttcttttctttccttttttttttttttttttttttgagatggagtctcactctgtcacccaggctggagtacagtggtgccgtctcggctcactgcagcctccacctcctgggttccagcaattctctggcctcagcctcctgagtagctgggactacaggtgcgtgccaccaggtctggctaattttttgtatttttagtagagatggagtttcaccgtgttagccaggatggtctcgatctcctgaccttgtaatccgccctgccttggcctcccaaagtgctgggattacaggagtgagccaccgcgcccggccagttgcagatattttcacatacaatatctcgtttaactctctcaacattgtttgggtgtaagtacagtttgctgtttttttgtaaaggaggaaactggcattgagaaaggctcacttgccccatcccccatagctaagagaagctgcattttgatgtgtctgtggcctgttttgccacatttctccccccgttttccccttcatagacagtcttgtttacctggattcaggctgctagagaccatggacatcagcattagtggcagcaacaggaggagggaagagattagaactttcatcgcaactgtcggtgcagctgtaagttgcttgaagaatataatggaaggttccctgctggaggctcctgatccctggggatgactcaggtcaggatactcagcctggtggtctatgctttagtcccaggccagcgttcccatttgagggcgagaacaggtgaggtgacgctgtcttgctgttacgtaacagattagaccatgtgctttatgggaatctgggaggtgaaactggtcaaacaaaagaaattcagcattcttaagaacataagaaggtgactgataacttggcagctgtgccagttctctcctgtactctttcccgcctcctcacaccccaatgcctcatgatttcttcctcaaatctttttttcttgcttggatttccttatacctttcaatgaccctctctatctgaatatttggcaggaaagtggatactaagtgttggtagaagagactttgacaaggtctgtttcccctctgtgctcctgctcccatccttggcaaaatatcggcaatagtagtgttgttgcctgggaagttgccctgtcctctctctgttcacaattccctccaattctgcagccacataagatggcagcagagcaggatccgggacaagaggcagctcccctgccgagaacaccgcccctggagcagtgggtgacaccaggcctccttgtgtgtccatcgggaaggtggccatggcttagttgttctggtctaaaggggagggaactgggttgggggaagagacccccagagctttaggtctcagagggtttgagaaacaggagccacaggagggaaggagccctgaagtgtgtttgcccagctgctggggcgcctggctccagcccttgtttggaaatggccccgggcaaaagaagaaaggtaataatacttgaagtaaacattaggggcatagaatatcagcactcactaaacttgacatttatttgagactttaggaaatgtgctcaaagggagaggagaggctgggcttgaatgctgggtgatattcatgggggctgaagggaaggctaacaagggagccctttttttggaagcctccaggcaggagtgagagcagggggtgtgactttatttccctgagagaaggaaagaggaaaggcatgagtcaaagccctttggttttgtttgaccattcttttttctccacgttttcaaattatctcggcctgttgacttgtcacagagttgattgtggactttgctactgcagtgtttataaagcactgcaggggccagggactgctatgactgagcctgtgtccaagttgaaggctcagggtgggcctaagcttgttctgatgcaaatcactgatgtggcttctttctggaaaattctaaaaccagggagatgacatccatttcataaagcctagagatatgggtgcagtcatctctcaaagtggcaggagtgcagggggactgagagggacttggttgggtggaacttgagctggagttgggggaggatttgggttggtggagggcagagaggagggccgtgcagagcaggggcgtgttgtaggagaggtgcctcctggagctcattggatggggattttagaggacaggagctgttcgtgttcatttttgtattgcttgaacttacacagggtctggcactttgggagtattctataaatgactgttgaatggaatgattgttttgtagcccattaactgggcctgatgtattagaaagtgtgcgaaaatgtagcccattagcagaaagaaaatcttactgaaaaaccatcccatgtacaaatggagcctggtgcggccactttacttatgctgctgagttctgcatcagtccacacccaggccaccgcaggggccgggagctcctcctcagacctacctcccgtgcctcagtctctttacccctctgttcttccaggtcctgctccctctggtttcccctccatgcacttggggtgggtgttgcatcctgtgtcccattggagggggcttccggtctgttaggtctattaatataaaacacccccaagacaaatggacttttttcttgttaacatcacaacttcttatgatgcatctcaagaacattatttgtgtcaagagtctctctgatgtacagaggccctccattcctcagg

SEQ ID NO: 1560220 - DNA, 4001 bp, Homo sapiens
cattggagactgtgcggctcaggaagaaggtgggatcgatattggcgcctgcaggtgtggcgggagaagggggttggggagagagtcaactcagaggtctgaggagagtcagaattccaggaggcagggccctgttgagccgaatcccagcgccagactccagggctggaagtgcgggcccctttccccacctagtccccatccccaggcagaaagcgcgggttcccgccctcgcactcggggtcccctactcaccgtgcgtgccccggagggcgtcgatgaggaagcccgcctcctcctggatgcgttcctcgatgccgcgcttgcccacgccaaaaccccttagggtggcgatggagaagcgccggagctgcttggcgcgctccccgttgctgaacgccacgcctggggaggtgaacgcgggggtggagagaggtcagggggcggcgggagcaggagcggaccagctccaaggggctccccaagggtggagcagagagggagtggggtgggagagagatggattcagcgcgagtgcccaggagagctgcaaactcagtcagagaaacacgagagcacgagagagagagagagagagagagagagagagagagagagagagagagagagagagagagagagagagaccgggtagaaagaataagagaatcagaagagaagcagaaaggccagacagacagatgcagagaaacagagggatacggggatactccatggaggaagggaaggaagtggggagagaaagagagagatggagggaggggaagtgagatatggggagatctgggaggaggaaataaaaatggtgaaagattcttaagctgaactggagaagagagaaaaatatggagacagaaacagagaggatcgggaaggaggacagacaattaccaggagttggaggctggagatgtggaagtaggaataccctgaaatcctaagacagaggaagaagtgggagagggaagcagagagaggagaaacacggagaagcacagaagccgagagcgacaaaaagacaaatgaagacagaggaccagggctggaaaacagaaacccaggatgtcctcagagatggagagagaggggaaagaggagactccagtgagagagaaggaggagacggggcagagagaggcagggaggaatcacgacagggacgctggagacaggtgagggacgcacagggagaggccacgatgaagggagatggggagagaagaccagacagggggctctgccatagcctccagtgggcaggagagtcagggagaaggctggggacacggagaccattgcatccacctggccaccttccccctcttgggcaccccctcaccatagcctttgaagagccagtcgaaggtggcctgctcgcctcgcccgctgaactcctcagcctggtccaccagagcctccttgacggcatcatgtccgcacagcaccacgacccgccggggccccaagtgaatggtgaacacagggccatagcgctcactgatctgttggaggcaggtgggagtggttagagggagcagcccccactctgaatgggcccagcactgagatatcatgtactgggatgcttcgcccccaggttctcacagtcagggagctggacatcccaagatcctgtctttcctgctaggaccctgatgctgaaactccaagactccctttcctaagactctggtccacactggtcaatcccctgccacaaagccccagccaactgggcagcccccaccccgtgccacccatctccctgccttaggacaccttcatgagggagttgtacatctgctctgtgttcagctgcaggtagtttccaatgaagggcaatggggtgggtcccggaggcagcttccccctgctcttcctctgccgccagactgacatcaagaccatcacagtcaggcaggccagcaaggtcaccagaagcagccctgaggccagcatggtggcagtgggatgatagatggtgatggctggggtggtttgcctttatactgcctgaaaaagagggatggactttggttgattatataatcacctcatttcacctcccaactacaccccaaccctgaatcccacacagcttaggacacagccagcaagggaggaggagagggaccccagggaagctgaacagggaggggaactccagactaaatctggtacttcaggagggttgctgcagggctgtggatttaggagcgggcaacagataaactgtggaactgaggagtttggaatatttgcacaggggagcacctggactttggatttgggatctgggagtgagaatgcaccccaaagttgtggatttgggcattccacgggagaggaatccaaaggtctgggttttactagggtgagatggaagtgtggctgtgcatctgggggtcttctgttgtggaggatgcagggttaagggtctcaggacgggggattccaggcatatggacttgaaagtcttggggctaggaagacccagggctgtgggtgtggagtttctgggaggtggagtgtgtagcaagcccagcaggtgctcccagaaagcccagcagcccagcactgggcccagggactgacttgattttgctttgacccagagctgtctcttgatgcccagaatcctcattggaacctcagagtgaggccaggatgggtgccatagaacctccgctgcccatctctggctgggaaaggggcagaagacgagagccatatttcagaggaactttccccacacgtggagaagagtacctcatgttaccagttggcagaggggattggctaggtctggagaaatagtaataacaaccctcaaatgctggaaaaatctcaagtgtcccaagggttgtaatttacgaagaactccactggtttccaacccagattcttagggaaacccactagattgattgtatcatccctattaatactatgattgttatttatgtttctcattttatataaagatctacagaggacagaaaacagacagtgggcaggggacatgtgtgagtggccctgaactcccatctctcttgctctgcgtctttagttccactttctggatttggttttcctgccagtggaaagggagtgtttgggaagagaagaccacgtttgagggtgagttaagtctcctttaagggcgattcctgctttgtcaggggctactactattagtaggcagagggaacaatcgcagaagagattggggtaaactccagtattaggcacagaggcagatcctggggtgggtgtgagtggagaagggatgagtagccctcctgtccttccctcaaggaaattcttccttagtaaacaggacagttaccctttggtgagcatggtcatatatgggaagattaagtctaggtgtgtatgatctggttgaatctttgtaacagtgaggttggttcatcatgatcatcctcattttgaagatgagcagatctagactccataaatcctcttgagtgaggtcacacagggagtaagtgagggagctgggatgtgaactttctcctcgccccccttcattgactggcctagatcaccctgggagtcaagtgcaggccaggcttagcaggaggtgagtgctgggactggcatcagcagtggacacactgatgacattggcgggttctgatatcagcatcaggtgtgtccagggagggaaaggcatcgtgttggctttgggactgcccccaggtgtatgcgaggatgggaaacaagttggcactgaacttgacaccaggagaatattgaagtcatgtttggtgccaagagggctctgtgtgttgtctcaggtgtcattgagggcataagagagtcctgcttcaggagggcataagagtggcaccatatagggtctgaggttggtcccagtgggctctgacatgagcatgaggcaggtgttgatattggtcctatgtgggtctgagatgagcctcagccagaccctg

SEQ ID NO: 1560221 - DNA, 4001 bp, Homo sapiens
ccaggaggcagggccttgttgagccaaattcccagcgccagactccagggctggaagtgcgggcgcctttccccacctagtccccatccccaggcagaacgcgcgcgggttcctcgtcctgggtgttttccttctcctgcccccgcactcggggtcccctgctcaccgccagtgccccggagggcgtcgatgaggaagcccgcctcctcctggatgcgctcctcgatgcctcgcttgcccaccccgaagtcccgcagggtggcgatggagaagcgccggagctgcttggcgcgctccccgttgctgaataccacgcctggggaggtgaacgcgggaatggagacaggccagggggcggcaggggcaggagcggagcagctccaaggggctccccaagggtggaggagagagggagtagggtgggagagagatggattcagcgccattgcccagcagagctgcaaactcagtcagagaaacacgatgtcgaggtagagagagagagagagagagagagagagagagagagaagagagagaggagagagagagagagagagagagaagagagagaggagagagagagagaagagagagaggagagagagagagagagagagagagagagagagagagagagagaccaggtttaaagaataagacaatcagaaaagaaacagaaaggccagacagagagatgcacatagaaacagagggataaggggacactccatggaggaagggaaggaagtggggagagaaagagagtgatggaggaagaggatggagggaggggaagtgagatatggggagatctgggaggaggaaataaaaatggtgaaagattcttaagctgagctggagaagagagaaaaatattgagatagaaacagagagggtctggaaggaagagagactgttaccaggagatggaggctgaagatgtggaagtaggaataccctgaaatcctaagacagaggaagaagtgagaaagggatgcggagagatgagaaacacagagaagcccagaagctaagagggacaaaaagacaaatgaagacagagaaccagggctggaaaacagaaacccaggatgtccttagagatggagagagaggggaaagaggagactccagtgagagagaataaggaggtggggcagagagaggcagggaggaatcaggacagggacgctggagacaggtgagggatacacatggagaggccacaatgaagggagatggggagggaagaccagactggggactctgccttagcctccagttggcaggagagtcagggagaaggctgggaacactgagaccttcgtgtccacctggccaccttccccctcttgggcaccccctcaccatagcctttgaagacccagtcgaaggtggcttgctcgcctcgcccgctgaactcctcagcctggtccaccagagcctccctgacggcatcatgtccacacagcaccacgacccgccggggccccaagtgaatggtgaacacggggccatagcgctcactgatctgatggaggtgggtgggagtggttagagggagaagcctccactctgaatggggcccagcaccgagatgtcatgtgctgggatgcttcgcacccaggttctcacagtcagggagctggacatcccaagatcctgtctttctgatgctgaaactccaaaactccatttcctaagactctggtccacactggtcaaccccctgccacaaagccccagccaactaggcagcccccaccccgtgccacccatctccctgccttgggacaccttcatgagggagttgtacatctgctctgtgttcagctgcaggtagtttccaatgaagggcaatggggtgggtcccggaggcagcttccccttgctcttcctctgctgccaaacagacatcaagaccattacagtcaggcagaccagcaaggccaccagaagcatccctgaggccagcatggtggtagtgggatgatagatggtgacggctggggtggtttgcctttatactgcctgaaaaagagggatggactttggctgattacataattacctcatttcacctcccaactacatgccccaccatgaatcctgcctagcttgggacacagccagcaagggaggataaggggaccccagggcagctgaacagagagggggcctccagactaaatctgtggtacttcaggaggggtgccgcagggctgtggatttaggagggggcaacagataagctgtagaactgaggagtttggaatatttgcataggggagcacttgggctttggatttggggtctgagagtgagaatgcaccccaaagttgtggatctgggggttccaggggagaggaatccaaaggtctgggttttattagggtaagacaaagtgtggctgtgcatttaggggtcttctgttgtggaggatgcagggttaagggtctcaggaagggggattccaggcatatggacttgaaagtctcggggctaggaagacccagggctgtgggtgtggagtttctgggaggaggagtgtgtagcaagcccagcgggttctcccagaaagcccagcagcccagcactgggtccaggggctgacttgattttgcttttgcccagagctgtctcttgatgcccagaatcctcattggaacctcagagtgaggccaggatgggtgccatagaacctccactgcccatctctgattgggaaggggaggaagaccagagccatatttcaggggaactttccccacacctggagaagagtacctggagttagcggttggcagagggattggctaggtctggagaaatagtaataacaacccccaaatggtggaaaaatctcaagtgtcccaagggttgtccgctggtttccaacccagatcctcagggaaacccactagattgattgtatcatccctattaatattatgattgttgtttatgtttctcattttatataaagatctacagaggacagaaaacagacagtgggcaggggacatgtgtgagtggccctgaactcccatctctcctgctctgtgtacttagttcccctttctggatttggttttcctgccagtggaaagggagtgtttgggaagagaagatcacattcgagggtgagttaagtctcctttaagaatgattcctgctttgtcaggggctactactattagcaggcagagggaacagtggcagaagagattggggtaaactccagtattaggcacagaggcagatcctggggtgggtgtgagtggagaagggatgagtagccctcctgtccttccctcagggaaattcttccttagtaaacaggacagttaccctttggtgagcatggtcgtatacgggaagattaagtctaggtgtgtatgatctggttgaatctttgtaacaatgaggttggttcatcatgatcatcctcattttgaagatgagcagatctagactccataaatcctcttgagtgaggtcacacagggagtaagtgagggagctgggatgtgaactttctcctcaccccccttcattgactggcctagatcaccctgggagtcaagtgcaggccagccttagcaggaggtgagtgctgggactggcatcagcagtggacacactgatgacattggtgggttctgatatcagcatcaggtatggccagggagggaaaggcatcgtgttggctttgggactgcccccaggtgtatgcgaggatgggaaacaagttggcactgaacttgacaccaggagaatattgaagtcatgtttggtgccaagagggctctgtgtgttgtctcaggtgtcattgagggcataagagtgtcctgcttcaggagggcgtaagggtggcaccatatagggtctgaggttggtcccagtgggctgtgacatgagcatgaggcaggtgctgatattggtcctatgtgggtctgagatgagcctcagccagaccctgagaggggccccagatgg

SEQ ID NO: 1560222 - DNA, 4001 bp, Homo sapiens
tgccagtgcccaggacaggtgcaaactcagtcagagaaacacgagggagagagagagagagagagagagagagagagagagagagagagagagagagagagagagagagaccgggtagaaagaataagagaatcagaagagaaacagaaaggccagatagagatgcgcagagaaacagagggataaggggatactccatggaggaagggtaggaagtggggagagaaagagagagatggaggaagaggatggagggaggggaagtgagatatggggagatctgggaggaggaaataaaaatggtgaaacattcttaagctgagctggagaagagagaaaaatactgagacagaaacagagagggtctggaaggaagagagactgttaccaggagatggaggctggagatgtggaagtaagaatagcatgaaatcctaagggagaggaaaaagtgagagagggaagtggagagaggagaaacatggagaagcacagaagctgagagcaacaaaaagacaaatgaagacagaggaccagggctggaaaacagaaacccaggatgtcctcagagatggagagagaggggaaagaggagactccagtgagagagaataaggaggtggggcagagagaggcagggaggaatcacgacagggacgctggagacaggtgagggatacacatggagaggccacagtgaagggagatggggagataagaccagaccgggggttctgccatagcctccagtgggcaggagagtcagggagaaggctggcaacactgagaccatcgtgtccgcctggccaccttccccatcttgggcaccccctcaccatagcctttgaagacccagtcgaaggtggcttgctcgcctcgcccgctgaactcctcagcctggtccaccagagcctccctgacggcatcatgtccacacagcaccacgacccgccggggccccaagtgaatggtgaacacggggccatagcactcactgaactgatggaggcgagtgggagtggttagagggagcagcccccactctgaatggggcccagcaccgagatgtcaagtactgggatccttcacccccaggttctcacagtcagggagctggacatcccaagatcctgtctttcctggctaggacccggatgctgaaactccaaaactccctttcctaagactctggtccacactggtcaatcccctgccacaaagccccagccaactaggcagcccccaccctgtgccacccatcttcctgccttgggacaccttcatgatggagtcacatatgtgctctgtgttcagctggaggtagtttccaatgaagggcagtggggtgggtcccggaggcagcttccccctgctcttcctctgctgccagacagacatcaagaccatcacagtcaggcaggccagcaaggccaccagaagcagccctgaggccagcatggtggtagtgagatgacagatggtgatgggtggggtggtttgcctttatactgcctgaaaaagagggatggactttggctaattacataatcaccttatttcacctcccaactacacgccccaccatgaatgccacctagcttgggacacagccagcaagggaggataaggggaccccagggcagctgaacagagagggggcctccagactaaatctgtggtacttcaggaggggtgccgcagggctgtggatttaggagggggcaaccgataaactgtagaactgaagagtttggaatatttgcataggggagcacttgggctttggatttggggtctgagagtgagaatgcaccccaaagttgtggatttgggcattccaagggagaggaatccaaaggtctgggttttattagggtgagatggaagtgtggctgtgcatctggaggtcttctgttgcggaggatgcagggttaagggtctcaggaggggggactccaggcatatggacttgaaagtctcggggctaggaagacccagggctgtgggtgtggagtttctgggaggaggagtgtgtagcaagccagcaggtgctcccagaaagcccagcagcccagcaatgggcccaggggctgacttgattttgcttttgcccagagctatctcttgatgcccagaatcctcattggaacctcagagtgaggccaggatgggtgccatggaacctccactgcccatctctggttgggaaaggggtggaagaccagggccatatttcaggggaactttccccacacctggagaagagtacctggagttagcggttggcagagggattggctaggtctggagaaatagtaataacaacccccaaatggtggaaaaatctcaagtgtcccaagggttgtccgctggtttccaacccagatcctcagggaaacccactagattgattgtatcatccctattaatattatgattgttgtttatgtttctcattttatataaagatctacagaggacagaaaacagacagtgggcaggggacatgtgtgagtggccctgaactcccatctctcctgctctgtgtacttagttcccctttctggatttggttttcctgccagtggaaagggagtgtttgggaagagaagatcacatttgagggtgagttaagtctcctttaagggcgattcctgctttgtcaggggctactactattagcaggcagagggaacagtcgcagaagagattggggtaaactccagtgttaggcacagaggcagatcctggggtgggtgtgagtggagaagggatgagtagccctcctgtccttccttcagggaaattcttccttagtaaacaggacagttaccctttggtgagcatggtcatatatgggaagattaagtctaggtgtgtatgatctggttgaatctttgtaacagtgaggttggttcatcgtgatcatcctcattttgaagatgagcagatctagactccataaaccctcttgagtgaggtcacacagggagtaagtgagggagctgggatgtgaactttctcctcgccccccttcattgactggcctagatcaccctgggagtcaagtgcgggccagccttagcaggaggtgagtgctgagactggcatcagcagtggacacactgatgacattggcgggttctgatatcagcatcaggtatggccagggagggaaaggcatcgtgttggctttgggactgcccccaggtgtatgcgaggatgggaaacaagttggcactgaacttgacaccaggagaatattgaagtcatgtttggtgccaagagggctctgtgtgttgtctcaggtgtcattgagggcataagagtgtcctgcttcaggagggcataagggtggcaccatatagggtctgaggttggtcccagtgggctctgacatgagcatgaggcaggtgctgatattggtcctatgtgggtctgagatgagcctcagccagaccctgagaggggccccagatggccacaggacaggctctggtggttggaccatttagggttgcacctgtcctctgggtcaccaactttggacaagtggaggtgggtgaggttggcacccccaggactgacatcttgctcaaactgttctaggatgctgagctctgagacctgtgtggagggaacaaaggtcagagaacaaggcagagagaggaaagttgtttgttgattttggaggggaagaggtggaaaggaagattagcaccagcttggcagatatcaatccctctaatcctgttcaccagcctgcacctgggcctggctcctccttttccttcttgtttcttaaaaaggtgggagacagaaatctgaggagtttgtttctcagtggggttggcactaagaagtgcactgagtgatcagcaggttgccatgacctggccagggaggggatggggagagacaggttgggagaactctagtatttgtggacatagaggtcaatgaattttggacttgttgattaccctagagcatggagtgag

SEQ ID NO: 1560223 - DNA, 4001 bp, Homo sapiens
agtctcaggtatgtctttataacagtgtgagaatggactaacacagcaagcctggctatcccaaacttttctactcttaatgtttcttctagtgggtctccaggatactatatgttaccaggccaactacaaatgaatgtctctataaatcaagttattttatagcaagctctggtccttaattaccatcatgccctgaacaaaatctatgaccaattggactctaatactattgaactatctttattgtctgaacttcgaattattcgattttgatcagtttggttcatggacacactcaagttaaaagagactattaacagcctttcttctctctgtggacagtggaccttatctatacccccaagtccacattcctcaaagtttattacaggcccagtgacttcattttcttcgtattaccctcctgagagccatcataacagtctccctgatgtgttgtattttctcaagagtcttggccgggtgcggtggctcacacatgtaatcctagcactttgggaggccgaggcaggtggattgcttgagcccaggagtttaagaccagtctgggcaacatggcaaaaccctgtctctacaaaaaatacaaaaattagctgggcgtggtggcatgcacctgtagttccagctacttggggggctgaggcaggaggatcacttgagccttgggaggtcaaggctgcagtgagacgtgatcatgccacagcacttcagcctggctgacagagtgaggccctgtctcagaaaaaaaaagagtcttaaatgctcatatgcagccattctttgtacatccagtgggctcattacagtgggaacaacaaaaacatgaagaaaaggtaaagaatcactcaactacgttgacattgtccattgtgaattccatactgagagcagacaagtccattatgatggtgacagaagtaatgttgatgcccaaggttttggtcaatctcaaaattttgaggctgaccaaaaggggagaattgtttaattaaattaaatttgacctaaagctctctctgtagagtgaactgcaacctaacttgggagtatattcttttttttttttttttttttgagaaggagtctcactctgtcacccaggatggagtgcagtggtaagattttggctcactgcaacctctgcctcctggattcaagtgattctccttcctcagcctcctgggtagctgagattacaggcacgcatcactatgcccagctaatatttgtatttttagtagagacaaggtttcaccatgttggccaggctggtctcgaactcctgacctcaggtgatccaccacctcggcctccaaaagcactgggattacaggcatgagccactgcacctggcccaaatgaatatattcttgtgacaagtagccaagtgttggctaatcagagcagctgggctttcagtccacacaggctgcaaactgctcagattgtgaccaagtaaggcaagctgtgatctgtggccaatcaggctgtttctgtatgtcacctcctttttctgcctgtaaataccacttgaccatactgccgtgtggtgtctttcctggtttagggagctgtccaactcatgagtcacttctttgctcaaataaactctgctaaatttaatttgatgcttttctcctaataataccacccatcatgcttcaccatgctccgtactcaccaaccatgcccgtgccacccctgactctggaagtctgcctcattctgtttggtgaagcttccccaagtaccaaggcaagaagcagctcaccctcagaccccattcgtctgtgtcttaccctcagaaaggatttgagtaggcctcttctatccatctgcagaaggtttcccaaaaggggcagagggcggggccctggtgggaggcggtcatgggtgttagggtggcgctgaaccaggagtagcaagagtcctgtgaggagtgcaaggaagaggaggacgctgagttccatggtcctggtctgactgccctgcaccctgctgcagcctccaactgggccttttatcctgaccctgcctctgcaccctgttataaaatttcatccattccccacctcctttttcatcatcatccaggagcattagcttagaaaaagttgttagggaacccagacttcctgcttgggcaacccagtgacctgatgcctatccctttacccactctgtagatattggcagggatacagtggtagagatatcaaagtccaggtgagcaagtgaatgtgtgggtgtgtgggtttgtgggtatatgtatgtctatttttgtaagcataggtgagcttgcacttttttacttagctttgtctgtttgtctgtgcttgcatgcatttgtccatgcctgcttgcatccctgtatgtgcttatatgatttttacatgtaaaggggtgtttgaatttatgcaaatgtactggcgtatatttctgtggttgaatctgggggtgcttatgtgtgtatccttgcatgtgtatgagcttccttgtatttatacagttttatatacgaaagtgcatttacatttgtgtgttgtggaggtggtggtagtgcatgttcaaaactgagaggctggctgggtgcggtggctcacacctgtaatcccagcacgttgggaagctgaggggggcagatcaattgaggtcaagagttcgagaccatcctggcccacatggcaaaaccccatctgtactaaaaacacaaaaattaaccgggcgtgatggtgggtacttttaatcccagctactcgggaggctgaggcaagagaatcacttgaacctgggaggtggaggctgcagtgagccaagattacaccactgcactccagcctgggtgacacagcaatactccatctcaaaaaaaaaaaaaaaaaaaaaaaaaggagaagctgatgaaaataaggaattattcaattcaatcaaatttggcctactgcctttgtagcatagcaaactgtaacctagcaatacatgaaccaattgtgtgtatctgtgtgtgctggtgtatttgtgctggtgtgttggtggatctcctagcccctctctttggaagcctgcagatgctgagtctatctccagtgtcccctccttcatccgcccttctgtgacagccacaggtggaagtggtcggagaaacagaaggaggagcaagagatgcagaactggtgagtctcagaggaagaggtggtcagttggaaggagacagaaactgagacctggcaggtacagcgatcaggtcctcttggtttctgatcactctaactagtgctaaggagtttcttccctgcctctgactatcttcacggtgcaggaaatttctctggctctctctctgtctgactttgtgtctctgttttccccctggagactcttgagctccaggtgtgtgcaaactgagtccagtttgattgatgtctactggactcccatatgtctctatcctcactgtgcaccttcacccacacatcctctgacagggtcagtccatctttgcaaaacgtgggtgtgaatgtgtgcgtgtctgcctgtctcatcctacgcctgacttttgaccatgaggcaacatctttcttgcaatgttaagcaaaccctttgctggatccaggacctgaacccgaagttactttgacccaggaggagcagacaaacagtcctatttgtaagaggtggaaactgtactttcctgaccctgaagaggtggcagcatggactttcctgaaccaagggcctcggtcttgctgtgctgtgtcatctgacactaagattgggtgctcattgcagccccagggtgaagcaccgatggggaggcgtgaagtgctttacacacagtaactcagtctttacactcttagtgaggtattgttgccatccccattttatagatggagatattgaagcaatgacagtttgcaagtcttacccaaggtcatacagtgggttggggctacattgtccaatgtgatagtcac

SEQ ID NO: 1560224 - DNA, 4001 bp, Homo sapiens
gtaggaagacagaagttacaggggggcctgtggccatgggacccctcctccttatccttccaccatcacccaagctaagggccttgcaccttagtgagagaagtcagcatgtcttgggagcaaagcagcagcaggtttcccaggattgagaggggtctgggtcccggaggcagctttcccttatctcttgagcttagggtcaggagcagacagacgagagccaggagcaggagtaagatggctgtgcttatgctgtccatggtgaaggcagctgctggcgtgtggagggcaaagtgggagaggacatcgctgatccctcctttccatctcccctgggacttaccttccctaggccctggaaatgaaggcagatggagagaaggagacagggagaggccaggggatggggaagggagggagaaaggaggaaagaggcagagatagtcaacatatagacagataaggagacagaaacacagagacataaatggagagaggcaagtgatagaggaacagagactaagagaggccaagagatatgcataaagataatgagagagacagaaaaacagtgagcgatctacatatctacagatgtctgtctacctatcagccatctatcatctatcactctttctttccttccttccttcctttctttttctttctttcttttttctttttctttctttctttgtttctcatctattatctaacatctatcaacatctatctatcatctatctatctatctatcatctatcatctgtctatccatcatctatctattcttctatcatctatcattgatctgtctattatctatcatctattatctatctatatctatcatctatctactatcttcataatctatcatctgtgtatcatctgtctattatctatctatcatcacctgtctgtcaagagactgtcatacagagacagtgataaagagagatcaagacacacagggacagagacagacaaacacagagatagggagagccagagagcacatcacagaaagagagaggctgacatagactagagaaagaaagagacagaactagacagacacagagctagagaaagacaagggagattgagtggagagacagtgagatggacactgactgagagacagagagggacatggaaggatggagagaaaaagggtaagagggacagagagagggagagacagagctagacacagagactgagggagacgagaatgacagacagaaacagatacacaaagacagagtcacatagacagagatggagagagagagagagagaataagagaggcagggaatattagagccacacaaagagacgggtaggctgcaaagggcagaccaagagagactgaggccgggcacggtggctcacgcctgtaatcccagcactctgggaggccgaggcaggcggatcacttgaggtcaggagtttgagaccagcctggccaacatggtgaaaccctgtctctactaaaaacacaaaaattagtcaggcgtggtgttaggcacctgtaatcccagctactcaggaggctgaggcaggagaatcgcttgaacccaggaggtggaggttgcagtgagctgagattgaaccactgcactccagcctcaaaaaaaaaaaaaaaaaaaaaaagagagagagagagagagaaagagacggagacagagaggaagggcacaggcagaaacagtgacaggaaaaaatcaagtgttgccaaccatggggttgcattgcagagagagaagccacctacttggtgaagcaccagtaaagaaatcccagtgctcagaacagggacatgagagctctcagaggaaacagcaaaaaagattcctagccagtctcagagacagagattggagctggcgacccaccctctcttgggagacaccccctccttctctgcctccctcaccggggccctttacctgctgagctgcaggagacactggctgggatgcgctagagcctgcagctctgggtgtgcttggggggtggtggggcagaggttgttcttaagttgtttctgcccacaccctcctccttaaccccacttttcttgttctcgctgtgaactttaaatccctcccatcatcttgccatacctttcctgcggccctagggctcacagccagctggaaaggtgccgtgggagggggctgcgcctgggggccctcctgggatggggcaaagctttctttctttctttgttttttttttttgctttgccagttggagcctgggcctggttttggggtagtcatggggctgtcgcaaaatgatgggccagggatgggggctgggttcctttggtatttggggcacttgtttctttttctctgggttcaagtccatttctgccactgatgggccgagtggccctggctaagtccctttccctccagagctggagttttctctttctctggaagcctattttttcatagttctccatgctgttccctgtctcttgccgtgggtctctgaaatgctctgtgtcttgctttgcttctgcctctacagtctctgcctctgaatctttttgtctctctgtgtctctgtctctccctcctttggtgtctctgggtcttcatttcttatgctctctgggctttctccttctctctgcttctctccctgatctccctgtaagtccctctcagtcactgtctcctgatctctctggtctctcactctctctatctctcatgtctccacgagtcagactgcacttggtgggactgaagccaagctgaggctgaaggagtgtttaagaaaagggcagagctggaagccacagggaaaaagcctctcagactagaatgacactctctcccaccactggctcataaacagccctcctcctgccctcctgagcaccctactagccatgtctactctcagctcctgccttagaaactcaccctagtaggccaggcgcagtggctcacgcctgtaatcccagcactttgggaggccgaggtgggtggatcacctgaggtcaggagttcaagaccagcctggccaacatggtgaaaccctgtctctactaataatacaaaaattagccaggcatggtggctcacgcctgtagtctgagctacttgggaggctggggcaggagaatcgcttgaacccgggaggtggaggttgcagtgagctaagaacatgccactgcactccagcctgggcaacagggtgagactcggtctcaaaaaaaaaaaaaaaaaaaaaagaagaagaaactggccctagttacccacctcctggccaggtcacaagggcagaatgcaaaacctggagctgggccagggctctggtgccaggggctaggctgggtggagagcccctgcggtcaagggtctgggaggccaggtggaggtgtgggtacccccacaggttcgtgggtgtgcaccaggattgctgttctcagaggggcagaggaggaagtgtttggaggtcctggggaatttgacaccctaggtcccaggcatatggtggggtggaggtggggcccatgctgttgtttcagtcctggataggccggttggggcaggtcctggaagagggctgaaggcttgatgatgggattatatagctctagtttcccttggcgtctactccctacttttaaggggagggtgtagtgctgtatccacgccaaccctgtaagcaacttatccctcaccctagaacttggttaagaggggcctaatgaggctgggcgtggtggctcatgcctgtaatcccagcactttgggaggccgaggtgggtggatcacctgaggtcaggagtttgagacagcctgaccaacatggcaaaaccctgtctctactaaaaatacaaaaaaaattagccaggcgtggtggtgcttgcctataatcccagctactcaggaggctgaggcaggagaatcacttgaacccgggaggtggaggttgcagtgagctgagattgtaccattgcactcca

SEQ ID NO: 1560225 - DNA, 4001 bp, Homo sapiens
cctggtgattagtgagtgctcactttgcacaaggctcagtcctcactcaatcactcaatcctacatgatgggcactgctttttgtttgtttgtttgagatggaggctcactctgttgcccagactggagtgcagtggcacagtcttggttcactgcaacatctgcctcccgggttcaagcgattctcctgcctcaacctcccaagtatctgggattacaggtacgcaccaccatgcccagctaatttttatatttttagtagagacagggtttcaccatgttggccaggctggtctcgaactcctgacctcaagtgatccacccacctccgcctcccaaagtgttgggatttcaggcactagccactgcacccggctgatgggcactgttatcactccatttgacagatgaggcaacagagggactaagccatgtgcaaaggtcacacaccagtaagtggtggcaggctgtgagcggagggcctagcagcccttgacttaccatggccatcaaaagtcccttccagcatcgctacggttccccggccgctgaactcctcagcctgacctcccagggcctcccgcacagcctcctgcccaaccaggaccaccacaggccgccagggtcccaggtagatggtgaacaccggtccgtacttcttactcagctgggggtagggaggaagaaagaggagggtgctgtgacctcttcgatccaaggtgtctccatcatggcccctgtcacttgaggagccaccgggtctagcttctacgccctctaccaggaacctgcccccatcccagcagaaatagctgaggctcagttctctttttgcactaggctcccgggcctcctcccccagtacatccttcagtggcatcccccaacttcctgtcgttcccttgcttcctgctgaaccctaacctctgacgctgggcaatccagaagcagtttgggtctcccttaattccttagggccctccctgccccccaaatatccagccacccctttcagtcaccacaaaaccctgaaattctggagcagacactgctgagtatccgccccatctctcccccaagaccccacccttttttctacgtccttgaagtcacccagaatccttttgaatgggaaacttcaggcctctgcccactcccacctgctatcccctaaggctggggctgcctctgccttctttcttgctctccttcctccccagtcccaggaactcccaactgagctccacccatcctcccatcctgcattctctgctggcagattccttcagcgggaccccctctctgagcctgcaaccctccagcctcttctctgcctccaactccccgcagggacgcctcccccttttcttctttgtgccctcttcagcatgccccacctgtatggctccagctacctctccctctgggacaagcccagctgcatcagcttctcctcggctggaggactcctgtctctttcagcctcggtccctgcccatcaccttcccaggattctgtaggcagaggtctctgcccctcctagccctggtcccccaccccacgatcctctctcccgggcacctctccccttctcagccctggacaacctgctcctgcccccaaccccaggacagcagcagcccctttgccttgggacccctgcccctgcctcctccctaggatacccgaaaagcccctcaccctggcactcgggtttctctcccaggaatcctcccacccctagccaggacgtccccagagccccttacccgcatgagccctgaatacagcgccccgggccgtagctgcaggaggtttcccagcagtggtagcggcgtgggcccggggggcaggtggcctcgggccctggtcccggacagcgccagcgtcagcagcaggagcagcgccagcgccagcagcagcgcccaggtgccggtcgcctccatctcggcaggtcggctccttctcctctcccaggcgctccgcgcggctgggctagttaggggcgggagccgggcgtctccctccccaacgaagtcaggcgcggggcggggcagctagcccagccccctgcctcctgggcaggcttatctccccgccgccgggtttctcccggaccaccgccgccgcctgatgtcgggaactcatgctccaacggatgtctccgaggtcacccaggtttacgcggggcttgggcggcggagacagcgccttgggcccccggatagggagtaagcaaacagaagaacctggaagtcagagactttggccgcctggaggttgccacaccccgcatctggcggtgaccccgcgccactctccccagctcctacctcgctcattgttcggatgtgggttcctgtgtgcgtgcgtgtatggggtgtctttgagtcaattttctccagcatcttacatcttcacgaactgagaggaaggacttgacctttaaggataaacaatctgaagtccagggagataaatcggttggccccaggtcaacttggctgagtggcagagttaatattttgacttgggccagttagaatgattgagtcattcattcattcgtttagaggcagtttgcagagcggttaggaccgtgatggctgaagccagactgcttgaattcacagcctaattcctctgtgcctctgttagccttgtaaaatggggctagttttcaggattaaatagtacatctgtgcacaccatttaaagcagacgcaggtgcacatgtaacaagcactaaatagatgttagctaatatttctgcaactaactgttattgaggtcttactataaacaagaccttgttctagacccgagggtgcagctatgagcgatggagagaagggctctggccttcctgagctcatatccacatgcagatgaagatgagatgaaaacaatttcaggaagtgagaaggcctgccaggggaatgggcttcttgagaaggaagaatgttagaaccatttgtgcatgaattattgtaggtttggttcactgctgtatccccaacatatagtgcagtgcctgacacacagtaggcactcaataaatatttgttatattttcaaagattgaatgtaggagataagattcatgaagtctgcaggggccatcttgcaaggtcttggaaaagactgcattttatttctattgcaaacggaagctgtctggaggggttttcagcagggcagttactttgtttgctttgcattttgatttcgtattttattataaaaatattaaaatttcaaacatacagtgaacacctgtatacccatcagattccaccattttattatcctttctttgttacctatctattctttttttgtttgagatagagtctcactctgttgcccagagtggagtgcaatagcatacagtcttggctcattgcaacctctgcctcccgggttcaagcaattctcctgcttcagcctctcaagtagctgcgattacaggcgtgcaccaccatgcctggctattttttgtatttttagtagagacggggtttttgccatgttgaccaggctggtctcaaactcctgacctcaggtgatcttctcacctcagcctcccaaagtgctgggattacaggcatgagccactgtgcctggcccttttttcattacatatctgttcattttgcctatccattgatttttttttaagcatttcaaagtcagttgcagataccagtacacttcactcccaaatacatcagcatgcatatcagtagctagagctcagtatttgtttacagatactttttgttcctcaaggtatcttatatacaatgaaatacataactcttaagtgtataattagatgagctttgagttgcatatgctggagttttaaaatattagattctttgggaggctgaggcgggcggatcacgaggtcaggagatcgagaccatcctggctaaaatggtgaaaccccgtctctactaaaaatacaaaaaattagccgggcgtagtggcgggcg

SEQ ID NO: 1560226 - DNA, 4001 bp, Homo sapiens
gaggaatgagtgagtgaggagaggaatgagtgagtgaggagaggaatgagtgagtgaggagaggaatgagtgagtgaggagaagaatgagtgagtgaggagaggaatgagtgagtgaggagaggaatgagtgagtgaggagaggaatgagtgagtgaggagaggaatgagtgagtgaggagaggaatgagtgagtgaggagaggaatgagtgagtgaggagaagaatgagtgagtgaggagaggaatgagtgagcgaggagaggaatgagtgagcggggagaggaatgagtgagtggggagaggaatgagtgagtgaggagaggaatgagtgagtgaggagaggaatgagtgagtgaggagaggaatgagtgagcggggagaggaatgagtgagcgaggagaggaatgagtgagtgaggagaggaatgagtgagtgaggagaggaatgagtgagtgaggagaagaatgagtgagtgaggagaagaatgagtgagtgaggagaggaatgagtgagtgaggagaggaatgagtgagtgaggagaggaatgagtgagtgaggagaagaatgagtgagtgaggagaggaatgagtgagtgaggagaagaatgagtgagtgaggagaggaatgagtgagtgaggagaagaatgagtgagtgaggagaggaatgagtgagtgaggagaagaatgagtgagtgaggagaggaatgagtgagtgaggagaagaatgagtgagtgaggagaagaatgagtgagtgaggagaggaatgagtgagtgaggagaagaatgagtgagtgaggagaggaatgagtgagtgaggagaagaatgagtgagtgaggagaagaatgagtgagtgaggagaggaatgagtgagtgaggagaagaatgagtgagtgaggagaggaatgagtgagtgagcagaggaatgagtgagtgaggagaagaatgagtgagtgaggagaagaatgagtgagtgaggagaggaatgagtgagtgagcagaggaatgagtgagcgagaagaggaatgagtgagtgggcagaggaatgagtgagcggggagaggaatgagtgagcggggagaggaatgagtgagcggggagaggaatgagtgagcggggagaggaatgagtgagtgggcagaggaatgagtgagtgggcagaggaatgagtgagcggggagaggaatgagtgagtgggcagaggaatgagtgagctgcctccctctcttctctgtgttcccacaccccagccaccctcaaaacccagctccctgagccccattcctgcccctcaggaactccatgcatcctgagaccccagacccgtcctgctgacaaactcaccaggccctggtgtccccaaaaccagttctgtttcgggggttgaggaaaacactggaggcggcggcagttgtcatagaaggtgtaggtccaggccaggacgcgggccaggagccaggagcctccaaccagcagcagaagcagccacggggatgctgccacgggcccgaggcccagccaggacaggctcagctgcggcatcctgcagggcagacgggatggagggtgggatcctgaggcccagggaagggcccaggaagctccaaggacagtggaaaggggcaaggatgggcagtgctggaggcagatcagggaaggctctgagatgggtaaacaagagctgagatctaaagtccagaaatgcccaatgaaaaccagcagccaagtggcctccagttacacagaaagggaaagagagagagaggctgattagaatccaaaaaggcccagcctgaatcactgggaggttgccaggggtccagttaccaggaaatcaccagtctcccaggccagcagccttgacccaccccaaccttgggcagtcccctccccatcccaggccaggaccctccagccctgccactgccagcctggctcctatcagaagcagcttgtcccacataccctcctctccccctctgctaggaggtctttgcctctggcccctgatttccggaaggctgtgggaggcgaggctgggctgggctggtcgagccaatccccatggactgggtgtgtcttccaagcctgggcaaccaaccaaaacctggcgtagggccagctgggtgcagaggagccagctcagggtgacacagcatgggcacaggatccgcaggtctcaacatctcacacctgagtgggaggggatcttgaggaagagtcaaaggtgactctgagccccaaagtttacagccaccttgcccttccaaggcaagagtgtggcagataaagtcatgaacttgagagttcaggtggcaagagagtggggccaggccaaccattgtgccagatcatgttctgagctcctctccacatgtggtccaggagttcatcatgcaccatttctcagtgcagacttaggagattcagagacagaagctcctggcctctggcttcacagtctggcaggagttcaagtcctgcctccaggcaacccagggcctgggtcgagacatgactgacaggagtaggaacaaactatctaactgtgctggggattacccggtcagattttagagataaagagccccgctggaggagaatacctggaggctaggttcagcataggaggacagagaggggagatgggaggtaaggctgagaggggccatgagtggatggggccagggacaggagggcagagatgggggaccctgagtggagtccttattctgccctccccttgccctaactgtgggtagtgagcccctcctggactcaggcttcccatctgggaaatgggatgtcagataaggccttagagggggacagaggagggatcacaggaaaatgggccttagatggggacagatgaaagattctgaggagggagtgaagggaaggggctggcagctagcactttagctgctgtgtgtcagtctctgctctttgcaaaagacaatatgcaaagttcttttactgtgtactggactctaaataaagcacacctaccatgtgccaggtactctgtatacatgttgtgtactgtgtgccaagtgctctatgaaaagtgtgtccactgtgtgctgggcgctctacagaaaatcttgcttctttgttctcggtcctctatataaagtgaaatttgtgcggagtaacttatgtaaagtgtacctactctgcacctgctgctctatataaaacacacctactgtgtgtcagatgttctatgtagagcatgtttactacgtgcctggtgatctatgtcaagtgcacctactgtgtgtcaagtgctctacataaagcgtgcctactctgggtgctgggtactcttcataaactgtgactccatgtgtccggtactctacataaagcacacctactgtatgccagatgctctacataaagtgttctttctgtgtgtcaagtgctctacataaagcgtgcctactctggatgctgggtactcttcataaactctgactctgtgtggccggtactctacataatgcacacctactgtgtgccagatgctctatataaagtgttttttctgtgtgtcaagtgctccacataaagtaaaactactctatgtaaagttcttgacataaagaatgcctactgtgtgcaaggcactctccacaaagcactcctactatgtggcaggggctctaggtaaagcatgcctactgtgttccacctactctaggtcaagtgcacctgctcatgtcagatgctcacccgcgtcaccatgcccaaagccttcacaccaacctcccctcggttctctgagccagagccctgggattgttggagagacctgagtgatggcatccagagaagggaatgcatccatttaacaaaagagcaaactgagtctcagagagggcaggcctctagcccaagttacagagctcacaggaagccaggtttgtgagatcctcaagcccaaacctttttcctctgccatgctgttctgcacccattcattagggtcaatg

SEQ ID NO: 1560227 - DNA, 4001 bp, Homo sapiens
agataattcctgcgggaaagcagcagcccagagatgggcagatacaagcaaatgggccatgcagggagcagcctgtctatcggggctcagaaggcttcaagtccagcagtggagaaggtgggaatgccaggagagccctgctctgtgcaccccacaaccatacaggagcctctgggaggggcactacggtagggaagacaggcaggaaaaggatccaagcaggctgaggtgggaggacagggaggtgagaaaggtttggcatggaactgcagaggaatgaatgaatgaggaaaggaatgagtcggtgggtagaggaatcagtgaatgaggagaggaatgagtgagtgaggagaggaatgagtgagtggggagagcaaaaagtgagtggatagaggaataagtgaatgggtagaggaatgagtgagtgggcagaggaatgagtgagtgatgaggggaaggagtgaatgaggagaggaatgagtgagcagaggaatgagtgagtgagcagacgaataagagtgaggagaggaatgagtgagtgaggagaggaatgagtgaatgagaggaatgcgcgaatgagaggaatgcgcgagtgaggagaggaatgagtgagtgaggagaggaatgagtgagtgggtagaggaatgagtgagtgaggagaggaatgagtgagtgggtagaggaatgagtgagtgaggagaggaatgagtgaggaggggaatgagtgagtgaggagaggaatgagtgagtgaggagggcaatgtgtgagtgggtagaggagtgagtgagtgggtagaggattgagtgagtgggtagaggagtgagtgagtgggtagaggaatgagtgagtgaggagaggaatgagtgagtgaggagaggaatgagtgagtgaggagaggagtgagtgagtgaggaaaggagtgagtgagtgggtagaggaatgagtgagtgaggagaggaatgagtgagtgaggagaggagtgagtgagtgggtagaggagtgagtgagtgggtagaggagtgagtgggtagaggaatgagtgagtgggtagaggaatgagtgagtgggtagaggagtgagtgagtgggtagaggagtgagtgagtgggtagaggagtgagtgggtagaggaatgagtgagttagcagaggaatgagtgagccatctctcttgcttctctggggtcgcagaccccagccaccatcaatacctagctcactgagccccattcctgctcctctggaagtccatccaccctgagaccccagacacattttgctgtcacactcaccaggcccaggtgaccccaaaaccagttccgttttgggggctgtgggaaacactggagccggcggcagttgttatagaaggcataggtccaagccaggatgcgggcgagtagccaggagcccacaaccagcagcaggagtagccatggggacgttgccaccggtctgaggcccagccagggcaggctcagcagcgacatcctgcagggcagaggggatgcagggtgaggacctgaggcccagggaagagctccggggacagtgtataggggcgaagtcaggaactgctgggggcagggcagggagggctcaggggtgagtaaacgagggctgagatctgaagtccagaaagtcccaaccaaaaccaacaactaagtggcctccagtaacctggtaaccacacagaaagggaaagagatgggccgattagagtccagaagggccccacctgaatccttgggagtttgctaggagtccagttaccaggaaacccccagtttcccatgccagcatcttggagccaccccagccttaggcagtcccctcttcatcccaggccaggaccttccagccctgccacccccagcctggtaccttctgtcgggagcagcttgtcccacacaacctcttctcctcttctgctgggaggtctttggccctggcccctgatctagggaaggccgtaggaggcggggctgggctgggctgggctgaggcagccaatccccacagcctgggtgtgtcttccgtgcctgggcagccagccaaaacctggggttgggcccactgggtgcagctcagggtgccccagcacgagcactgaattctcaggtctcagtaccttcttgggagtttgcaggggaagttggagggtggttagaggggactctgaaccccaagtttacctccaccctgcccttccaagacaagggtgttcagataaaagcatatacttatcatgacagttggcagccagctgagctgggccaggccaacccttgtcccagatcatctgggctcctctccaaacatgggcggggaggatgtcaggcactacatcttggtgcagacttaggagattcagagacagaagcctctcatctctggcttcacagcctggcaagagttcaagtcctgcctcctggcagcccagggcctgagttgaggcctgactgcttgaagcaggaagaaagaatccagccccaaccccgctgaggattaccttcgtcagattctggggataaagagcccagctggaggagcaaacctagaagctgggctcagcttaggaggacagagcggaggcacaggggatgaggctgagaggggccttgagctgacggggtccaggcaggggagggcagagcaaggggatcccgagtggagtccttgttctgccctgtcctttctctgactgtgggcagtgtggccatcctgggctcaggcttcccatctgggaaatgggatgtcagatgaggccttagagggcgacggaggaaggctcctaagaaaagggagctccaaaaagagggactgaagggaaggggatgacaactagcacttgagctgctgtgtgcctgtctctactccatgcgaaagactgtacggaaagcactactgtgtgcacctactgtgtgccagtttcactatataaagtgcacttactgtgtatcagatactgtacataaattctgtctactatgtgccaggtatgccacataaagctcacctactgtgtgcagcatgctgtacataatgtaagcttactttatgcagagtacttcatataaagcgtgcctactctgtgccatgtgctgtatataaagcatacctactgtgtgtcaggtgctccacattgagcatgtgtactacgtacctggtgacccacagaaagcgcacctactctgcatcaagtaatctacataaatcttgtctactgtgtgctggctattctacatatagtgcacctactgtgtgccaggagctccacataaatactgtctactgtatgctgggagcccttcacaaatcctgtatcttgagtccctggccctttatataaaccatgcttgctgtgtgccaggtgctctaaataaagcacacctactgtgtgccagatgttccacataaaatgcttctcccgtgtgttaggtcccctacataaagtaaaactactcggtgcaacatacttgacataaagcacacatactgtgtgccaggtacactatataaagtgtgccttattgtgtgccagatatgctacataaagagcacctactgtgtgccaggtatgccgcataaagtgtacctactatgtgctaggtacgccacataaagtacacctactgtgtgccaggtgctctacataaggtgcacctactatgtgccaggtgctctatataacgtgcacctgcttgtatcagatgctcacctgcatcacagtgcccaaagctgtcccaccaccctcccaacagctccctaggccagaaccctgggcattgttgaagagacctgagtgatggcatccagaggagagaaggtgtccatttaacacaaaagcaaactgaggctcagagagggcaggcctctagtccaagttgcagagctcataggaactcaagactatgagaccctcaagtccaaatccgttccctctgccatgctgctccacccccattctttagtgtcaatgccatattaatatagggacat

SEQ ID NO: 1560228 - DNA, 4001 bp, Homo sapiens
ccatgtgtccatgcatccatctattctattatctatctacctacgtgcctgtccatccatccatccatccatctatccatcctatctgtgcatctatctatctatcctattagctatctatctatctatctatctatctatctatctatctatctacattcctcctgctctatctatctatctatccacattcctcctgctctatctctcttgggtccatctccaagtcccaagggtgcatcccagggcagagggagaagacgcactgtccactcacagaggcccagttatcttgagaggaaggattttctttttctgggagtcatttcagcccagaggcagctatatggggaggtcctcacaggggagatttgtggggagcagtatcgcctcaggacatgtccctaaggctggtccccacatgccttcatgtcctggctgatccacagaggctccagttcctcccatggagaaggttctgcacatgggagaccttcccttttcagcagccactagtggagcagaggtgactctaactgtccatcaggacaatggctcccacctgggagcagcttctgcagcaggctctgtgctagtgtgtcctgtgcacccttccactttatctgtggacacatccatcaatcctgccatttgcaaatgagcagactaagaccacattccccaaagaggagagcggtctaagtcagagggcaaggtcacggggaggagaaaggccaaggaaagcttctgaaaggtgaagtgagtggccaacttttatctgggtttggcaacaggtctcattgataagagggagataagaagaagaatataagagaaaggtgccttcgggtgtagtggaagtgggagacggcccatgcctctcctctggcccagctgtaccctcataacaggaaatagtccaggcaaggagaggaccctggacagtgggcataagaagcctcgagtccagcaatggagaatgtgggaatgccagggactcgcctctctgtgcagccaaccctctgcccaggagccccgcagaggtgcattaatgtgggaagacaggcaggaaaaggattcaatgcaggcctggagtgggaggacaaggaagtgagaagggcttgcgtaggcacctcacagaaatgaataagcagaggaatgagtaagatgcctcctctgcttctctgccaccccagatcccagcccaccccttcacccccactccctaagcctcgtacccctcaggaagtccatccatcctgagacctagacccatcctgctgccacactcaccatgccctggtgtccccaaaaccagttccgtcttgggggttgtgggaaacaccgaaggcggcggcagttgtcatagaaggcgtaggtccaggccaggacatgggccaggagccaggaggccccgaccagcaggaggagcagccaaggggatgctgccactggccagaggcccagccaggacaggctcagctgggacatcctgcagggcagacgggatggacggtgagatcctgaggcccagagaacggcccagggacctccagggacagtggagaggcagggacgggcagtgccggaggtagagcagggagggctcagggatgggtaaaaaggggctgagaggtaaagtccagaaaggcccaaccaaaaccagcagccaagtggcctccagttccctagtaagcacttagaatgggaaagagagagagagactgattaaagtccagaaaggcccagcctgaatcactgtgaggttgccaggggcttggtttcagttactcggaaaccacccatcctccaggccagcacccaggagctgcgtgggccttgggcagtgcccctctccatcccaggccaggaccccccccaggcctgccacccccagcctggcaccttctgtcaggagcagtctgtcccagacaacctcctctctctgtctgctgggaggcctttgaccctggcccttgatatagcaaaggctgtgggagggctggctgggttgggctgggccaaccaatccctgcagcctggatgtgtctcctgagcctgggcagccaatcaacacctggcgtcaggccagctgggtgcagaggaatcagctcagggtccagatggatgggtagatgcacagatagatagagtagataggatggatacattaggtagatagataaagtagatatagataatggatatattagacagatggatagatagctattaatagatgatagatagatacatagataataggataaatagatggaatggataaacgtacagctaagatggattgatggatggatgggtaggcaaatatatatatagatgagaaattagatagataggatgaatagattagatagacacacccagaaataatgttccatctctgtcccagatatgtgggatcctcatttgtgacatgggaactagggatcttggatcactccaatcactccagatgctacaaggccagtgacttactcagtatgatgctgaggaacatgaccatcagaaacaggatcagagtcactctcaagcaaaaaaaaaaaaaaaaaaaaaaaaaaaaaaaaaaaaaactccaaggattaaatgatttttcccattgtcctggggagaaattaatccaagggaggtcacaggagggcaaataattccccatcaccaccaccaccaccatgagcataccatcacccatggagttttctgatttactctttggcccattaagcgtgaaatttcttatgctaggtttctttctgataagggagaagagattagtatctctacatttcctctcctcctgctacctagtctctgtattctaggttaaattataatttatgttgaggatttacaatggctgatacacctagctgagccttctgcacagagatacattgggagtggaggttaattgggtcaaaggagaaatgccataagcccacactccagcctatcagggtggattaaaggtctgatttgcccaactcttgtcacacctgctcccactgagaggtgacagcatgctggcagtcctcacagccctcactcgctctcggcgcctcctctgcctgggctcccactttggcggcacttgaggagcccttcagcccaccgctgcactgtgggagcccctttcttttctcttcttttctttttttttggatttttttattattattattatactttaagttttagggtacatgcgcacaatgtgcaggttagttacatatgtatacatgtgccatgctggtgcgctgcacccactaactcgtcatctagcattaggtatatctcccaatgctatccctcccccctccccccaccccacaacagtccccagagtgtgatgttccccttcctgtgtccatatgttctcattgtgtagggacatggatgaaattggaaatcatcattctcagtaaactatcgcaagaacaaaaaaccaaacaccgcatattctcacttataggtgtaggagcccctttctaggctggccaaggccagagccggctccctcagcttgcagggaggtatggagggagaggcgcgagtacgaaccggggctgcgcgcggcacttgcgggccagctagagttccaggtgggcgtaggcttggcaggccccgcactcggagcagccggccggccctgccagccccgggcaatgaggggcttagcacccgggccagcggctgctcgggaaggtgtactcggtcccccagcagtgccagcccaccggcgctgcgctcgatttctcgccgggccttagctgccttcccgcggggcagggcccaggacctgcagcccgccatgcctgagcccccggcctccgtaggttcctgtgcagcccgagcctccccgatgagcgccgccccctgctccagggcgcccagtcccatcgaccacccaagggctgaggagtgcgagcgcacggcgcgggactggcaggcagctccacctgcagccccggtgcgggatc

SEQ ID NO: 1560229 - DNA, 4001 bp, Homo sapiens
gtctgcctctttgctgtgcgacctcgggtgagtgtctgcacctctctgagcctcaatttcttcatccattaagacagaagccctatttacccacctcatggggctgcaatcttccaggcacatagtaagcctttgatcaatgatatctctcattaccgttggtgctgccatcacgttcattattgtgacctggccatctggggtttggagaatcaggtccaagttttatcaacaaggagagatgagtcaggcgcagtggctcatgcctgtaatcccagcactttgggaggctgaggcgggtggatcacttgagcccaagagttcaagaccagcctgggcaacatggtgaaaccccatccctaccaaaaatacaaaaagtagacaggagtggtggtgcatgcctgtagtcctccatactcaggaggctgaggtaggaggattgcttgaacccaggagatcgaggctgcagtgagctatgattatgccactgcactcctgcctgggtgacaaagtgagaccctgtctcaacaacaacaacaaaaaaagaaagaaagaaagaaagagagagagacagagaaaagaaagaaagaaagaaagaaagaaggaaggaaagaaagaaaggaaggaaggaaggaaggaaggaaggaaggaaggaaggaaggaaggaaggagagatgggtcccattccctgaatgcctctcaagtcatccaagcccctctgcagataccaacctgggtcaccgccagacaccaggccagagttaatgttactgttcagaaacccaagctgggccatttggtgatgccggggacatcggaaagtggactgaggctttggggtcaaacagggcttgttttttcaaatcccagctctcccactgggcactgggtatccacaggcacaggcttcttctctctggccctcagtttccgtgcctgtaaaatgagggtggtagggaagatttggggaggttccttctctttggggtttggagttacacaagaaggagtttgatgctgccagccctggctgggcacagctccaggacctagaaataaggggtggagcaaggggcacagggtaggaggaatttcgggtacgcagccagccctggccatctcctttgcctacagggcggtgagactcacaatgagtgcatgaatgagctgtgagcgggcagatgaaccaggagagatgccctgagcctaggcctctccagcctgcgactccccaggtggccagcctcggccaacttgcatacccaggctgggccaggcccctgggaggccagaaaacatcttccttccagcatctatcagacgaagatcacctgggaccaaccccaggacctcacacaaccctcagagccaactctcggggccagaagaacaccgtcttttcatagaggggctctgcgtctggcatggatgggcagagggttcctgatagcagttgaaccacaagcctaaccccatcggttgaatgtactacaacctccccgtcaagacaacgtgcagtggtgaaatctcagggcgaatccccattcagccccaaagaggcgtcccagggcggggcttgaacccatctgggatgtcctgactaccagaggggtcttttggaggccccctgcccatcacagatacccagagaaaaggatgcgcctaggactccgaggcgcacacagaaaaaaaaaaaaagaaaacaactcacaaatgcagcaaacgtcggggacacacccacgtgcccctctccccacgagtgccccgggcatgcagccccgtcctgggtcctgggggggtccccgtggccggctgcgccccgcccgccgccgcgcgcagaccttcgcccttgccccgccagcaccgaaccgcgcgagcctcgggttccagcgcagcgccgcggccgcgctcaggttacagccctcaccacgcgcgcactcacccgcgggtctcagcctcctgccctcgatccggatccaccggcgccactacctgggatctgaccgcgccgtcccacggcccaaccctttaaccccgcccggccgtgccgaggggtccgcccccggacatcccgccccgggctcccgcagggttctgggcggggactccagcgctgccccctagaaaaggagagaacaagaaataggcgtgtggaggggtggagagcgatggaaagagagagagactgagactgagatggagagatgaagagagacagagacttggacacctagaagtcccaaaccatcaggctccccgccctcctgccactgctgggccgcattagcgcccaagtcccgctctggaccacactcctcccacaccaacaccccccatggcccttacttccaggtttgctcccaagcttggacagcgatctctaaaccatcaccccctggggccccactgacccccccgagaagcctcctctggggccctcaggaattctctggctccaccagcccttgggaaccagcccttcccctctctctggatcctgggcctaagcttccccggcacccacccctggaggctctgcagcctcttcctccaggaagacctccaacctcaacaagcagcaccagactggttctgctccccgccaacccgccctccgccactcctccccacccactgccagacaccttgaccctctgaccaggatgttgtccttggccaacccgtctactccagatgtgtggagacagagtcagctccgcctctggatgtgtctgtcctccggagtcggtgggtggatgtgtggctgaccttagcacgtgggcagacagatgagaagacaagaatctccacttgccccagcaggtggtaaacttagaagacttccttatccctcttttttctaagaatacgctctcatttggtgctgggcccttggaaagagggcgtgggaggtgtggggcatgtctcctggtgaagaagaggagacacaagtaattgaagttttgctgcttggaggaggcagacatgaggtcagggaaggcgacgtggaggatgtgacacttgagctgggactgcatggagaggttggatttcaacaagtgcaggagagggggtagagctcaagcacagagaaactggagggtgtgacttagcagatggctttccctggccttggagtgtgagaggtgtggaggctggagggatgcaggagttgactgtgaaggccagtttgaatggctggatcttgatctggtgggcagtggggagccatggatggtgcttgagtaggggaggtgccccctgttagttgattggtctcactctgtcatccaggctggggtgactcctgggctcaagccatcctcctgcctcagcctcctgggtagttgggactacagacacgtgccaccacacccagctaatttttttttttcatttttttagagacagggtctcactatgttgcccaggctggtctcaaactcctgggctcaagccattctcccagctcctagaacttttaaaaaaaaatatttatatttatttgtgtctttaatcttttttacttctgaggaagagcttattttattaattttttattcataattaacgcagcatgaaagcctattttttagggatatgaattttgttttgccagtaattctggccaagggggagcttactagaagcactttggaaaatgcagagatccacatagagtgaagtttgagagggacccctccagtggctgcaggggacagagacaaagggtgggggtagctgagacccaggaaggggttaaggatgaggtcccggaggtcatctccactgaccactggctaaatacggggttctagggaagagagaaggaaaagaagccatctgcctggcttctctgctctcaaagagctggagaccaggaaggaggagtaagtgaaagggcctggagcactaagagtgggcttcgtggatgtgtggccttgagctagtcacatggctgctctgagcctccatctccctatgcataaaatgcagaagaa

SEQ ID NO: 1560230 - DNA, 4001 bp, Homo sapiens
ccatccatccatcttatccatgcatccatctgtccatccatccatctatcctgttatctatctatctatctgtctatctacccacctacttatccagccagccagccatctattcaccctatctgtgcatccatccatccatctatcctattacctatctatctgtctacattcctcctgctctatctctcttggggccacccccaagtcccaagagcgcatcccaaggcagaaggaaaagacacactgtccactcacagaggcccacttagcttgagaggaaaaatttccttgttctgggagtcatttcagcccagaggtgggcatatgaggaggtcctcacaggggaggtttgtggggagcagtgtggactcaggacatgtccctaaggctggtccccacatcccttcatgccctggctggttcctccaccagccacacaggttccagttcctcccatggagaaggttctgcacacaggggaccttcccttctcagcagtcactaggggagcagaggtgactctaactgtccatcatgacagtggctcccacctgggagaagcttctgcaccaggctctgtgctagtgcatcctgtgcaccctcccacttcacctgtggacacacccatcaatcctgccatttgcaatgagcagattgagaccacgttccgcaaaggggagagcaggtctaagtcagagggcaaggtctgggggaggagaaaggtcagggaaggcttctgaaaggggaagtgagtggccaacttttatgtgggtttggcaacaggaccccattgggacatcttactggggaggaacaagataagaggaaggtgcctccggatgtggtggaggtgagagacagcccacacctctcctctggcccacctataccctcataagaggaaataggccaggtagggagaggaccctgaacagtgggtacaggaggcctcgagtccagcaatggagaatgtgggaacgccaggggttcacctttctgtgcacccaaccccctgcccaagagccccgcagaggtgcattaatgtggaaagacaggcaggaaaaggattcaacacaggccaagagtgggagaacagggaggtgagaagggcttgggttggcacctcacagaaatgagtaagcagaggaatgagtaagacgcctcccctgcttctctgccaccccagaccccagcccaccccctctcacctgagcctcattcttacccctcaggaagtccatccaccctgagaccccagacccgtcctgctgccacactcaccaggcccaggtgacccaagaaccaattccgtttcgggggttgcgggaaacaccggaggcggcagcagttgtcatagaaggtataggtccaggccaggatgcgggccaggagccaggaggccccaaccagcagcaggagcagccacggggatgctgccattggccaaaggcccagcgaggacaggctcagctgtggcatcctgcagggcagatggggtggtgagtgaggtcctgaggcccagggaagggcccagggagctccagggacagtggagagaggcagagacgggcagtgctggagatagaacagtaagagtaaacagggatggataaacaggggctgaggggtaaagtccagaaaggcccagccaaaaccagcaaccaagtggcctccagttacccggtaagcacttagattgagaaagacagagaaactgattaaagtccagaaaggcccagcctgaatcattaggacgttgccaggggcttggtttcagttagaaaaccactcatcctccaagccagcaaccaggagctgcctgggccttgggcagcaatggagaatgtgggaaggctggggctcccctatgtgtgcgcccaatcccttgcccagtgcccatctccatcacaggctaggatgccccaggcccaccacccccaccctggcaccttctgtcaggagcaccttgtcccacacaacctcctctccccttcttctgggaggttttttcccctggcccctgatgtagggaaggctgtgggaggctaggctgggctgggctgggccagccaatccccacagcctgggtgccgctcccatgtctgggcagctggccaaaacctgggtgtgggagaccagctggatgcagaggaaccagctcagggtgacacagcacaggcactggatcctcaggtctcagcacctcccacataaggtggagagtaagccgagaggggtcagatagagtttccactgtgtgacacctgctcttaaagagcacctactgagtgtgtggcagataaaagcatgaacttgagagttcaggtgtcaagcgagccaggccaggccaagccttgttccagatcatctcctgtgctcctctctaaccctgggccggtaggacaccgtgtaccacttctggatgctgaatcaggcaacctggaagagacaagcctctatccccctgctgctggatggagttcaagtcttgcctccaggcagtccagggccctgttggagacctgactgctaggaacgggaacaaagaatccagccccactgaggattacctgggtcagattctggagattaagagctcagctggaaaagcaaatctggaggccggactcagtataggaggacagagcggggacgtggagggttaggatgagagggaacggatggggtccaggcaggggaagggcagagccagggaaccatgaatggagtcctcattctgcctcatccttgctctgactttggtcagtactgcccctcctgggtgcagtcttcccatctgggaaatgggatgttcgatgagggccttagcgggggacaatgagggctcctaagaggagggagccccaaaaaggagtgaagggaaagggtggcaactagcacttgagctgctgtgtgccagtctctactctgcacaaaggctgcatggaaagtacttctactgtgtgccaatactctaaatgaagggcagctactgtgtgccaggtgctaaatcctgtctactctgtgccaagtgctttccataaagtgtgcctactgtgtgccaggtgctctacattaaccctgtatactcagttcctgatattcctcatagagtgcctactgtgtgccacctgctctacatagtgagtgcctattgagtgccaccccctgtatatgaagagtgcccactgagcaccagttgctgtctacataacacatgcctactgagtgccaagtgctctacataaacagtgcctactgataccacctgctctatatggtgacttcctactgagtgtttcctgatctacataaagagggtctattgagtgctgcctgctcgagtgttgcctgtgctccataaagtgtacctactgtgggctgccttctgtacataaagggtgcctactgagtgctgcttgctctacatgaagagttcctactcttgcctgcgctacataaaaagtgcctactcagtaccacctgcaatacataaagagtgcctactggccaggcacagtagctcatgcctgtaatccaagcactttgggaggccaaggcaggcagatcatctgaggtcgggagttcaagaccagcctggccaacatggtgaaaccccatctctactaaaaatacaaaaattagccgggcgtggtggcgggcacctatgatcccagctactcgggaggctgaggcaggagaatctcatgaacccgggaggcagagtttgcagtgagctgagttcataccactgcactccagcctgggcaacagagtgagactctgtctcacaaaaaaataaaaaagagagagagcccattgaatgccacttgctctagataaagagtgcctacagatgccacctgctctatataaagagtgtttactgagtatcatctgctcctgataaagagtgcctactcactgctgcctgctctacataaagagtgcctactgctgccacctgctcttcatagtgtgcccactctgtgactcat

SEQ ID NO: 1560231 - DNA, 4001 bp, Homo sapiens
aggatggattttctcatcctgggagtggctccagcccacggaaagtcacgtggggtgggctccacaagtgtggtgtgtgggcagcaatgtggcctcaggacatgtccccagggctggtccccacatccttttatgtcctggctgggcctcaggggccccaggccctcccatggagaaggtctgtacacggtggaacttcctttctcagcagcccccaggggagaagaggtggctctaactgtctgtcaggaagaacagcggctctcaccagggagcaccttttgcacatcaagctcagagctagtccgtcctgtgttccctcaccctgcacctgtggacacacccatcattcctgccatttgccaaagaacagactgatgccaaatcgcccaaaggggacagcaggtctaagtgaaagggcagggtctgaagggtcaaaggtaactttaaagaggaagtcactggccaatttttatccaggttgggcaacacaactcattgggacagcttagtggggataaagaagatgcccctgcacgggggagggtggagatggcacacatctctcttctggcccagctgtgtcatgatgtgagggtagggggtgtatagctacttcctatgggaaaactccagcccagagatggatggacacaagcaaatgggccaggcagaaagtgggttctagacagtgagcccaagaggcctccagtacagcagtggataatgtggaaataatggtgaatacctgctgcgtaacccccactctgccacaggaacccatcagaggttcactagtgtactgaaaacagtcaggaaaagaattcaaaacagtctaggggtgacttcccctagacaaggagatgagaaaggcttggcatggcaaagcagaggaatgagtgagcaaggagaggaatgagtgagcgaggagaggaatgagtgagcgaggagaggaatgagtgagcgaggagaggaatgagtgggtgaggagaggaatgagtgagtgaggagaggaatgagtgagtgaggagaggaatgagtgagtgggaagaggaatgagtgagtgaggagaatgagtgagtgaggagaggaatgagtgagtgaggagaggaatgagtgaggagaatgagtgaatgaggagaggaatgagtgagtgaggagaggaatgagtgagtgcgcagaggaatgagtgagtgaggagaggaatgagtgagtgaggagaatgagtgagtgaggagaggaatgagtgagtgaggagaggaatgagtgggaagaggaatgagtgagtgatcagaggaatgagtgagtttctctgccgtcccagacccgagcccaccccctcagcctgagccccatttccacccttccaccctgagacactagatccatcctcctgccactcaccaggcccaggtgacccaagaaccagttctgtttccggggctgcgggaaacaccggaggcggcggccgttgtgatagaaggcataggtccaggccaggatgcgggccaggagccaggaggccccgaccaccagcaggagcagccacggggatgctgccaccggcctgaggcccagccaagacaggctcagcagcgacatcctgcagggcagacgggatggagggtgaggtcctgaggcctaggaaaggggctggggagctccaggaccaatgatgggtaaacatggttaagagcatggagggagattcagggaatctcaggggaagaggccaagggagaggggagaggagaagtgacacaaaattagagatcaaggaaactagagaccagaaaccagacagcctcatctagaaccaccagccaacttgacctctggttacctgcaagcacccatcaccagggccagctccctggagccatcccagtcttgggcagtgcccctccctatccagccctgccacccccagcctggcaccttctgtcaggagaaggttgtcccgcacaacctcctctcctcctttgccaggaggtttttgctcctggccccagatctaggaaacacttcaggaggctgggcggggctggactagccaatcctcacagcctggatgcctcctttgtgccagggcagccaaccaaaacccggggactggtggggaccataactgtagaagaaccaattcagggtgaccgagcatggccactcagtccttggtacctctcatgtaaggcagagggtaagttggagggcagccaatggtgatctgagccccaaaatgtgcagccaccctgcctttccaagaccaggggaaggtaggtaaaggaatgaagtgttcagatgccaggtgagctgggtgaggccaagccttctcccaaaacatcccccaagttcccctccaaatgtgggccaggagaatgctgtgcaccatttctcagtgcagatttaggagattcagagacagaagcctgttgccctccactgccagcctggcaggaattcaagtcctgcctcccagcagcccaggacctaggctgagacctgactgacaggagcaggaacaaagaatgcagcaccactggggattacccagggtcagattctggagataacgagaccagctgggaaagcaacctggatgctgggctcagcataggaggacagagggggcctgtgaagggtaacgctgagggaagctgagagcagacgaggtcgagacagtggaaggcagagccaggggaccctgagtggagtctccttctgctctgtccttgctttgatgatgggcagtactgcccctcctgggctcaggcttttttttttttttttcttgagacggagtcttgcgctgtcacccaggctggagtgcattggcgcgacgggatggagggtgagctcggctcactgcaaactctgcttcctgggttcaagcgattctcctgcctcagcctcccgagtagctgggattacaggcgcccactaccacgcccagctaattttttgtatctttagtagagacagggtttcacatgttggccaggctgatctcgaactcctgacctcgtgatctgcgcacctcggcctcccaaattgctgtgagctcagattttgcatttgggagatgggatgtggaatgaggggctttagagggggacagaggaggagtcttcagaggaaagagcctcaaaaagaggaggtgaagggaaggagctggcaacatgcactttaactgtaaggctcagttactcaaagtgtggtccagggacctgcgccatgagcattacctgagagctggcaggaaatgcagaatcccatgccccaatccagaaatactaactcaggattgcatcttaatagaaccccaggaaatccctatacaatccttcaagtttaagtagacttgttttaagattcctggctccaggctttgcagggatgctgggagttaaccccttaacctttctgattctcagggcttctttcagttataaaataaaaagaaaaatctatgcctctcagggctgttcatgcaactatatgtttcttgagcacctactatgtgccaggcactggggatgcaacagtgagtgctcagctgtcaaaggtatcacatcacgtaaagagacaggcaatgatccaataaatcagacaatccaataaatcagagaatcagggagggcttccaggaggaggtgaccttttagcagagacatgaatgaagagggagaccctccaagggcagccatgggatgcggcacccagctgcgcaaaaatgcacatgagttcttcttcctttgcagttcatgctgagatcaccaacacatgggaccacacaattcatccttgggaaggccaaggtgggaagtgaaatctggcccaatattgaagccataagcatatgttgaactttcatgagccatgagcaaggactcacaccccagcaggactctgcagcctgggagaagccaagtttcatcactgaggtcctgattcctggaccaggtagcagaacaggaaattgaggccaagggcaggagaga

SEQ ID NO: 1560232 - DNA, 4001 bp, Homo sapiens
gcctgggtgatagagcaagactctgtctcacacacacacacaaagagtaggtgaacaaaagcctttcctccacctggtgaacacctactcatccttcaaacccgacctgaatgtctcctcctcaaggaagccctccctgactccaccagcctgcctcctccagaggtccactaccctgataccttcctccgtcacggcacctttgtgggagagaggtcaactctcctttgtgcatgtcactttgtccacagcccctacaagactcgagctcatcttgggaccagaaatgcgcccatacaagtagaaagtggaagacgaccttccaggcaggggacaaaacagtcaggagggctggaacacttggtcagtgttcagtgttcagaaaacaaatggacagccagtatctgaatccagggattaggaccaagtctgtccacctagaatagacccggcaccatcacgcttctggaacccggaggtgccagaagcccctgcctggatgtttgcccagctgatcccagtcctgtggccccaagcaccttcttggggtccatgttgaacttcttcctgcccattgccatcttccggttccgttgcaaggtcttactgcaggagcagagagcagggttgggggtggagggtcaatgcctgggcatccctggcctcagccaaccccacgccccctaggtcatccgccccagccctcacctgccctcattggcctccagcccctccacctcgctcatggcttcactgagctcctcccgcaggcgctgaatctccaccagcagctcctgcttccgccgccggatgttctccagctccatccgctcctccggagtcaggtctgggggttctagggatcggggtcaaggtttaaaagtcagtgctaggggccgtgagcctgaattcctgcaatctgggggcggacagagctgggagaggatgtgtaaggggcttcctatgtctgcacagaagaatgggctgggggcctggattcctccctgcagaggagaaagagctggggctctaaactcttgagtcctgggggacaaggggaattggggcccggattcctgagtctgagggagaaggggaatgggtgcctgagctcttagatctgagggaagaaagggctgggggcctcggcttctaggtccattacttggaaggggactgaggccttggttttctgactccattactggcgaggtagctggggacctggttatccggactactgggtccatgaaaagtcactacagccgggggaactgatgacagctcaggagagttgggaaggtggggcgggacatcgaaggcccccgccccccaagatttctcccctccccgcaacccaagcgcccctccccggccccggcaggcgctgggctcgcccgcccctccagcgggaatggttccgccccggcctcgcctccaccactccatcccgcccctcccgccgccaccggaaacaggctcagcccaaacaatggcctggaacgcccggctttcgggccccgccggaagcccgtccagcgcccaacaaaagcggcgcgacaagtctacgactgagccgaacgcttctgggcgccgcgcgccagggggaaacgttcgcggcggaacgttcaggagaaaacgctccagcaactcccagccgaccccgcccctccccgacctaccatagacgccgtcctccatggcggctaggaaggcccgcggggaatccggggcggtcccgccagtcgggcctggatccgcgttggcccgcgggctcgggtgagcccgctcaaacgccccgggagccaccgccgcctcctcagcgccagtcctcagcgctgaaaagactcttcccttcgtcgcccaaccgccccttcagtagggaccgcccctctttttgacactgtccaatccacagtgggcgctttcgtcctccccgccctcgccaccaaaggatcgttctccagggccaacagtcgtacaaaaagccggtgtaggtatgtccggccagaggtagacggcccgcggggccaatcggagtgcaggcagggcagcaggccccgcctccgaaacaacagaaagcacttgacaggcttgctctccaatgagaagccccggaaaagtgtcgcgcggaggcggagccacgcggtacagccacctctgcgcctgctcaaaggccctggacacttggagtctaggtaaaccgagccccgcctccgataatacgttgctagggggcggtactttgttagtcttgttgctaggaggcggggctagaactggcttgtttccgtaagccacacctcctagcaggccatgctggcttctgaccgcaaaggttgccatgcaaccgggagcggctttaggcctccttttcttttgcatttcttctccgcgtatttcccctcctctcagccccttcttaccgccgaactccttctttatcaccatctatgccctccccatccccctcagcctcttcggagtcgtggagtggtgaaacaaaagacttcttcgttttttcttttttttttttttttgagacagagtcttgctctgtcgcccaagctggagtgcagttgcgcgatctcggttcactgcaacctccgcctcccgggttcaagcaattctcctgcctcagcctcccgagtagctgggattacagggttgcaccatgatggtgcatgcctggctattttttgtatttttaatagagacgggcgtttcaccatgttggccaagctggtctcgaactcctgacctcatgatccgcccaccttggccctccaaagtgctggggttacaggcgtgagccaccgcgcctggccaagatttacttttttctaaatgctatgctatttggtatcggtcatggggaatggaacaggggaaggtgaaatttagtgaaagcacaggctcggccttcctggcaccttctgccgctcagactcctccctcatttctccaaactccttcctttagcttagcatcctcctaagactcctcccttccccaagcatcctcctgctaagacaactcccctttcctcagcatcctcccacctctctgattccttctcccatctcagaggccttttttcctctctggctcccctcacgtcacggtcccccttgtcctctcatactcttgccctttttttttttttttttttttttgagacagagttttgctcttttgcccagtctggaatgaactggcatgatctcagctcactgcaacctccacccacaaggttgacgcgatactcctacctcagcctcccaaggagctgggattataggcgcccaccaccatgcccggctaatttttgtatttttagtagagacggggtttcgccatgttggccaggctggtctcaaactcctgacctcaggtgatccacccgcctcagcctcccaaagtgctaggcgtgagccaccgtgcccataggcgtgagccaccgtgcccagccacccttgcccttcttaaactcctccctcctctgaggccccttccccttccccttccccagcctctatgtcccattatttgtaacggaatgtggtcaagggactggctggaatagggaacccaggcacccctgtaaagagggaagccgtaatgggggctgaagtggtgtctgggcctcgtcctcatttgctgtccctgggctgggcaggtggagacggattcagggccaggacctagttaagctgtcggattagacatggaggctcctaatcccctcactgacctttatgagtggcccaggccctgccctccccagtggaaacccaggctgggctgccctgctcccatactcctttcaaacgaaaccccctccctgccccttcacttccaacttaacatccttccccaaccctgcgtttccattgcccccatccctacctaccccagacaccctgagctgagagagcagccagctaattaatcccatccggttattacatggggattctgagggataaagggagatggag

SEQ ID NO: 1560233 - DNA, 4001 bp, Homo sapiens
acctagggacttgggcctctcactggcatagatgccccggggctcagagggacccaggcgaccataggagctggatccagagaagccactgtccccacagaaggttgagggtggtgaatctggacctcctgtagagctgggatcttcatagaagcctaaatttccaggagaagcagagagacttcagggggtttgggtgggaaaaccagagctggggaaaggaggagatggcgtggggagagacacagggggcctcagaaatagggatacggggaacatggaggcgtcccaggcaaaccctacccctccatccatgctcacccgagctacgcccgctctcctgttccaggcccccagactccaggctcaggtctcccagctgctgtcccaggtcccagacgagaccaggcagggcctcctgaaggcatagggagagaaggatggtcagaaggcccccagtcctctgccgactggtcccctattccacgagctcatgggcagagtttcactttgacaatgaggctctcgcttcaaaggataaaagcagtacctcagtcccaggaccccctcaagatctgtgtcccttcatccccattagaaagtccttctgacgttccaactccagtccttcatgctgcagccccatctcattccctcttaggtgtgatgaggcctcagaaaacccccatctcttgccctgtctttatcagttgctacccccaatctgtgctcagagcccctcaaccctgattagaatgtccctctttgagtctaacttcaggattgctgtaaggacagtttactgctaaaaggtggtgtccaggacccccagatcccttagtcataggtctgccttcttctccaagtttttctttttttatttttatttatttatttatttatttatttattttgagatagggtctcactctgtcgcctaggctggagggcagtggcgtgatcccagctcactgcagcctctacctcccgggatcaggcaattcacccacctcagcctcctgagtagctgggattacaggcgcccgccaccacgcccagataatttttgtgttttcagtagaggcagggtttcaccatgttgcccaggctgatcttgaactcctgacctcaggtgatccacctgcctcagcctcccaaagtgccgggattacaggcatgagccactgcgcccagcctctccccgtctttgaccttctttctcagatacgcccattgccccttatcaccaagagaaggtccttttgtgagtcttccttaagtccttcctgctgcagattgcctctttcccccatatgggtaaaataggctgaccacgactcataaacgtctttgctctcccttcagaaagaacctcccaagcctcctagacagtcctgtgagtctagccttactggtactgcagcagccatcccagcacgttcctttgccctagagaccacatcctccttctgcctttggtccactcccaccaggaagctccagtgagtctacctttcctcatcgccatgagaaatttcggggagtcaggccgggcgcagtggctcacgcctgtaatcccagcattttgggaggccgaggcgggcggatcacatgaggtcaggagttggaaccagcctggccaatatggtgaaaccttgtctcccttaaaaatacaaaaactagcggggcgtggtggtttgcgcctgtagtcccagctactagagaggctgaggcgggaggattgcttgagcccaggaggcagaggttgcagtgagccgagatcacaccattgcactccagcctaagcaacacagcaagactgacaaaaaaaaaaaaaaaggaaaaaagaaaaagaaatttccatgagtctaccctggatccttcttgctgcaggaaaagagcacttctcacggatggggtctccaagacattaggacttaatctcattttagaaaagagagggtcagagccagaaaaagtctcacatgggtctgagtgaggccgggtagcagcaggcagcctcgggctgacggttgaccctcagacaaaagcggcttgtctggaccgcaggagggagggaagtggggaggagggtttgggagggcaggcacccaaccctgcctatttagggcagaaagactggccggctccccggcagccacaacccccccgccccatcccagtctctccagggcccagcctctcccatccccctagaacagaagcccccatccgggcctgtttatttgaggaaggtcaacaaatccttccactctgggctcctgccctgggtatattgagatgctcacagtgaagtcatctttgagcggaactcaaaaaagcagctgaattgtgcagcatcaggaagtaactaaaaaaaaatctctcggacctaccatgtaccccatgtcacgtccgtcacaaatcactggcatgctcactcccctctagccacgcctggccttgccaccgtccctcgaacataccatgtatgcgcctacctcgggagaatgtttcccccacataccttccttgcttcattcagatctttggtgatctcttctctgacacctttccaaaatagctcccctgtcattgtgtaccccgttgccctgcttttcgggttttttctacatatcagtaatgacctcttgatttaaaattatacatcaggccaggctcggtggctcacgcctgtaatcccagcaccttgggaggccaaggcagggaggatcacttgaggtcaggagttcaagatcagcctggccaacatggtgaaaccccgtctctactagaaatacaaaaaatagccaggtgtggtggtgtgtgcctgtaatcccagctacccaagaggctgaagcaggagaattgcttgaaccagggaggcggaggttgcagtgagccgagatcacgccactgcactccagcctgggcgacagtaagatttcatctccaaaaacaactaaaataaaataaaagtatacatcaaggtatcatttgtttgttgaatctctcactagaatgtcagccctaggaacgcggagatttgtctgtttagctcacaggtgcacccccacccagtgcctagaacagtgcctggcacaaagtgggtgctcaggaaatatttaatgggctgggtgtggtggcttatgcctatcatcccagcactctggaagtgccaaggcgggaggatcgctggaggccgagagttcaagaccagcctaggcgacatagtgagacccagtctctctctctctctctctctctctatatatatatatatatatatacacaaacacacatatatatatacacacatatatatacacatatatacactatatatacacacatgtatatacacatatatgtatatatatgaaatttatttatttatttatttatttatttatttatttttgagatggaatctagctctaccgctcaggctggagtgcagtggtgcagcctccacctcccaggttcaagtgattttttttttttgcctcagcctcccaagcaggtgggatgacaagcatgtcccaccacacttggctaatttttgtgtttttagtagagacagggtttcatcatgttggccaggttggtctcgaactcctgactacaagtcatccgcccacctcagcctcccaaagtgctgggattgcatgcgtgagccactgtgcctggtcttttttattttatttttgagacaaggtctcactgtctcaccaggctggactgcagtggcacgatcacggctcactgcagccttcacctcctgggctcaggtgatcctaccacctcagcctcccaagtagctgggactacaggcacatgccaccacacccccgctaatctttgtatttttttgtagagacagggtctccctgtgttgcataggcttgtctcgaactcctgggcttgagcagtcctcccgcctcggtctcttaaagtgctgggattgcaggcatgagccattgcacccagctgtctatttt

SEQ ID NO: 1560234 - DNA, 4001 bp, Homo sapiens
actagagaagtttatatttagcgcttctctgctcctcctcctccccccgcctgccaccgcctcctccctgatgctgggacaagctttgcctagagactggggggtggggggacaggcctctccactatcagctcgtgccgggaggacagagggctgagggggaggaggggacagagggaccgaggagagggagactgaagggcagagatggggaaggtgaagggtgaaaaggggagagaccgagggcagagggggagaggacacagctacccacagctaccccaacctcatgcctcgcattctccttgtcaggatggaaggcgccttccaagccgagccagcttggggtggggggagctagcgaaggcccccacaatccgtctctaactttgggagggggtggggcctcccacagctgtttctgtttccagaaaagaatgtgcaggggggtcccactcctgagagggggaggggccgggcgtgcagccccgggagcctggcttcagtcttcctccccactccccatctggggagggggcggtcgaggtcagcggcggggagagccccctccactgccacctcggctcaggtttcccgaaacgggaagctctggccacacacaggcttggggatggggatctgccgtggagccagggtgtgcgggctggggggaggggaagacagactgagcctgggacgtcgggcaagaagaagagagcgaggtgcagacaggcaggaagggaaggccaaggagacagatgcagagggacacagagatcacagagacagagagacaggatgaagaaagagaagcagacacagaaagtcacagggatgtggcaggacggagagagtgacagaacccaggacgagatcgggagactcaaggaatgacatagaaaggggagaggcatggggcgtcctcaagtcattccggagacctctgcccatcttccaccatgagaacacccagagtccagaagtctcccccaggcgctgcctcgacctgcctccccttgggtcaaggagagctggggccaggtaggaagcaggggaagtgtcaccaaagggtcaagatcccagtggggggtcctcagggactgtgagcttcctctcagcagtggtccctccctctggaggccctgagattcccctcctcccaccccgccccctccagagatctccaagcacaccaggacttagggaagatggagccctggtggcggggcccagagaagggcatgtttggagcctggctgtgtcaccttgggtgagtcgcttgctctctctgagcctcaatttgtttctctgttaaatggggactatcaccccgtttcccaagccgcaagaagacaacgcctgcaaagtacccggtctcgggtttgacacatacttggcgcccacaaggattttctttggggaaggggtgtaagagacagggcctgtgtttctcacgaggccccagtgggggcgatgcagttccccctcccccgatttgggggcggggaggccaggtccggcccgccgccggaactccggggtcgccagccccaccccctgtcctttctcactccctgcctacccgggtccccaacccccgcccggtgtctgagcatccaaccgagacagacagacacagacgggggtggagggacggacggacaggcagccccttaccagctgctcctccagggccgctgcggcccggcgcgccgccgccgcatcttcatcctcatcggcgtcctcctcgtcctcggcctcggcgccccccattccgggctgggccagccgcagcgcctgctgcacgcggtactcctgcctctcccggagccaatgtaactcgcagagcccggccaggctaccctccagccagccccgcagccggccccgctcagggctcaccgggaacgagaaggcccggatcatggctgcggccccccgccccagcccggccgggccccgcggccacccctctcccggtcccacctccccgccccagcagcctgcccgcccgcccgctggccgggctgtcaccgtctcatctgcataggcgcccgcccattgggccgcccacccgcgccttatctgcatggccacgcccccggcgaccgagcaacagccgcctattggcgaataagcttcctgacgaagactctcgggcgtgcaaccgcaccgcccaacacgacgcatgctcgcaactgcctactcactccgctcgccacgccccctccgtgcaactgcctcggggccctggccacgcccccccacgcgtcacaatgaaacaagcccgcccttgcttcaatgccattggtctgtgcctggccggtcctgcagcaggttccaccctcttgcgggcgagcgctggctaccattggactgtccggcgcgaggggaagggtgatctataaatagggaatgggtacacgtgacagtttggcagctgctcctacccctccaccccgcccaaccttcagcttctgaggctgcgcagggggagaaaagggttagggggtcgagccctgacttcgcctcctcttccaagaagccttcccagacactcagctgtaaaaccagacggacgtcctccgatgaaattgtttctacttagggccggcttcaccggcttggaatccacttagaagggtcttcgcgcttggttgaatgttctgcaatttctgtcttgaaatttttagtttttgagcaaggggccccttattttcactttgcactaggccaaatatgtagccggtcttgctgctaagagtctaagatcgattgcattccaaattctggaattataagaccctgggtggaagattctatgctttgaccagaagagagtctaagcagcttttgtctcccaggtgctaggaggatgtgtgctcatcattcttccattccaggggcctttgttctacgttctaaggggctttgttctcagccttctatgatgctctattctcaacgttctctggtcctaggagtctgagcctgacattcgtttccaaggcttcctgctgtctctccaggctccgcaagcagggctggggcaccctcaggcggccaatctgtatcactacgccgagcctgcctctaccaacttccaagacctagctctaatattcatactcatctctcagacagaccttggctccctaaaagccaaggcccagaagatcatacaagaaattccctcttttatgattccccgtgcacgaagtgaccttctggtggtgagatggagagaaattgatagtggcgatagacagcaaagtctccaggagccagacttcctcggggtgagtcacagatctgtcactttccagctgtgtgaccttggaaaacttacttaacctctctgtgccaccgtttcttcatctgatcacgggatcataatactggctgcctcatacagttgttctgaggattcaatgaaatgtattaggtacttggagcagtgtcttccatggattaagagccacagaagggtttgacaaataagtttaaaaactaatctagtaagtttccggggggaaatgtcttgaaatttattagagacaacctttattcagtcttcctcttgttcaaaatagacttagaaaattagtcgggtgtggtggtgcacacctgtagccccagctacttgggaggctgaggcgggaggatcacttgatttcctttttgacttcttgatgcttttattaatgatgatgccaaaagatttctggagaatcagccaggcgcagtggctcacgtctgtaatcccagtactttgggaggctgaggcgggcagatcacctgagttcaggagttcagatcagcctggccaacatggcgaaaccccatctgtactaaaaatacaaaaattagctgggcatgatggcacacaccgagactgtggcactgcactccagcctgggtaacagagggagactccgtctcaaaaaaagaaagaaagaaagaaattgagagagagagagagagaaagaaagaaagaaaaa

SEQ ID NO: 1560235 - DNA, 4001 bp, Homo sapiens
ctctgtctcaaaaaacaaaaacctgaaaagaaaagtaaagaaggccgggtgcagtggctcatgcctgtaatctcagcacttggggaggccgaggcaggtggatcatgaggtcaggagtttgagaccagcctgaccaacatggtgaaagcccgtctctactaaaaatacaaaaattagctgggcatggtggcgtgtgcttgtaaaaccagctactcggaaggctaaggcaggagaatcgcttgaacccgggaggcggaggttgcagtgagctgagatcgcgccattgcactgcagcctgggcagcagagcgagactctatctcaaaaataaaataaaataaaataaataataagaaaagaaaagtaaagaaaagccaagcaggatatgatgataagatggcctgatgatggtaccagtaggaagccaactagcaccctagggggaagggacagcagtatcacaggagcccggaagcatccaacagaaagcccttagcccactgcctggcacaaagtaggtgctcaatgcatgttagttcctcctatgatcccctccaagtggatctatcatctctcccccaaatcctggtccttctctgcttaaatcctgagccatcttcctcataagagacttctcattggcctggcgcagtggctcacgcctgtaatcccagcacttggggggccgaggcaggcgggtcacctgaggtcaggagttcgagaccagcctggccaacatggccaaaccacgtctctacaaaaagtacaaaatttagccggacatggtagtgcacatctgtaatctcaattacttgggaggctgaggcacgagaatcacttgagcccaggaagtggaggttgcagtgagccgagattgtactgctgccctctagtctgggtgacagagtgagactgtctcaaaaaaagaaagagagagagagaaaagaaagaaagaaaggaaagaaagaaagaaagaaagagaaaaaaagaaaaacaaagaaagaaaagaaagaaagaaagagaaaaagaaagaaagaaagaaaagaaagaaagttggtatatcaagcaagagacgggctcacacctagaactcaggaggctgaggtgggaggattgcttgaggccagaagctcaagactagcttgggcaacatagcgagactcccgtgtctaaaaaaacagaaagaaagttggtgtctgaggaaaaggaggctgatgtgtagaagcaaagtaactgagggggagagtgggaggaggtgaaatcagggaggtaacaggatcagagagtacagaaatttgtgggctgtgaagaggacttgggcttttgttctgagtaaagtgggagccatgcaaggttctagggggagggggaaccagatctgactctggtgttcacaggcaccctctggctgctgagtggaaaaatagactggggggtggagaggggcatgatagtggaatcaaggagaccaggatagaggaggcttgggtcgcattttacaagggaggaaactgaggcaccgagacattcaggtggaggatacaggacttgaacccaaatctttcttgggccacagcctgtgccttctgccaatggtgagacccagccctctcctccccacacccacccactcacctgaacgaagggcacagccttacacatcccctggatcacttcctgagggttcagcggcagagtcacagcagccacctcgtcttgcccacgctgcagcctgcccatccccagctgcctggctttctgcaggcccaagaaggccttccagctcccaagggcagaagctggcaccagtgggggcagggcccctgggcccagagcccaggtctgattggctgcagcccaggactgaggtcgaggagactggggttcaggcctccctgagcctgtaggcagggccccgctaagcaggcacagaagagtggatagctggccaaggagcatctgcttgtccgtgcgtctgtctgcctgtctgtctgtccggactgggctcaaggtcactagcagtcgaccctgctgtctggtgagtggcatctgagccttctgaacctgcttttaatctcttggcccctcctggatagcctgggaggcatttctgtagacccacagcgggggaggagagtaaattcagaccagctgggttcccacacctcctcccaacttgctgagagacatgggggctggtcctgctgtgtgcgagctgtggggaccaggaaagacaggtctggggccaggggccgagacacacaatgtctgaagaccctgggcagctgcatttccagtcctgggaccccgattctccaattagcaaaagcacactttgggtgaggctcagtggctcacacctgtaatcccagcactttgggaggccgagacgggaggatcacctgacgtcaggaattcaagaccagcctggtcaacatggtgagacctcatctctactttaaaaatacaaaaattggccaggcacggtggctcacgcctgtaatcccagcactttgggaggctgaggtgggcagatcacgaggtccggagattgagaccatcctggctaacatggtgaaaccccatctctactaaacatacaaaaaattagccgggcgtggtggtgggcgcccgtagtcccagctactcgggaggctgaggcaggagaatggcctgaacccagaaggcggagcttgcagtgagcggagatcacgccactgcactccaacctgggcaatagaccgagactccgtctcaaaaaaaaaaaaaaaattcgccagttgaggtggctcacgcctgtaatcccagcactttgggaggccgaagcgggcagatcacgaggtcaggagtttgagaccagcctgaccaacatggtgaaaccccgtctctactaaaaatacaaaaaaaattagctgaacgtggtggtgggcacctgtaatcccagctactcaggaggctgaggcaggagaatcgcttgaacccaggaggcggagcttgcagtgagccaagatcgcgccactgcactccagcctggacgacaagagtgagactctgtctcaaaaaaaattaaaaaataaataaaataaaaatacaaaaattatggccaggcacggtggctcacacctgtaatcctagcactttggcaggctcaggcgggcagatcacctgaggtcaggagttcaagaccagcctggccaacataagtgaaaccccgtctctactaaaaatacaaaaagtagccaggcgtggtgtcacatgcctgtaatcccagctactcaggaggctgaggcaggagaatcgcttgaacccgggaggcggaggttgtagtgagccaagatcgcgccactgcactccagactgggcaacagagtgagactctgtctcaaaaaaaattaaaaactagcataccttgcagccaggtttcttgggttcggcctaggcattgcaatttcctggctgtgcaaccttgagtaaatcccttaaccatcctggtccctaccttcttcttctgtaatatgaagataaaacagtccctatctcattgggttattctgaggactcaaggaggtaatttatgtaaggagcttaaaacagaggttcctacacagtaacaccatgaatcagctctgagtaacattattgttgctgggtttttgtgttcttttttttttttttttttttttagacagagtctcactgtgtctcgtctcactgcaacctctgcctcctggggtcaagtgattctcctgcctcagccccccaagtagctgggattacagatgtgaacaactatgcccagctaatgtttgtatttgtagtagagactatgttggccaggctggtctcgaactcctgacttcaagcgatccgcccacctcagcctcccaaagtgctgggattacaggcatgagccaccatgccctgccagttctttttattttattatttttttatttgacacagggtcttactatgttgcccaggctggtcttgaaaagcagg

SEQ ID NO: 1560236 - DNA, 4001 bp, Homo sapiens
ttaacacagggagatttttttttttttaaataaatggggtttcactctgttgcccaggctacagtgcagtggcacgatcatagctcactgcagcctcctccaactcctgggctcaagccatcctcccgtctcagcttccctagtagctgggactacaggcatgagctaccacacctggttaattttttttcatttttattttttgtagggatggagtcttgctatgttgcccaggcagaagacacatcttttaataacaaaagcagctggcatctgttgctctggtgccccatgccaggcacggtcttggctgctgtaacggctcaattacttttctccccacaggaaacacacagaggattcccaagcaggaattcacagccggggctgtctgactccacggcccaaattcgttcccccaccgcatgatactgactcattccttctcagcatacaggataaagaacaggaaaggagagctgctgttcagaaaaccccacagcgcctctctcctatccctggagcccagccgtgcgggcagacagctcacctgcccagctcctcccccatctcataatggtcctccacgtcctcctgcctgaacgtggacatggcggccggtccgccttccagcagcttccactccagggaaagtgcagtcaccgcagcctggagataggacctcaggagtcccctaatggcaaccctggagaagacagggaaagacagaagtgaggaactgagacaccacccttttctcctagattaatggacagacctgtccagcaaacacaagcctcccacctctccactctgaagctccaaactcgacaaaaagaggtgctgtgtttactgggctgggtcctgtcatgtcacctcttagagccccataaccactcaaaagtttggtaacagccccactgggccaccttcaccccgcaaaactctctccagacacataattctgatttccccgacgctgcctgcgtctttttttgcctctcactcctagacttctctcaacctgctcagccaaaatcccccaccattcctgcacgttctcctcaacctcaaatcccagggctaccttactccctggccaatgtcttaacgaagttctcaagtctacttcttttgttgttggtgttgttgttttttgagaaggagtctcgctctgtcgccctggctggagtgcagtggtgcaatcatggctcactgcagcctggaactccaaggctcaagcgatcgtcccaggcctcccaaagtgctgccattccgatcaaaattcccaagttactaccttaacccctcctggtccttgccctcggcaggtctcttaagaccctcatcgatggaacacccccgcccacccccaaccatctctgactccctccaattctgaattttccaagaaccggacgacgccttccacgctcctgaaagcccactttgcctccctcccccgctgacctccactgtcctcgcaagattaacctcttcctccacgctccatgtatcaaagtcccccaaccgccgtctcccctaccccccaaaacgggccgccaaaaagggccccatctgagtctcctccaccgtcctctgccccttctcgcccgcaatctccgcacaagcccctaggcagaccccagtggctccctttgcagaacctccccccgcccccaaggccttgcccatccctaaggctccgctccagcatccctggggccgctacgcccctcgcacgcccggccgagccctttccccggcccggtcacccagatgggtccccaaacctaccagctcctcagattctctccctccctcgtcctccgcgggcccccgaagcgccgctctggccccacccagccctccagcctcggcccgagcccgctctttaccctccgcagcccggagaatacggccggcgccgccgcgctggccaccgccgccgcctccagaagccccgcgcccctgccgccgcgacgcgcctgcgccgacgtcaccgcacccgccagtgcccacccccgggaaacgaaccccgccgcctattggccggtgcgcccgccgctcgtgccgcacctcgacgtcccgcccccagctgccttttcggcacccacacccggatgcagcctcaccactggctgaacactcgccatccctgatttcattggctgcagtcgacgctggtcaagcggacggaaaaaaggccgacttccggtcccttcatcgccccgcccgcctctcctctgacccaggtgctgaagctgcgagaagtgaggctgaagccctgcatcccgcttcctgccttcctggagcaccggttgggcgaatggatggctcacctgtggccgagcgcgcctggcagctcctggagtggaccctgggactgctttagtccctatgtggcagtttcctccactgaaaactgttacccacattctaaatacttaaaatgcaaatgaggtcaatctggggttgtcatacacagggtccctcttcgtctcaaaatagagggtaacagcaagcattttattgagacatagtatgtgccaactgacaacactgggaggtatcaggtttgttttttttttaattttattttttgagacagggtctcactctgtcacccaggcaggagtgcagcggcggtatccagctcactgcaacctccacctcccgggttcaaacgattctcgtgcctcagcctcccaagtagctgggattacaggtgcccatcaccacgcccggctaatttttgtatttttagtagagacggggtttcaccatgttgcccaggctggtctcgaactcctaagctcaggtgatccggcacctcagctttccaaagtgctgagattacaggcgtgagccattgcgcccggcctaaattcattttttattattattttgagacggagtctcgctctgtcacccaggctggagtacactggcacaatctcggctcactgcaagctccacctcccaggttcacgccattctcctgcctcagcctcccgaatagctgggactacaggcgcccgtcaccacgcccagctaattttttgtatttattagtagagacagggtttcaccgtgttagccaggatggtctcgatctcctgacctcctgatccgcccgcctcggcctcccaaagtgcaggaattacaggcatgagccaccttgcccagcctttttttttttttttttttttttttgagacagtctccttctatcgtccaggctggaacgcagtggtgagatctgggctcactgcaatctctgcctcctgggttcaagcgattctcctgcctcagcctcccgagtagctgggactacaggtgcacgccaccactcccagctgatttttgtatttttagtagacgcagggtttcaccatgttggccaggatggtctcaatatctgtgatccgccggcctcggcctctcaaagtgctgcgattacagacgtgagccacaagccggcctttatattttttatttacattttcaacgtacaatgggttggccaggtgtggtggctcacgcccgtaatcccaacagcttgggcagccaaggcgggcaggtcacttgaagtaggagttcaagaccagcctgctcaacatggtgaaaccctgtctctactaaaaatacaaaagttagccaggcctggtggcacatgcctgtaatcccagctactcgggaggctagcgcaggagaattgcttgaacccaggaggtggaggttgcagcgagccgagatcatgccactatactacagcctgggtgacggagggagactccatctcaaagaaaaaaaagtggcagggcatggtggctaacgcctgtaattccagcattttgggaggccacggtgggcagatcacgaagtcaggacatcaagaccatcctggctaacacggtgaaaccctgtctctactaataaatacaaaaaattagccgggcatggtggcgggtgcctgtagtcccggctactcgggaggc

SEQ ID NO: 1560237 - DNA, 4001 bp, Homo sapiens
cagtggacactcctggcagccggggaggagagcagggtccatgcactccagttctcctccacgcagcccgtggcgtccgggtggcctgcgagcctatttgtgctgtgggtgggacccctccagacccaggctgggaccccagctgccccacttcccaagggtgtccatgcagggaggggacaggagccctcacctctctccagcctcctcacagccacggcttgggtggagcgggcccacgttcacccgcggcttgaatggacctaatccaggtaccccatctgggagccctttccctgcctcaccccaaagtcgatggctccatcccccatggccggtggactccctgctcaggcccatccctgcaatgtccctcacacaggcacacggaccctgccaagtcaaagtgcctggagaggactcacagcacgggctaggcaggggctaagtgctttcatcctggttctccaacggaaggtgctcttttgttttgtctggggagggggagagcccacaaaaggcatttcccatccacaagtgtgacctgtagctggtgcgagaggcgcctgccaaggcaaccctctagcagcaaccgctcccgcactagccaagcccagcgctgagaacacagggcgctgctcaaagctaagggcaccgagaaatttacaccagaccactaggaaacccaacccagactgttttgccggaagaatgcaactctaaaacgacgtcgctgcggcaggagccgctcctaccaaagaatggcgccgagccctggggcacagcgaaatgaggtttcccggccccgcggggtccggagcaggtcaggctcctataggaggggacgcctcggcgcagcaaagatccgcgggcccgtcgccgcctcggaagcgctgactctcccttccgcagctcaagcccacccccggcggggaggcgccgaggcaacgtaaacacagcaggccccggctgacccgagccccctgggccctgggtttgcgaacccctcccgaccttaccactttgggggggtgggatgggagcggggagcccggagccccgagtgggataggttgggcggtggcagaaccggaaccctcgcctcggctcgccacgtgcgccgcccgccaagtttgggcgcgcgctgggggcgccccggaccaccccccacgccacagtttggggtccccctggccaggaagccgggaggcggcggcgacggcgccctggactccccgcagactccctcaggttctcattcggggtcccccaggccaggaagccctacaggcggcaacggggacgctccagacccccccaagttcccgttcggggccgccacaaccaggaagcggcggcgggggcccctgaacccctctggctcccattcggggtccctcaggacgcgcagtcgggaagcggcggcacgggcgccccaggacacccccccaggttgccgttcggggttcccccgaccaggaagtctggaggcggcggcggggccccccggacccctcaggctctccttcaggatcccccaggacgggaagccgggaagcggcggcgggggcgccaggacccccccagaccccgggcacccgtccagggcccccggcgcgaagccgcggcgagtccgggtcccgagtccgcccccggccggcgtgaccttgacggggcggccccggggggcggcgtctgaggccgggcggcggggagcggcgggccgggctcggggcggagacgcaggcccgcgccgctcgtcctcacccgatctcgtcggcgcccgagttgttcatggcggcggcggcggcgacgctcggcgctcccgggcctcctcgctcgctcccgcctccggaaggtcacccgctccgtcgccctccccacagccgcggcccggatctgcgcaacggcggcggcggcggcggcggcggcggcggcggcggcggcggctgcctcctcccctcggcgccaacggtcaccgcgcgtccccgcgccgccgcgccgccgcccctgcgcacgcccgggcgcgctcccgcacggggtctccgggggcgggtccaggggtactccgtctgtgcgtgcgtccctgaggcggatttcgcgccgccgcagtcggggccgtcgcgcgttttcctttctcctcggaggctcctggcgttgccgcggggcacgctgggaaatggagtccctgcgctggccccgcccctgcaaggggaggatgcgcgcgggccgagccacgtgcgtgcgtgcgcgcgcgtgcgggcttgcgtgcgcgtgcgcgcttgcgagaccggcgctccgggctaggcactgtgggcgcaggcgcggctgccgcttcctctttaactcttcactcggaagcggtggagccgcgtggggcgctgcggggagtgggagtgtacccgcccgcaccccaggcgggcggacggagcgggaacggcacgtgagcgtcccgcgcgaggctccttcccctgtccgcatttcacagaagaggatcccgagggtccgagaggctgagtcacttggccaaggtcacccagttcggggctgaactggaatcaaatcaaaacaattaactaaattcaatgactatgaaaagatattattgaccccccccccaagtgctattactattaatagccaaatactgttttagttgcatctgttaattgcatacatcagtggttcttcttctgggtgactttgccccctaggggataacttggcaatgtctgaaaacacggttttggttgtcacaacttgagtgcggggtgctgctggcatcgagtgggtccagaccagacatgccgctcagcaccctgcagtgcacacgacgaccccccaaaaagaatgatacccgtcctccaatgtcagcagaaggaggtggaaaaaccggtctaggctgacggtagtaaacaggtgacccgcagggttttgtaaaaccgggtacgtgctgcctactgcttttctccttaatctcacagcacattgacagcctgatcgtttggtttattcatcatcacagaattaaataaatacaaggaacaaggccgggtgaggtggcgcacgcctataatcccaacactttgggaggccgaggatcaatttaggtcaggagatcgagaccagcctagccaacatatatagtgaaaccccgtctctactaaaaatacaaaagaaaattagccgggcgtggtggtgggcgcctgtaatcccagctactcgggaagctaaggccggagaaatgcttgaaggcaggaagtagaggttgcagtgagccgagatcgcgccactgcacaccaacctgggcaacagagcaagactccctcttagaaaaaaaagggccgagcatggtggctcactcctggaatcccagcagtttgggaggccaaggtgggcggatcacgaggtcaggagatcgagaccatcctggctaacatggtgaaaccccgtctctactaaaagtacaaaaaattagctcggcatggtggcaggcgcctgtagtcccagctactcaggaggctgaggcagtagaattgcttgaacccaggaggcagagcttgcagtgagccgagatcgtgccactacactccagcctgggcgacacggcaagactctgtctcaaaaaaaaaaaatacaaggaacaagatcacagacaaatagtacaaaacacttttttttcttttattttgagacaggctctcactctgttgcccaagctggagtgcaatgatgcagtcatagctcactgcagccttgaactcctggactccagctatcctccctcctcagcctcccaagtagctgggactaaaaccccatttaaaataaaactggccggatgcagtggctcatgcctgtaatcccagcaccttggaaggctgagatgagaggatcgcttgagcccaggagttcaagaccagcctggccaacatgacaaaaccccatctctacaaaaaataataataataataataatacaaaaatcagccaggtttggt

SEQ ID NO: 1560238 - DNA, 4001 bp, Homo sapiens
caggacccgccccgcccccttcgccgcacctgcgcggtggccgctggcggtcccgagggcagcccgggcgggggcgtgcccaggagaggagcggggggaagccgagccgcacgaacccggccctggggagggtgcgggcgtccgcgcgggcgacggctccggcgacgggccaccggggggcggcgggctgggcgggagcccgtgctccagcaggaaggcgtccaggtctacgtactccacatcgccgaacggcagcgtgcgctcccacagcagtggcgccaacagacccggggcgggcaccggccccgggcgcccccgcggggaccctccgcccaccactgccccagccggggcatccgccgggcccgcagtctccaggcctggcccaggggttgtggctgcaggcagggccgccttgcgctccttttccttcaggagacctgcgggccgggaaagacgggttgggatgagggtgaggtgggggagatagagatggagaagagaccccgagtccgagaggcacagggcggagatccagagaaagaggggacggggggtcggagaggagagacgggagaaaaagggacggagacgcagagtgggagagagacccagaaagaatggagacgggggtggcagagacaggtggacagattcacagagatggggacagaatgccgggaaggaatagacacacagaaagacagcgaaccagagaaagagagacggaagttcaggaataggggggcagggacagggtaggtggagggttgggcaggtgagagaaaaaatgacagctctgtaatttcactgtaattacccaacccccatcccctgcgcgctgtacccccttcccctcccccaccatctgtaaggggcaggaaggggctctattcctggggcacatccctcatccctagactccatgtgaccccatgacgccccgcccaagcccgtgtcaccaccgtgtgagcacccgacacaccccctccctgggaccccaggggtccagactcccggaccaaaaggaagaggaggctggggcctacactcttgtgaactaagcggggaggacgttggggacgttggtgcctgggtccttagggtggacgggcttcagagccggcgcttttgggtcctgggcgctaagggatctaggggcctaaacacctgagtaattgagtagattaaggttgggaagatggactccccgcacgcaggtttctatgggaccccaccccacggcacctgagtccctaagggggtagggtgtccgaagtgggtgagatgggggttagaactcacagctggccggctctttgggcttgctggtcccctgcagaaggctccgcaacccaagcagcgctcccccgccagggggtgtcccggccgggccgcccagcagcagaggggccggggtcctgtcgctcacaggccgcgccatcgcctggcacctgcccccaggctcacgggttcatggagaggcgaagggctggcctgccagtcaccagcacactccagtggtttggacgagtgtctgcccaggggcgggcgagtgtagcctgcaaccctccagtatccagaacgctgcaaatcctaggagcgacggggatttgaggtcctcggtgcagaaacgtgcaactcaagagggtcccgggagatcatgcaatctgggcgagggggtgtccagatcaagcggtcggctctttgcaaccgagggtgagaggggactcaaggcgctccttctacaaggtgggcgagcctggctcttgcaaaatctgcagctctcgcaacggaaggcgctttgcaatctgcaccgagaggtgtgcgcggaggggcggaggagggggcaggaggaggcggccgccttgaggcgtggccaaagcaaacttctttcgcggaaaaaaaaatccaaaccaaaacacccgacgccacagcgcgcgcccctcctccgggtccccgcccggcgcgtccagccccgccagcctctatgggcatgcaacccagccgcgtgcctccctccggctgcaaacacggaccaatcgtctccgacaccttgagacgcacagccaatggggcctctgggtccgccagggcccaggagggcgcgtgaggggctcagcgcgtgaagttgccttgcctttcggtgggaggcgggacactgacctacatttgcccaatgggaggcggtactggggggcgggaccgtgacccagtttgggccaatgaggcaggcgggagggggaagcacatggctctgctcgtgctgcctgatggcgaggggggtgatggggggaaaaggggcgccgcttaaaggggccgcggtcctaaagatggttttgagaagcaggaagccaaaataccgagagcggaggtttagaaagaggaagattggtttccggaagaagtctgttctttaatacccaaatgtttccccaccgcgcctagaatcagaccactgagaaaacaggaagtattctgtccctttaatagctttgttttaggggtaactcccctcgccttgtggggaggcttaggacgggcgggtgcaatcctcgaaggggagtctcagcgaccatgggggacaccatccactgtaagacagagaacaacggcagggggcgtcagtataggatggaaggggcggggggtgtgcagggggcgtgggctgcgccgcgctgggccctaccgtcggaagtctgcgagcggggaaccagaatgtactaggtcgagaagcactgggctgaaccacaagaagccaataggaggggggaatcgggacgtccagattcagcagtaggctgaactacttgaaggtcttcatgggggggggggggtgtggactgtaccatgttgcgaagccgggggtgtgtgagattcctgggctaaaccacagggaggcagaggtggagggaaggggttgtaccttgtagattctcagtaagggggaagggagcatcagattgtggaacagcgtaaggtagtacgacttggaaagggagagaggatccaaattgtaccattttggaaattcacagtaataggaagcacagaacagtaggtaattggaccataggaaggcaggggtcaagggttatagaccaagttacaaagcagtgaagaggaaagacaaatcgtgggctagcaatggcctagggctggcaggtggactgtaccacatagacatgtagggaaagagagaaaaagagacagctcacgaggctagaccatatagacgcaggaaggaggatgggactgaatcacactgagacaccaaggggagacacatataagagggttagcccaagacttagagggggtgcagactggaccataccatgcaggcggtagttggggcctcggcagcgcctctcggggtgccgggggtccctgttgcccctcagtgccctgtgggccaagggctgcaggggccggctgttaccgctgaggctctggaagatctgagatggaggattctggctcaggagtctcagggagtgcatctgcagtggaaggagggtgggaaactgggagtgaatagtgaatggtcttggtgacgtcacgcaggaaaccccgcccctgggagcaggtgggcggggtctgttctcagccccacccacccccaaggtggtctgaccctcttacctacttgagttcagtctatgaggagagggagggcaggtgagcaaggggatgcccaggccagtgagtggagtacccaggcctaggaagggcggtgcggacagagggtcacctgaagggaggtgatattgagggcccggtcaatgaggatccaggtgacagtctcggagcagggcggggtgctgagagagccctgataggtgatgaagccgaaggattcagggaacaggagctccaggctcaggtcttgaagaaagtaggcatcatctgcgggaatatcaggccagagtaaagagggatggcactcttgaaccccctcgtgtgtgaccactgcccccagcacgccagggacttactct

SEQ ID NO: 1560239 - DNA, 4001 bp, Homo sapiens
cacagcggccaggtcagggcgagcccaccactcccgcccacctgccccctttgcctgggcccagcctcaccctgcatagaggaagtcctcatccacaatgttcttgagggacacgcacacccggggaggcagcttccggaagaggcgaggggagagctgtccgctgatctggggaaggggtggccagggcacttcaggcaccatctgcagcccccagccccctcacccacggcagagaggcagagcggctctcaccgggtccagaccggcccagcccaccataatggtcaaaagaaggccaagctctggaaggtgggaacaactgaggcagatggggacagtaaagccagatggaccgcgcttgagccttcatctccaccagggacccaggccaccttcccagttccatacctcttcagcctcaggtccctcttgactgagcccagcgtcaccgcccccaagaaagttccccaatcaccctgtcccacgctgggccacctgcttccctccctgaaggctgtccctaagctgtgggtatttatcctactaaggaggctgggacagagtcctgacctgcacccatctgttcccaacccaccagccttcaaacaagggggctcctcctccccggggcagctctggcctctgctgggggccagtcgaggcagatagaagggtgagcctaaccaatgacccaacgcccccttcccaattaactaccgccttccaacggaatccaagggaatccctcatccccaaaacttcaccgcggaaggatctgcggggactgacaggcagaagccaggcacagggatatccgaacagcctcagtcttgctacccaactctgccttcaagacattccaatctgatgggaagagtcctgtctgggaagctccctgtctgatgggagacagccctgtccacatggaggtctcagtctgacggaggaaacagcctggccagccaggcccaggccgacaggggagacacagtccctgcccaaggagcttccaagctaagggcggaaccacagccaagcccagggagctcccaggctaagggcggagactgtcccagcccagggagctcccagtcaaaagggggagacacagcactgcccttacaaagctaccagcctcacggagaaggcgcagtccctgtccacagagacacagccttgccccagttactgcccacctgcaagagatccacatttctgccctccagagctcccaaactgatgggggagagagacatcatcccccagctctgggagtttccagtctgatggaggagacagagcctgcttcggtaactctcactctgcgggggaagactcagccctatccagggagctcccacactttcaatggggaggcccacccaggtactggaactcccagctcatgtgtggtcggggcttgggcagggagaggaacatcaggcggaggaagcccaaagccagcggcaggggctctgcaaagggggcgggaaggttccattatggagcaaccatgggagcagagctttgaaaagcctggatcgcccccttcctcctgattctccctgcggcctctggggtcgcctccctccgagccccctccctggggccccgcccccaaccccctccatcccagcccctttgccggtcacccgacacaaccacctgcatccaggcccccaactgagccccctccatccaagccatctcccccgggccccgcccaggccctgcatccgagccccctcccctggggccccgcccccaacccctcaccccgcgaacgccctcctccctccgcctccctcgtccctactccccaccctccggcgcgctccccactccggctccaggcctcaccttgacccgctccagctgcttgaggacgtgctcccgccgccgccctgctgcccgcttccctccggctcccccggggccgccgccgccgctcccagccccgctgttccgctccgatttcgagctgggcgccattttcaccccctccctccacttccggagcaaccggccccttcgccccacccctgccgcctcctcattggtcctttttcgggacagcggcccgccggttgggcgaaagcccgcactcgcgctatgcctgtccatcaaagccatctcgactcttgattggtagcgacagtaacagcccccgcggcccgttgccgtattcccgccccgccttaaggacgtaccactcggaggtcccgtttgttcgccctgcccagataactttgatctgataggtgaatatctctgtctgtctcaacggcgtcacgccccctgtggctggcgggtttccatggagaccacaggcggtccaggcccttgggcggggcgacgggagcctgtggtccaccaaggctcgagaatcctcagccccgggctgcccgcgcccggtccaggtgggcaaaggcctgacgagcatacttgggcggcagagccaggccgaggaaagagatttacaaaaaaggaaaaaacgatgggattcgatgaaagcttgtttccgatgggcgggttggtgggatgatggtggtgataatgatagcatcaatcatggatcgctccacatgtgacagacacggttctgagcttaaacagttcgatgtggcagggccctgttgtgccaattatgcagatcatagcaataaaaataattgttgaaggtccgctccgtgcatcatattcgtatacattacctcatttattttatttttttagacagagtctcactttgtcacccaggctggagtgcagtggcgtgatcacggttcactgcagcctcgaccccgggctcagatgatcctctcacctcagcctctcatgtagctaggactacaggcgtgcgccaccacgcctgcctaattttttgtatttttagtagagacgaggtttcactatgttggccaggctggttgcgaactcctgacctcaggtgatccgcccgcctaggcctcccaaagtgctggaattacgggcataagccaccgcgcccggcctaattttttgtattttttgtagggacggagtttcaccaagttgtccaggctggtctccaacacctgggctcaagtgatcctcccacctctgcttcccaaagtgttgggaggacaggtgtgagcccccacccctggccagcccatttaatcctctgaacaatctagaagatagtttttttttattgtcttcattaaaaaaattttttttgtagagatggggtctcactatgttgcccaggctgctcgaaaactcctgacctcaagggatcatcccgtcttggcctcccaaagtgctgggattacaggcataaaccactgtgcccagctgatttcaagggttttaggagttatgtactagaaaacctaagaccaaaatatggttttttaaaaatatatcacaacacaatatcacaacatatctttttttttttttttttttttgagatggagttttgctcttgttgcccaggctggagtgcaatggcacaatctcaactcactgcacccttcacctcccgggttcaagcaaacgattctcctgcctcagcctcccaagtagctgggattacaggcatgtgccaccatgcccggctaatctttgtatttttagtagagacagggtttcactatgttggctaggctggtctcaaactcctgacctcaagtgatccacccacctcaccctcccaaagtgctgagattacaggcgtgagccactgcgcccggccatcacaatgtatctttagccaaaggttcccctgcttcttgcataccctacgtccatggagagcaaagctgtctccaagacagtggggacacctggcagctactgccttaaccaagtgatcaaaatcaacatcaccagtgataagtcatactgacatcacggaccccagctatgtgatagggaggacatttgtaactgtctgatattatccccaaacctagaacctcaatctaaccattagacaacatcagacattt

SEQ ID NO: 1560240 - DNA, 4001 bp, Homo sapiens
ccgccagggttcctggagcattttataggctagaaagtggtatcatttgatgcacatctttaaaagctccttctggccgggcgcagtggctcacacctgtactcccagcactttgggagtccgaagcgggtggatcacaaggtcaggagttcaagaccagcctggccaatatggtgaaaacctgtctctactagaaatacaaaaattagccgggcatggtggtgggtcccacctacttgggaggctgaggcaggagaatggcttgaacccaggaggcggaggttccagtgagccgagatcatgccactgcactccagcctgggcgacagagcaagactccatctcaaaagaaaaaaaaaaaacaacctccttctcaggccccatgcagtgcctcacacctgtaataccagcactttgggaggctgaggcaggatcacttgagcccaggagtttgagaccagcctgggcaacatagggaatccccatctctccaaaaagtacaaaaatgagcctggtgtggggatctcttgagcctccagtctgggcgccagagtgagaccctgactccaaaaaaaaagttccttctggttcaggtgaattatgaactgccaaaggggtgagagcaaggctaggagaccagggaagaagctgggacaggtatgcaggtgggaagtggcagtacctgcaacagggcatgaagccatggatgaattcaggtgtgttcagaaggcagagacaatctaatccacttatgattggctgtagggatgagactgtaccaaggtatcaaggacaactcccaggcttggggacccgcacactaggaacccaccttcccatttccttcctgaaagggagtcttcctttcatccccaccacatcccaaggactgtggattgtgggctgggactctgggtcaggggacaaaggagacttgaggtatcttgaccaagcttcccatcacccttcccagccctcaggatgccaactaatgggggttgtggagaggctttagttccactctgagggtgggtcaccatcccacttttcaggtggggagactgaaccccgaagaaccaccagacccaaattccaggatgactgaggaaccctgaaggaatttcaaccttccaacagccaggtggggacgatccacacttcataatgaggggacagctagaagagaacgtcactggcctcgagtcacccagctcatctgttgagcattcactatcctgagtcctttacgacgtcagttacctaaattgtcaccaccctaagaggttcagactactgctaccctcatttcacagggacaatccatgcggatcggagataaaagtttttcattcttagaggcgggtaagggcccagaatggtggaggtggggtcagggcccggggaaccgggacaatcggcgatgtcgcacttcctttggcgacaaagccctgcatatcgcggtgccaagccccctcccccgccccggggcccaggccggcctcccaaattctcctgaactgaagagatccaggtccggcgtgctgagaacgaggccagaccagggggtcttacgggaccccatccccaccccagacgatttccggggggagccgcaacccggaaatgaatgagttgtcagggcttggtatcctggatggggtcaggggtcggagaaggagtggcagtgggatcagcaggaagctctcggtagggtccgggggtcgaaggtcacaggtgagtgggaggggcgggccggacctgaggggaccgggcagaacggagaggggcctagggggatactagaggtgggtgggaccacagcgccattttgtctagcagagggggagtgggggcctggaggccatcctcaccatcttctgtttcctccgtcgccgcctcggccgccgcctcagcctccaccgccgccaccagagccgccttcttagccgccgcctcacagtaacttccagccacggcacagcccacactgatggcgccaccacctccctgtcattggtgtgcagtctagccccgcccccacataggagcgctttgcacgcttccattggccgcatccagctaactcatgcgcccattggttgccacgcctcctcccattgtggtcaagttcggttgaagaagcaaagcacctcccggtacttggaagcaatgaaagtgagatccggaagtgggcggaggcctcggccgcgaagtctcttgggagctgtagtttacagctccgcgaggctctctagagcttttgtgtgtctgtgtgtttttaagatgcgaggttcggccgggtgcggtggctcactcctgtaatcttagcactttgggaggccgaggcgggtagatcgcctgaggtcagcagttcgagaccagcctggccagcatggtgaaaccccatctctgcgcctgtaattccagctagtagggaggctgaggcaggagaatcacttgaacccgggaggcggaggttgcagtgagccaagatcgtgccattgcactccagcctgggcaacaagagcgaaaatcagtctcaaaaaaaaaaaaaaaaagccagccgggcgcagtggctcacgcctgtaatcccagcactttgggaggccgacgcgggtggatcacgaggtcaggagatcgagaccgtcctggctaacacggtgaaaccacgtctctactaaaaatacaaaaaattagccgggcgtggtggcggacgcctgtagtcccagctactccggaggccgaagcaggacaacggcgtgaaccgtgagtgaggcggatcttgcagtgagctgagatcgcgccactgcactccagcctggcggacagagggagactctgtctcaaaaaaaaaaaggcggggcacggtggctcacgcctgtaatcccagcaatcccagcactttgggaagccgaggcgggcggatcacgaggtcaggagtttgagaccagcctggccaacatggtgaaaccccatctctactaaaatacaaaaattagccgggcgtggtggcgggcgcctgtcatcccagctactcaagaggctgaggcaggagaatcgcttaaaaccagaaggcggaggtgtcagtcagccgagattaagccactacagtccagtctgggcaacaagagctaaactccctctcaaaagaaaaaaaaaaaaaagacacaggggtcttgctatgtttcccaagctggtctcgaacttctggcctcaagcaatcctccagacttggcttcccaaagttctgggagccatcgtgccggcatcttcttgtgtttattacgtttttaaagcagccctagaagataagaaccataacactccctagctcctcctcgacaccgtcttgctcaaccacctcccgtaactccctagtattcaatcccacctccttggccccatttatgggcacctgcggtcttcattgcccacctgtgtcctcacctctaaccaattccttctatgtctgggctctcccagaccttgccatttcctccaagacttccctgactgcattcttcaaaaaggcaagtcaggtaccttccctgaagtcctacagccctcacaatccccctcccagccctgacacctctgtgtccaaactgccttcctgacttccagggcaaagaatgggcacccagcacacagcaattgcacagtgaagttgctaagtggaagctactaagtattattactccaacagcaacagagcagaggagaaaccagcactgcattttataggcgacaaatgcacctcacagtgttaaattcttgctcaaaatcaaacatccccaagggacaagtggaagattcaaactccttatgggctggagttcaagaccagcctggtcaacatggtgaaactcccctctactaaaaatacataaattagctgggcgtggtggcatgcacctgtaatcccagctacttgggaggctgaggcaccagaattgcttgaacccaggaggcagaggttgcagtaagcagggatccgacaa

SEQ ID NO: 1560241 - DNA, 4001 bp, Homo sapiens
gccagcgtgggaggatggcttgagcccaggagttcgagaccaacctggacaataagtcgagaccgcgtctatacaaaaacaatttttaaaaaagtagccgggtgggtggggggaggggggagggacagcattaggagatatacctaatgcaaatgacgagttaacgggtccagcacaccaacatggcacatgtatacatatgtaacaaacctgcacgttgtgcacatgtaccctaaaacttaaaaaaacttaaaaaacacatagcccaaggggcaccttctatgtagcaaaggctaaaaaataaataagtagaaattaaaaaaagaaaaaaattagcccggtgtggtggcatgggcctgtagtcccagctacttgggaggctgtgccgggaggatcgcttgagccaggaggtcgaggctgccagtgatggcgccatggcattccagcctgggtgacagagggagaccctttctcaagaaaaataaatttaaaaaaagaaattggggcccagcgtggtggctcatgcctgtaatcccagcactttgggaggcgaagcgggcggatcacttgaagtcgggaattagagacaagcctgggcaacatggtgaaaccccgtctctactacaaatacaaaaattagccggatgtgcttgcttgaacccggaagacggaggctgcagtgagccgagatagtgtcactgcactccagcctgggcgacagagcaaggctctgtctcaaaaaaaaaaaaaaaaaaaaaaaaagagagagagagataaataaattggggtgaaccgaatctgctaagataaaattttcgagaaaccgggctggacaggatctaaagctcaaaactgattagatcaggaaaggatccggcggggttttccccgcccaaagtgggtggccatgaccgctaaggcgccaggagcgcatgaacttgaaaggtgacagcggggaactcacaacccagacacgccacgtgtacccagttaccctcaagtgtccccaggcaggctttccaccccggagtttattcccacctggggactcctatttccaaaagaaaatctttttttcattctgttttttttgaggcagaatctcgctctgtcacccaggctggagtgcagtgtcgcgatctcggctcactgtaacctccacctcccgggttcaagcgattctcgtgcctcagcctcccgagtagctgggaccacaggcgctcgccaccacgctcggctgatttttttttgtattttgagtagagacgaggtttcaccatgttggccaggctggtctcgaactcctgacctcaagtgatccgccctccttggtctctcccaaagtactgagattacaagagccaccgcgcccggccttccaaaataaagtcttatttgctctaaatctcagaatcccgaatcccgtaaaaagtagaccaagaagaaggtagactgggaaagggatcaagtccctcggacccaaagaaacccctgacaactgaaagctccaacttctcccacccaggccccagaccccggcgtcaccccctcgtccctctccaaatggccccaggccgccgcggggtctattcggacgaactgacagactccaagtggggctcggagcgccgtaggccatgacagcccctccgagaagcgggccccgagccccgagcaccgcgcgccaacggctggcccacccctagcgcatgcgccccggtgcccaacggccaacacacagcgctctgacacaccaaccgccccgcccccaccgtctcgcgaccctttctccccctccccttagatcccaacgtctcccctcgtcctctcgctctcagttcagacgtccccacaccgcggccccgcgcccgggatccgctgctcacctggctccccgttcttctccgcgcgctgctaagagacacttccaacttcggttttccgccgggcgctcagacacgagttgctgcgcttcctgcctcttgcgtcgggctgctgctctgctgactgggccgctgccttttcattcaagagaggccgaagcggtgattgggtcctgtggaagggaccgggagattattggcggagacgggaagaaagagggcgtgccttacgcctcgcgtttattggtcaatctaaaagtaggcgcgccccagtgagccgacagactggctccgacagcgcgcggtctcgtgatctgggtgtggtgctcggtgggagccgccatgtttagtactgataactgaagaccggatgattgcgttttggcgtgtgccccaccttttcgaagagtggcgtctgcgctgggcgctgaaaccagaactgtcccagttgctatcaatctgcggcctgggggtcctccacagtgtaggctctgaaaagaatagggagcttggaatgactcaaatggacagaacattttgcagtatttggatttctatcgctccacgatagttttgtctccttgattttcacgttagtagaagcatgcaataggttgtcttttgtgtctgacttttgctcaacaaagctgtttttttgagacggagtctggctctgtcacctaggctggagtgcagtggcgcgatctctgctcaccacaacctccgcctctcgggttcaagcgattctcctgcctcagcctcctgagtagctgggactgctggcgcccgccaccacacctggctaattttcatatttttagtagagaggggtttcgccatgttggccaggctggtctcgaactcctggcctcatgtgatctgcccatctccgcctcccaaagtgctgggattacatgagccaccctgcctggccgcagcaaagtgtttttgagagttgtccatgttgtggggatatcaacagctcgttattttttactgctgagtggtatttcattgtgtggctatactataatgtagccaatatagtttcactcacctgttcttggccaattgattgtttccggtctttggccactgttaatagagcttgtactgtaagagtattttggggaagataaattttcatttcttttaaatacttaggagtggcatggtggcatggtcactaagctttattagatcctggcagatttattttcctatcatccttcctccctctttccctccactttcttctttctttcttcagggtgtcactcttgttacctatcatgcccagctaatttttaaaaatttggtaaaggtggggttttgcaggccgagcgtggtggctgacacctgtaatcccagcactttgggaggccgaggtgggtggattacctgaggtcaggagtttgagaccatcctggccaacatggtgaaactccgtctctactaaaaatagaaaaattagccgggcgtgttggcgggcgcctgtaatcccagctactcgggaagctgaggcaggagaatggcgtgaacccgggaggcggagcttgcagtgagccgagatcgcgccactgcactccagcctcggcaacagagcgagactccgtctcaaaaaaaaaaaaagaaaagaaaagaaaaagaaaatgccaagtaaagaaaggatcagcgggcaccagggctcctgcctataatcccagcactttgggagaccaaggagggcggttcacttgaggtcaggagtttgagaccagcctgacaacatggagaaaccccgtctgtactaaaaatgcaaaattagccgggcgtggtggcgcatgcctgtaatcccagctactcgggagggtgaggcaggagaatcgcttgaacctgggaggtggaggttgcagtgagccgagttcgcaccattgcactccagactgggcaacaagagtgatcacctaaggccaggagttcaagaccagcctaggcaacatagtgagacctcatctctacaaaaaataaaataaaataaaataaaaattagccaagcatggtggttgatacctgtactcccagctactcgggaggctgaggcaggaggactgttcgagcccaggagtttgaggcttc

SEQ ID NO: 1560242 - DNA, 4001 bp, Homo sapiens
gtaggccagctccctgtgggtgtgaaggggccaggctgggtcaggtagtggttctggacctgccccccattcccctctccatccccagggttcctccctgagcccccaggctcctgacttgcccagtcctgttcacaaaggctctgatgctgagccttggaggccattgtggcccctgccccctcgccaggctcagcctggaacatccctccttcaccagcccgacccaagctgacctcagcatctcttcctatcccaaacctgtgccttcccccagttcgcctttcagcaatggcctcaccaccagccagttgccccagccagagggtctcaagcatcagcctcctttctgcccccaaccaactctgtcctggcctctccctggctcatgacctttcctgctcacacacccccagaatcaattctaaccctccgcctggcattcaaggcctttctcaaactggctccaatatgcccaggtcccagtaccctttctgctgcctgcctctttctttctttcttttttttttttttgagacagagttttgctcttgttgcccaggctggagtgcaatggcacgatcttggctcaccgcaacctccgcctcctgggttcaagcgattctcctgcctcggcctcccgagtagctgggattacggcatgcgctaccatgcccagctaattttttgtatttttagtagagacggggtttctccatgttggtcaggctggtctcaaactcctggcctcaagtgatccgctcacctggagctcccaaagtgctgggattacaggtgtgagccactgcaccggggccatcttgtttaattctgcaggacccctaagaagcgggtagcaagattttcatgctcatctcacacgtgggaaaagggcgctcagagagggaaaggtgcttgcccaagagagcacagctggttaacccatacccaggaggcctgctgggggcttacctggtgggtgtcaggacgaggcagaagatgccatagggatcctcagacagcttctgcaagatgggaaggacaaacgctgctgtcttcccactgcctgtcttagcacagcccaagcagtctcgacctgggttggggacaaagcagcatcaacaccctccatgtgtggacagctgggtttcagagaccttgcccaggacacactgccagtgagtggcaggctggactggaacccatatccatttgacccgagatgcccacagcttcctaccacctcgttctaactccgtccaggagcacgtgaatttggggaatccagaattcccttccctcatatgcatcttgtgctccctgttgaccccttcatttgtttatttaatccctgacttatcacatcttaggcttcctgtgggcctctctttaatggcgaaactgggttgggctagaggagcagagagaagaccttctcctagaggagcaatcacaggaccaaggagtcctggatctaccagcaattttgacagcctcaacttctatttgtaaaataaagatagcagtaccaggtctgcaggattttgcgatactatcggactagtcatccatcaaaccctccctgtgctgagactatgaaaatttcagagattacatcacttgcgtacgaacacaaagcgagtcagtcatgcaacctaaatgccaacactgtccagtcgtcctccggaaccccggatctcctgtaacgcccgaggttgcccctcgcctcgtgggaccggaataagcaaaggttgcgagaagggaaaggagtcgagaggagcggagaggcctcttggggaaggccctgggccatactcaccctccaggatggcggggatgcagccgagctgcacgggcgtgggctgcttcaaacccagctgccgacattgttccacgagccacgatgacagcccgagctccgcgaagcctgccatccttgtggccgcttgtaggggccccttgtaggggcccgtgtgatccgcgcttccggcgcgcgccgacgacgtcacgagaaaaatcttcctgtttattggatctgcctcctgcgtggtcccaccctctccagctccctcagcctattcccagcctcgaccgcatccttatcatgtttccccggatcccattggcttgcagaaacacactacaattcccgagatgctctccgtgacgcacttacgccttccgcccccttgcatattattgtggagcttcccattggcttacttcgccgccgctcggaaaaagtaaactacatttcctagcgtgcccgtgtcttgcttccggctgacgtgtctttcaggaagaggagctggtgagaagacagcgaaatggcgcctccggcccccggcccggcctccggcggctccggggaggtagacgagctgttcgacgtaaagaacgccttctacatcggcagctaccagcagtgcataaacgaggcgcagcgggtgaaggtgcggccgcgcaggggcgcggggacgctgggggcggaggcggaggacgctttctggtggccgcgagccgcgttctgcgtctaaaaactttctcttttcttctcgcgttttttgggccacctcttccacagttcagtgaggagtagtcactgtcccgtgacagaacccagagcagtaacagtttacggtactgctcactcgtacagcgttctctctgcgcccttgaaagtgttttgagtaagggaggtgtttatgccactgtagtgacaataagcctattttgttcagccataccttcagttcccgtgagatggagactgttgcttatcctcattttacggatgagaaccctaaagttcagagaaggacgtttccctgcccaaccagcctggttatttctcccagagcttacccattcattcattcattcttcattgagcacttttttggacgggcactgtattccgctggactcagaatgataaacacagtttcccagcgcagtggctcaaacgcctgtaattctggcgctttgggaggccgaggcgggcagatcgcatgcgcccaggagttcgagaccagcttgggcaacgtggagaaaccatgagtctaccaaaaattagccgggcgtggtggcgggcacttgtaatctcagctaccgggaggctgagacaggagaatcgcttcaacccggaggccgaggttgcagtgaaccgagatcgcgccactgcactccagcctgggtgacaaagttgtaagaattaaagaggaaagaaacacgaaaggtggcttgccagtcaagacaggtttattttagagaaaacaaacctgagaggcgccttctggcggagttgggtcagagtaacactcttttacagactaagagtttttaaggattcagggtcggagagtttatcagaggcttgaactgcttctgtgtctcttcgttgtgcttatctgggagggagagttgtgtgtctgttcccatacatctttcttttttcttttcttttcttttcttttttttttttttttgagatggagactcgcgctgttgccaggctggagtgcagtggcgtgatctcggctcactgcaacctccgcccccaggttcaagcaattctcctttctcagcctctcgagtagctgggattacaggcgcgcgccaccatggcccggctaatttttgtatttttagtagagacggggtttcaccatgttggccaggatggtctccatctcttgaccttgtgatctgcccgccttggcctaccaaagtgttgggattacaggtgtgagccaccgtgcccagcctcccatacatctttctgcagctgcaggcatacccccctactctgcttttagcttgcctattttagtgcacctgaagggaaaggaatgtgcttattaaggcccactgttttactggggcccgttgtatgaaggtgaagtttggcagttacccaagaaattttcttcccactctctctctgtccgagctgtctttctgtgttttactgtctcctctttctggctgcttgtagttag

SEQ ID NO: 1560243 - DNA, 4001 bp, Homo sapiens
gattgtccctcacttctagtgacaaccagggatctacatctcaactgtgctctctcgtgatcccaaatggaaatcccgcccccccaccaccacccccgcagtctataagttccttcccctgatcaaaaccagaattccctcatctcacgttcaggacggatacctccttccaagcggcaacagaaccctccattccgactgtgtacatctcgatggcgtccatcacgacccccatcacagtcagatgtctccacccagagccaaaacggcccctccgtaaccccttccaatctctgccctccagggtcgcccagatacccgctccctaacttgcaacaactagagagggtctgtcagggagtctaggctgtggtgtatgcgtgtccccttaccgcggggccttgggtgtgacggtcgccacgccccccacttaggtgactcaaggtcaggacctgcatgtacttgagacaagtcccctccctggacctcttcccacccccgcaattaactcctcttgggagtcgggagatctgggtcctgcctagcactggcccagtactggctctgcctgagctgtagcagtgaattcaaaagaatcggctgcgcgcggtagctcacgtctgtaatcccagcactttgagaagccgaggtgggcggatcacacgaggccaggagttcgagaccagcctggccaacatgatgaaaccctgtctgttcttagccggatgtggtggcacgcgcctgaaatcccaactacttgggaggctgagacaagagaatctcttgaaccagggagcagtaagcagagatagtgccactgcactccagcctgggccacagggcgagactttgtctcaagaaacaaacaaacgccaggtgcggtggctcacgcctgcattcccagcactttgggaggccgaggcgggcggatcacctgaggtcgggagttcgagaccagtctgaccaacatggagaaaccccatctctactaaaaatacaaaattagccgggcgtgctgacgcatgcctgtaatcccagctactcgggaggctgacgcaggagaatcgcttgaaccctggaggcggaggttgccgtgagccgagattgcgccattgcactccagtccgggcaacaatagcaaaactctgtctcaaacaaacaaacaagaccggacgcggtggttcacgcctgtaatcccagcactttgggaggccgagacgggtggatcacctgagatcaggagttcgagagcagcctgaccaatatggcaaaaccccgtctctactaaaaaatacaaacattagccgggcgtggtggtggacacctgtaatcccaactactcgggaggctaaggcaggagaatcggttgaacccgggaggcggaggttgcagtgagccaagatcgtgccactgcactccagtctgggcgacagagtgagactccgtctcaaacaaacaaacaaaccctccaagaaatcccttcccctctctgggcctcagtttccctacttgtgaaacaaatggatggcaatggtaagctacggaagcatagtcctgggctaaactcacaagggggcctggtaagtgactatcattaaatcaaacgaagagtagggagaataggaaagcaatttaacaaactgtgaaggattctgtcttgctaagtgggttgtagtgggcgcctacagtgtatgagcgctgtgcatgtgtgatatcatccaatcccctaaacaatctttgaggtggctgtgactcaagctcacttcacaccagtaaaacagaggcccggagaggagaataactccaagtgtgtcgggctctaaagctgtactctcagaaatgctccgtctcttcagctttgaaatgacatctctgtcaaggtctcccgccgcccagttcactccatgggcccaacgctcaccaaaggttgcccgagtttctctacagaacttgccgacgcttagcccgggagcgacccagagaaatgcgcaggcgcatctcctcgccctgagccccgcccacagggcgaagatgtgtgcgtggataactcccagagccccgcctgtgtggcaacacgcaggcgcaaggtcgcgtgccctgcgctgcaggctctgattggtcgccacgggtaagggcaccgcccaatgggaggtgtggatagtgaggggtcccacacgcctggagccgagggtctgtgtcaagagcggcaggggctgcaggagataagagaaacgggtgagggcgccgcgcggggctggactgggaagagaacgctgggcggacggagggggcggaaggaaaactaaggggtctgcagggatcgaagagccttggggcctgcgctagggcgggagcggcgcgggctggaaggagagcactccttcctgtgtgccctggggctcctttagtgtgcgggagcctacgctggaactcgcccaccacccactgctgcgagctctcaccctgccgaggagctcagtctggtaggagacaagcgttgtaaagcgggaaagttgaatttccagggccctagtgggttccttcctggaaagacttactgatatactgtgtgaaaaacccccattctttccctaagtagttcacaattcaagagtgggagaaagaatcgtagacgaggaaagggcaaatttcaagtctcccgggccacctcgtagacatttattgggtacctgctttgtgcaagctttgcagcaggcactgggcctcgccctaggggagttctctgttggaaatggggctgtaatcaaggaaaaatggaactctcgggcccctggttgcctacttccaggaaggtcctttgtggaatggctgttgtgtgcaggggcctggcaactcaaaaattaggaaggggattggaatagtagataaggaaagtttagctccagctcctttagtgaataatttactcaaggagtatgtattgggcattaactgaaagcagggccctgtactgggctgtgtgttttgggaattcacagtctaatggggaagttggtctggtagaaatggactgtgcatagggacagttaaactcagggtcggccaggcagtggcttacacctctaattccagcgctttgggaggcctgggtgggaggattgcttgagctcagtagttcgagaccagcctgggcaacatagggagacctctctacaaataatttaaaaattagccaggggctaggtgtggtggctcacacctgtaatcccagcactttgggagaccatggtgggtggatttcttgaggtcaggagttgaagaccagcctgggcaacatgatgaaaccccatctctactaaaaatacaaaaattatccaggcgtggtggtgaatgcctgtagttccagctactcaggtgaccgaggcgggagaatcgcttggacccaagaggcggaggttgcagtgagccgagatcgtgccactgcactccagcctgggcaaaaagagagaaactctgtctcaaaaaaagtaaaataaaataaataaaaataaaaatttgccaggcatgatggcagatacctgtggtcccagctactcaagaggctgaggcaggaggatcacctgagtccaggaggtggaggcctcagtgagccaagatcgcaccactgcactgcagcctgggcaacagagtgagaccctgtctcaaaaggaggaaaaaaaaaaaaaaacctctcaaggtctcacttcccaagggaggctcactgcagcctccacctcctgggctcaagtgatcaaaccaccttagcctcccaaagtgctaggattgcagatgtgagccaccacacctggcctgggagcatttctcagtcactaaatatgtactgtgtgctagacattgttcttggcactggacgtgcttcagtgatgtgcaggctaaactgctaccgtctaggtgcttaatatgagcaacttttttttttttttttcctccttgagacagagtctcactctgtctccaggctggagtgcagtggcgcaatc

SEQ ID NO: 1560244 - DNA, 4001 bp, Homo sapiens
accggcagcctgaacccctcccagcttctcatgtgaaggctgctatcctccaggagcacttccttcacaaggattaagggcatcaactctggggacaagttggctaggtttgaatcctggctcccacacttcccagctacgttctctgcaagccccttcatgacataacttcttacctccctctcttccctagcttgggtcccctctgctcctgccacactggcctctgatgatgccaaactcattcccacctcaggccttggatgctccctgggattttctcccctggggtctatgcatggctggcagtgcagcctcagggcaaagcctcccttcaccttgctgctctcctgactctctctattccattacttttagtcttcctacaacagcgtctaaaaataagttctcttattatctgattgcccccactaaacttaaacttcatggaacaaacaccttgtcagctccatcatcctgtatccctcctaggcccagcaaacaggattgttattatacgtgcaaactgcttaacttctctgaacttgttattttcttggttacagtgaagacagtaacaggacttccttgtgagattactgggagactataaggcactagttcatatgaagggctgacagctgtgcctggcatgaaacaagccctccgtaaacagtggccaaaatcatcatcactgatgtggccaaattcccaaagccatgctttcttcctcttatgttgctcattgatattgtgggaagagagagtagcagaatgggacataagctgcctgatatggcactgtccgtatcagggcaccagggaggcccagcgggagccaggccctttcctcccaggaagtgtgacaccctcccattcaaccgtacctggccggcgccgcttgcgcgccaggtgcggcagcaggtcgtggcgggccagcacgcgcaggagttgccccagcagccgcaggttgctctcgtcgcactgcccgcggcgctccagctccagcaggagctctaggccgctgcgggcccgggctaagcctccggcggcgccaggagcctcatccagcagaaaggccaggagctccagctcgcactcggtcagttgcccgcccaccacctcgaacatacggtgaagcgacagcatcccgtagtagtccaggcactcatcctcctcccagcacggggccggggtcgacccggatagcgccattcccgggggagggaggcggaacaagctcagaacccggcctagaacccacacagcggggagggggcagtggtcagcgacgcggaggcccgaaccccacaccgccagcgcgtctcccccgcccaatcgcgccgggcagggccgctcccgcacccccaaccgcctcggcctccccctcccccgggagggaatggtcccgcccgaggtcccctaagaacaggtcgggacgccggagcccgctcggcttctgcccccaccaccgtgctacgttcggagctcgcctccggacctgaccaaacgatgcggcccaaacaagcctcggggcccaccccggggctccctgctgactgcccctgactctgggtaggactgcccagacgagccccttttctccgtccagcggtaccgtctgatgagtcccccggctctacgcaagtggtacctcccgaaagtgaccctctgccccctacacagaggagcgacccaggcagcccctttgctccacacaggtggtaccgtccgaacccgaccccctcgccctgcaagggcggccccgcccgctccccagagcccaggtggtcctgtctacccgccaccagtcaccattaggcctctctggatcctcaccagattctggcgtccgatgactcctgggcgacggccgcagccacttgttttggatctttctggcaccttctctattattacgcctgcgtcacctcgcccctcctccttcccccaactcgcgcaggtgcgaccgccacgccccttcggcgcatgcgcagaacgaggcctccaagccccgcccttcctgggccgcttgacctgcccccaaccgaagcatcttggttcgcgagtgctgcgcttgcgcagagcgagagcacgccgcctcttgggctgtatctggtacccggttccaggtccctacttcctgcccgtgactcaagccaccggggccatgtagcgccacgtcacgagtagttgtaactactcatctcataaactacagccccctcctgatcacgagctagacgcccacatcaccactgcccctagttgcccgtggcaaagtaacacaatcactactttcccgtctcccagtaaactcccaggccttatatgatctggtcctgggcactcctccattagattgtccctcacttctagtgacaaccagggatctacatctcaactgtgctctctcgtgatcccaaatggaaatcccgcccccccaccaccacccccgcagtctataagttccttcccctgatcaaaaccagaattccctcatctcacgttcaggacggatacctccttccaagcggcaacagaaccctccattccgactgtgtacatctcgatggcgtccatcacgacccccatcacagtcagatgtctccacccagagccaaaacggcccctccgtaaccccttccaatctctgccctccagggtcgcccagatacccgctccctaacttgcaacaactagagagggtctgtcagggagtctaggctgtggtgtatgcgtgtccccttaccgcggggccttgggtgtgacggtcgccacgccccccacttaggtgactcaaggtcaggacctgcatgtacttgagacaagtcccctccctggacctcttcccacccccgcaattaactcctcttgggagtcgggagatctgggtcctgcctagcactggcccagtactggctctgcctgagctgtagcagtgaattcaaaagaatcggctgcgcgcggtagctcacgtctgtaatcccagcactttgagaagccgaggtgggcggatcacacgaggccaggagttcgagaccagcctggccaacatgatgaaaccctgtctgttcttagccggatgtggtggcacgcgcctgaaatcccaactacttgggaggctgagacaagagaatctcttgaaccagggagcagtaagcagagatagtgccactgcactccagcctgggccacagggcgagactttgtctcaagaaacaaacaaacgccaggtgcggtggctcacgcctgcattcccagcactttgggaggccgaggcgggcggatcacctgaggtcgggagttcgagaccagtctgaccaacatggagaaaccccatctctactaaaaatacaaaattagccgggcgtgctgacgcatgcctgtaatcccagctactcgggaggctgacgcaggagaatcgcttgaaccctggaggcggaggttgccgtgagccgagattgcgccattgcactccagtccgggcaacaatagcaaaactctgtctcaaacaaacaaacaagaccggacgcggtggttcacgcctgtaatcccagcactttgggaggccgagacgggtggatcacctgagatcaggagttcgagagcagcctgaccaatatggcaaaaccccgtctctactaaaaaatacaaacattagccgggcgtggtggtggacacctgtaatcccaactactcgggaggctaaggcaggagaatcggttgaacccgggaggcggaggttgcagtgagccaagatcgtgccactgcactccagtctgggcgacagagtgagactccgtctcaaacaaacaaacaaaccctccaagaaatcccttcccctctctgggcctcagtttccctacttgtgaaacaaatggatggcaatggtaagctacggaagcatagtcctgggctaaactcacaagggggcctggtaagtgactatcattaaatcaaacgaagagtagggagaataggaaagcaatttaacaaac

SEQ ID NO: 1560245 - DNA, 4001 bp, Homo sapiens
cctgggagactggccctcgccctgggggagcaaggagccagcctgaatacctggtccctgaagtctggagggaactgccgcaggatggggggatctgtagaagagagcacgcctctaagttcagcgacccaggcccaccctcccctcccactccctcactcccaggctcccaactcaccctcctgcagggaggcagggcaggccgcttcgaagaaccaatcaaacacagcaggggagccccctctgtgggatgcagaaggggtccagagacttgcttctatgcatgtgtggttgtgtctgccactttgcacacaagtgtggttgtgtgtgcatgtgccacaaggtgcgtcggcatgtgcatgactctgggggtttgtggctgtgagtgtgtggttgtgtgaggctgtgtgtgcagcagtgttaattgaacacacaagtacaggatggagtgagaaagtgtgactgtgtgtgtgtggctgtgtatgattgtgtgtggctgagtgcatggcttttgtgagcaggcagtgtgtgtgtgatcctgtctgctgtctgcctgaaaagatgagactgtctcctatatctgtggcatgagactgcacagatatgaaggacagcccgtgcagtcccaagctaagtgaattacatctctctctctctatatatatatccatctatctgtctgtctgtctgtctctgtctatccatccatccatccatccacccacccacccacctatccatccacccacccacctatctatctatctatctatctatctatctatctatctatctatctatctatctatttttttgagatggagttttgctttgtcacccaggctggagtacagtggcacgatcttggctcactgcaacctccaccccacaggttcaagcgattctcctgcctcagcctccctgtagctgggattacaggtgcccgccaccacgcccagctaattttcatatttttagtagagacagggtttcacatactggccaggctgttctcaaactcctgacctcaggtgatctgcccgcctcagcctcccaaattgctgggattacaggcttgagtcactgcatctagccatgccatctatattttcttgtatagatgtgagtgtgtgtgcccgagcaagtgaatgacatctatattttcctgtacagctgtgagtgtcactgggtaaccgcgtgggatccttgtgggctggctgtgtgtctctgtgtgtgagaccccatagaaccctcgtggctggtcccacatgtctcatcagagaaaggagggcaggatacctaggtacttactgtaagccctgcaatctctgctttcctcctctgcccccatatcaagcagaagaggcagccttgggctcaaggagagagacagggagatctagagggagatcagctgcacacacactgtcccgcccagttgcacacacagtccccaccatgggtaccccagcacttcaccctcacgccgacacaagtcacacacgatcacccactcataccaacacccagcctcccctctgccctgatcatccgccctgtggaccccctgaagccatcactcagacataccaaggacaaagctcagaggggtacatgcattcacagagctatagacataatcacaggagctggatagagagagagagagagagagagaggaggggaccgagagtggcctgtcccagagtgaaggtcatagcggaggcccatggagtatctgattccagccacctgccctggcaggtcactgcacctcccgggcctgctccagccccagctcccctctgccccggctcaggcctggcccgggaatcttgtaccagagaatgagggatggggtggctcttactcagctctggattccatggtccctgcagggccagcccagcggggccctctccccaggggtcctgggggcctgtgtatgctgggccccaagccggctcagcttcctgtgtggctgagagaggaagtttaacgggtgacgtccccggacagaggccctgcccccacccccgtgagaaacccaggcatcctgcctgctaattatgttggggatgggtgggcaataagtggtcagcctgggaaggcagacccccagctccgtccccgccaggctggactgtgtctggttccccccatcgtgcctgggccctcatctctccttccccgctccgcagcagccaagattcacagtctgtctattaatgaaatgcctccccgtctctttcccttggtccatttggcctggacggtcactggtggaccaccagagggagccacctgtaaagtggacggtgggggggccagggatggggacaaagagcacgaagtacaggcacagggacggacagacagacacagacacagacagttacacgctcaggaagtcatcagcacagacaaaccgagtgcagaagagccagagacgacagacatggagagatagggagtcctacagctggatcatagtcccaggccgggcacagtggctcacgcctataatcccagcactttgagaggccaaggtgggaggaccgcttgagcccaggagttcgagaccagcctgggaaacatggcgaaaccctgtgtctataaaagctacaaaaattatagctggcggtggtggcacgcacctatagtcccagcttacccaggaggctgagtcaggaggatcgcctgagcctggggagtttgaggccatagtgaaccaagattgcactactgtactccagcctgagcaacaaagtgagatcctgtctcaaaaaaaaaaaaaaacaacttagtcacagttacacacccattgtgcgcagaaagacaaggtaagcggatcacttgaggtcaggagtttgcaaccagcctggccaacatggtgaaaccctgtctctaattaaaaaaaaatacaggccaggtgcggtggctcacatctgtaatcccagcactttgggaggctgaggcaggtggatcacgaggtcaggagttcgagaccagcctggccaagatggtgaaacccagtctctactaaaaatacaaagattagccaggcacggtggtgggcatctgtaatcccagttactcaggaggctgaggcagaattatttgaacctgggaggcggagtttgcagtgagccgatatcgcgccgctgtactctagcctgggcgacagagcaggactctgtctcaaaaaatcaaaaacaaacaaacaaacaaaaaattagctgggcatggtggcatgtgcctgtaatcccagctgcttgggaggctgaagcaggagaatcacttgaatccgggaggcagaggttgcagtgagccgagatcgtgccactgcactccagcctgggtgaaagagtgagactccatctcaaaaacaaaaacaaaaacaaagcaaacaaacaaacaaacaaatgcagagacagacagagacacaataaacagttacacagagaccacagccattgatacaaacagaataacagagaaatagacccagatagatggaaacacagcacagacatagctcaagtaataaccagatatagttatagccaagacccggccacatgcagagagagacacagctggactcacatgacagccagatactcatgacagcccgacacactcaagccgtgctgcagactatgaaagacacaggggctggaggcagtggctcagtaatcccagcaccttgggaggctgaggtaggattgtttgaggccaggagttaaagatcagcctgagcaatataacaagaccccatctttacaaaaattaaaactttagccaggtgcagtagtcccagctattctgtaggctgaggcgggaggatcccttgagcccaggtggtgggggttgtagtgagctgtgatcgtgccattgcactccagcctgggcaacggtgtaagaccctatctccaaacaaacacaggaacaaacaaaaacaacaaaaaagacacaggcacacaggtggacagacgtag

SEQ ID NO: 1560246 - DNA, 4001 bp, Homo sapiens
accatgcccggctaattttttgtatttttagtggagatgcggtttcaccgtattagccaggatggtctccatctccggacctcatgatctgcccgccttggcctcccaaagtgctaggattacaggcgtcagccaccgcgcccggcctatttatttatttctaagaccaagtctcactctgtcgcccaggctggagtgcagtggcgcgatcttggctcacttcaacctctgcttcccggattcaagtgattctcctgcctcagcctccccagtagctgggattacaggtgcgtgccaccatacctggctaatttatttttattgttattttttgtagagattgggtcttgctacgttgccgaggctggtctcgaacgctaagtgtagtttaacacctactagacagccagtcccagaccaagcccgttttatagttctcctcccagccaaaggtctttatggaacccaaagggattggaccatcctgaggagccttgcatctcccagggggcagccagggggcaccgctccaggggcggcggccagcacccccatcgccctcgccactcacccacgctcgggtccttggccagctcctcataggagccgtaggccttggggatgtcgtgtttctgtgcaaactccttcgcacggctcagatcgcgggccgccaccgccaccacctggaggggcacaagaatcggatttgaggggctgaggcaggcgtggaaactgggtggaagggaggcaaaggaggaggctctggccaggggaaggggagacgtggtcctgggggaagagatgacgggggctggacatttgggccctgggaaagagagatctgggggaaagccgttattaaatcccccaatattgaaattatcttcatagtagcttacatcaaggcctttccaaacctcaagacactcaggtttgtgtggggaaaagaaagagagatcagattgttactgtgtctatgtagaaaaggaatctgtatcatgaataagttcaaggaaaggtgctgtgaccggatgtgcacgtaggctagatttatgtttcactttacacaaacatctcagtgtagcaaagagtaacagagcagtatcactgccagcatatctcgcctccagccacaggtaggttttctcctatctcagaatagaaggaatgggaatggtccgctttacactgagacagtccattcccagggagagcaggagacagaagccttcctcttatctcaactgcagagaggcctccctctttcactactcctcctcagcacagaccctttactggtgtcgggctaggggatgtaaggtcttcctttcccacgaggccatatctcaggctttctcagtggggggaaaccctggacaatacccaggctttcttgggcagaggtccctgcggctttccgcagtgcaatgtgcccctggttaatagagaatggagaatggcgatgacttttaccaagcatactgcctgcaaacatattgttaacaaggcacatcctgcaaagccctaaatccattaaactttgattcaatacaggacatgtttctgtgagcacacggttggggctaaagttacaggttaatagcatctcaaagcagaaacaatttttcttagtacagttcaaaatggagtttcttatgtcttcattttctacgtagacacagtaacaatctgatctttcttttccccacaggtttgcagaacagagatggagaaggaggtagcaaggaaacagacgtttcactgcaatgacgacccactcactagtcctgaaccctaaactccctcctcctttagactctggagtcccgccccccgcctcctcttccccagaatccggagggcgggcagacctggtgctcagagcgaggcagcgtctgcagcacggctgtgaagtcgctggagatgaggccgacagacacgatgccccagcgcagcgccatggttgcgatgcggagccctcggcaccttcggtccctccaggcgcgaattaagtacctgacgccccgcccaccccgggggcgggtccccatcctccgcccgtattgcgcctacgccgattctcgttggctccagtcggcagagcggtcatttagttctagcttccccgctgggcgaatgcaccgtttagctccgccttacagagggaaccacaccttgacgtcgcttctacagatctcttacctatgactttaggctcgtcggatacgcggggtaaggacagcgtggggaggagaggtttgctttcttgccaacaccaatccttgagagttagatttaatgtcttgccctctggactttgtggcaaaactttgccctgacttttttgctctcaaagccacgcatcattaggggttgttcacagagagagagaggattgtaacagcaaacttaataattattactaatatgtatagagcacctgtagaccagctcctcagctctgcgctttaccttcttcgttcctaatttctccccgcagacctgggaagtagcttctattgtccccagttcacaaagggggaaacagactccaagatccctggtcattttttggaggtctcacagtcaggaggtaaagacctgtgaattggctgcttccagaagctatagttttagaaaccaggctgctttgcttgttaggagccccagagcctggccgactggtttcaaaaccctccttgccccttcttggctgtattgcttttggacaagaggtcgccctctctggtcctcacttttctattctggaaagcagagatcatgataacatctacctacatagggttgtgaggaggattcattgagctctatggtctattatgtaaaatatactgtattattataattattattgatatagggtctcgctctgtcgcccaggaaggagtgcagtggcacaatcatagctcactgcagcctcaaattccttagctcaaggaattagctcctgccttagccaccctagtacctgggactacagtagctgggacccaaagtagctactggctactacacctggctaattattttgttttatttattaattattttagagatagggtctcactctgttacctagctggactgcagtggcgtgataatagctcacagcagccttgtactcctgggctcaagctatcttcccgcctcagcctcctgagtagctgggagtataggcatgtgccccacttaccgctatttgtttgtttgtttgtttgagacggagtctcactctatccccaggctggagtgcagtggtgtgatctcagctcactgcaacctccgcctccctggttcaagtgattctcctgcctcagcctcctgagtagctgggaccacaggcgccctccaccatgcccagctaattttttttatttttagtggagacagggtttcaccatgttggccaggatggtctcgatctcctgaccttgcgatttgcctgccttggcctcccaaagtgctgggattacaagcatgagccactgcacccagcctgctaatttttgttgctgttgttgtttgttttttgtttttgagacgaagtctcgctctgtcatccaggctggggtgatcatgcagtggcataatcttggctcactgcaacctccacctcccagtttcaagcaattctcctacctcagcctcccgagtagctgggatgacaggcgcccactaccacgcccgactaatttttgtatttttactagagatggggtttcactgtgttggccaggctggcctcgaattcctgacctcaggtgatccgcctgccttggcctcccaaagtgctgagattacctgcatgagccaccatgcccagcaattttttgtacagaaaaggtctcactttgttgtccaggctggtctccaattcctgggctcaagcaatcctcctgcctcagcctcccaaagtgctgggattataggtatgagacactgtgtccagtcgatttttaaactttttatcaaggcagggt

SEQ ID NO: 1560247 - DNA, 4001 bp, Homo sapiens
tgcttggccccaggaggttgaggctgcaatgagctgtgatcacaccactgcactccagcctaggtgacagagcaagatcctgtctcaaaaaaaaaaaaaattaccacgcctatctgtgtttgagtctcctcatctaagagtgaggatgctgagaataacagtactgaatccccaggaggctggaaagatgaaataagttaacacatgccaaagtctggctactttgctcccgcttaggtcctcaccttctgggcccagtaatacacggactctgggttgttgatctccttgcccagccgggcgatcatcttagaaggcgtccactttacaccctaggagaggatgtgaccttcaggccatgcctcccctgactcccactgaactggcccctccaggttgccccagccccacctctgtgttctgctccatcaccatctggtccagaatgggcatcagccagtcctcaaacttgcagtaattctcattgggcaccagcaggtttccgatcctgagaacaggaggcatgtaggcatcaggccccaggacccttggtccagctcccctgcccaacaccactcagggttctcacctattgatcccgttctcccggagctccttccccctgaggctaaactcgcccaagtatgtgggcgccaggcacttgatgaggtcttcctccacgccgccagctgtggtcaccaatacgtccacctgcagccacaaggcagtgaatttggcccaagaaggaagcccctgccctcattctgggcagaacttctaacctcatccttgtccagtgactcttatgagggagctctgctacaaaacaaaacttgattctattcctctgcttataacagacccctatctgcccatctcacttaaacgatcaataactgcattgcccattgacccagaggccaaggccacggcctcaccaggtccccaccatgttgtgctgcacaaggtagcgaatggtctcacggatgcctgaactgatgaggttggatgtatatcccaggaaaatggtgcagctggtaagtgggcggcggctctgggtcaggtccgcgtgctggtcttcatcctgtgacagtggttccagcttcttctcgatctgtgagtaagggccaagtcaagttaagcactggccttaaatcccagactcaggactccaggtgggctccagaaacagatttcaccccaggccctgcacattcagggatacaggaccagttctacaggggaccaaggaacatctcctgtgtaaactctgccccttcccagaccagatctcaagacacacgttcaggatttgcccccacccttttttttttttttttggacggagtttcactcttgttacccaggctagagtgcaatggcgcgatctcggctcactgcaagctccacctcccgggttcaagcgattctcctgcctcagcctcccgagtagctgggactacaggcgcgcaccaccatgcccggctaattttttgcattttagtagagacggggtttctccatgttggtcaggctggtctcgaactcccgacctcaggtgatccgcccgcctcggcctcccaaaatgctgagattacaggcatgagccaccgtgcccggcctttttttttttttttttttgagacagagtatcgctctgtcaccaggctggagtgcagtggcgcaatctcagctcactgcaacctccacctcgcgggttcaagcgattctcctgcctcagcctcccgagtagctgggactacaggcgcgcaacaccatgcccggctaattttttgcattttagtagagacagggtttcaccatgttggccaggcttgtctcgaactcctcttctcttgatccacccgcctcggcttcccaaaatgctgggattataggcatgcgccaccgcgcccagccagcccccacccttttaggaatcagagagcatctcctttcagatccggtcccttccccgctgggaaaagcaaatctaaattcaagaaccgcccagacttaggctcctcctcccatatcctcccttaatttgtcttgccccaggctccgcccattccagaaagctttaaatgtacctagaacccgcccccacaccaagaatcagtcctcgcctcctcaggttaccgtaccagcatgtaactaccagagtgcaaaatccccttcccaggacagaaactcccgcccagaataggtcccgccttcctccaactattgggcaactcaaataaaagacatatcccctccactggaaacgctgcccccgtctagtaccgcgttggttctacaagccacgcccctccgcgtccctagaaattccgcccggtcctcaccatggcattgacttgctgtacagcgcgcccgaagttggttgcttggaagccggtggtgccgaaggcctccagcagtgcgcggtaattcacaccgcggttgaagtcgtagccccggacctgggtgctttcgggcggcaacgtcgagctgtgctttagcacggcggccagcgcccccgctggcgcctcccgttccagggaaccttccatgcgcctatagccggctctcgagtcaaagctgcccctaggccgggcttacggcggcccagaaacgcgttaaaccccgacgcgcgcgtctccgcaagagcacaggaagtagggaacgtgctttgggcgaaagaccggaagttggtttatcacgtgaccatttttagcccctgtaaaccaggtcgccgccatttttgtgcgtgtgttccgtaatacggaagccgcgaggagcctttaggccctttctttctttttttttttttttttttttttgagacggagtctcgctctgtcacccaggctggagtgcagtggcgcgatctcagctcactgccagctccgctttccgggttcacgctgttctcctgcctcagcctcccgagtagctgggactacaggcgcccaccaccacgcccggctaatttttttgtatttttagtagagacggggtttcacctggtctcgatctcctgacctcgtgattcgcccgcctcggcctcccaaagtgctgggattacaggcgtgacccaccgcgcccggcgcctttaggccttttcttcctttttttttcttttttttttttttgatacagggtttcgctcttgttgcccaggctggagtgcaattgcccgatctcagctcaccacaacctccacattccgggttcaagcgattctcctgcctcagcctcccgagtagctgggactactggcatgcaccgccatgcccggctaattttgtatttttagtagaggcggggtttctccctgttggtcaggctggtctcgaacttccgacctcaggttatccgcccgcctcagcctcccaaagtgctgggattacaggcgtgagccactgcgcttcggcctttacttgttttcatgtgttctcgacttcccatgaatgaagattcttttttatttttattatttatttatttaatttatttttgagacaagagttacacgctcttgttacgcaggctggagtgcggtggtgcaatcttgactcattgcaacctctgcccccctggttcaagcgattctcctgcctcagcctcccgagttgctgggattacagacacccaccaccaggcctggctaattttttatttttagtagagatggcatttcaccatgttggcgaggctggttctgccctcaggtgaccgcccgcctgggctttccaaagtgctgagattacaggtgtgagccaccgtccccagccaaaattcctattttaatgccacctgctggagacccactgcttggcccggcactcgcccattcgtttctgttctgtcccctcgggaggggaggatggttttgttgttgttgttgctgttttgtttgtttgtttgtttgagctagagtcttgcgctgtctcccaggctggagtgcagtggcacgatctcggctcactgcaacctccgcctcccaggttcacgcc

SEQ ID NO: 1560248 - DNA, 4001 bp, Homo sapiens
tccacgccgccagctgtggtcaccaatacgtccacctgcagccacaaggcagtgaatttggcccaagaaggaagcccctgccctcattctgggcagaacttctaacctcatccttgtccagtgactcttatgagggagctctgctacaaaacaaaacttgattctattcctctgcttataacagacccctatctgcccatctcacttaaacgatcaataactgcattgcccattgacccagaggccaaggccacggcctcaccaggtccccaccatgttgtgctgcacaaggtagcgaatggtctcacggatgcctgaactgatgaggttggatgtatatcccaggaaaatggtgcagctggtaagtgggcggcggctctgggtcaggtccgcgtgctggtcttcatcctgtgacagtggttccagcttcttctcgatctgtgagtaagggccaagtcaagttaagcactggccttaaatcccagactcaggactccaggtgggctccagaaacagatttcaccccaggccctgcacattcagggatacaggaccagttctacaggggaccaaggaacatctcctgtgtaaactctgccccttcccagaccagatctcaagacacacgttcaggatttgcccccacccttttttttttttttttggacggagtttcactcttgttacccaggctagagtgcaatggcgcgatctcggctcactgcaagctccacctcccgggttcaagcgattctcctgcctcagcctcccgagtagctgggactacaggcgcgcaccaccatgcccggctaattttttgcattttagtagagacggggtttctccatgttggtcaggctggtctcgaactcccgacctcaggtgatccgcccgcctcggcctcccaaaatgctgagattacaggcatgagccaccgtgcccggcctttttttttttttttttttgagacagagtatcgctctgtcaccaggctggagtgcagtggcgcaatctcagctcactgcaacctccacctcgcgggttcaagcgattctcctgcctcagcctcccgagtagctgggactacaggcgcgcaacaccatgcccggctaattttttgcattttagtagagacagggtttcaccatgttggccaggcttgtctcgaactcctcttctcttgatccacccgcctcggcttcccaaaatgctgggattataggcatgcgccaccgcgcccagccagcccccacccttttaggaatcagagagcatctcctttcagatccggtcccttccccgctgggaaaagcaaatctaaattcaagaaccgcccagacttaggctcctcctcccatatcctcccttaatttgtcttgccccaggctccgcccattccagaaagctttaaatgtacctagaacccgcccccacaccaagaatcagtcctcgcctcctcaggttaccgtaccagcatgtaactaccagagtgcaaaatccccttcccaggacagaaactcccgcccagaataggtcccgccttcctccaactattgggcaactcaaataaaagacatatcccctccactggaaacgctgcccccgtctagtaccgcgttggttctacaagccacgcccctccgcgtccctagaaattccgcccggtcctcaccatggcattgacttgctgtacagcgcgcccgaagttggttgcttggaagccggtggtgccgaaggcctccagcagtgcgcggtaattcacaccgcggttgaagtcgtagccccggacctgggtgctttcgggcggcaacgtcgagctgtgctttagcacggcggccagcgcccccgctggcgcctcccgttccagggaaccttccatgcgcctatagccggctctcgagtcaaagctgcccctaggccgggcttacggcggcccagaaacgcgttaaaccccgacgcgcgcgtctccgcaagagcacaggaagtagggaacgtgctttgggcgaaagaccggaagttggtttatcacgtgaccatttttagcccctgtaaaccaggtcgccgccatttttgtgcgtgtgttccgtaatacggaagccgcgaggagcctttaggccctttctttctttttttttttttttttttttttgagacggagtctcgctctgtcacccaggctggagtgcagtggcgcgatctcagctcactgccagctccgctttccgggttcacgctgttctcctgcctcagcctcccgagtagctgggactacaggcgcccaccaccacgcccggctaatttttttgtatttttagtagagacggggtttcacctggtctcgatctcctgacctcgtgattcgcccgcctcggcctcccaaagtgctgggattacaggcgtgacccaccgcgcccggcgcctttaggccttttcttcctttttttttcttttttttttttttgatacagggtttcgctcttgttgcccaggctggagtgcaattgcccgatctcagctcaccacaacctccacattccgggttcaagcgattctcctgcctcagcctcccgagtagctgggactactggcatgcaccgccatgcccggctaattttgtatttttagtagaggcggggtttctccctgttggtcaggctggtctcgaacttccgacctcaggttatccgcccgcctcagcctcccaaagtgctgggattacaggcgtgagccactgcgcttcggcctttacttgttttcatgtgttctcgacttcccatgaatgaagattcttttttatttttattatttatttatttaatttatttttgagacaagagttacacgctcttgttacgcaggctggagtgcggtggtgcaatcttgactcattgcaacctctgcccccctggttcaagcgattctcctgcctcagcctcccgagttgctgggattacagacacccaccaccaggcctggctaattttttatttttagtagagatggcatttcaccatgttggcgaggctggttctgccctcaggtgaccgcccgcctgggctttccaaagtgctgagattacaggtgtgagccaccgtccccagccaaaattcctattttaatgccacctgctggagacccactgcttggcccggcactcgcccattcgtttctgttctgtcccctcgggaggggaggatggttttgttgttgttgttgctgttttgtttgtttgtttgtttgagctagagtcttgcgctgtctcccaggctggagtgcagtggcacgatctcggctcactgcaacctccgcctcccaggttcacgccattcttctgcctcagcctccccagtaactgggactacaggcgccggccaccacgcccggctaatattttgtatttttagtagagacggggtttcaccgtgttagccagggtagtctcgatctcctgacctcgtgatccgcccgcctcagcctcccaaagtgctgggattacaggcatgagccaccgcgcctggcctgctgctattttttgatagggtctcactctgtcgccaggctggagtgctgtgacgcgatctcggcccactgcaacctctgactcccggactcaggtcatcctcccaccccagcattccgactagtgtgcaccatcgtgcccagctaatttttttatgagggtcacttttttttttttttttttttttgagacagagtctcgctctgtcgcccaggctggagtgcagtggcgcaatctcggctcactgcaagctctgcctcccaggttcatgccattctcctgcctcagcctcccgagtaactgggactacaggtgcccgccaccacacccggctaattttttctgtttttagtagagatggggtttcaccgtgttagccaggatggtctcgatctcctgaactcgtgacccgcccgccttggcctcccaaagtgccaggattacaggcgtgagccactgcgcccggccgagggtcacttct

SEQ ID NO: 1560249 - DNA, 4001 bp, Homo sapiens
actcgaaccctggaggcagagcttgcaggaagccaagactgagccactgcactccagcctgggcaacagagcgagactctgtctcaaaaaaaaaaaaaaaaaaaaaaaaagaaaaagaaaatgagagcattcttctgaggctagaaactgcttatgcatgctgggccccactgacagcatcccgctcctctcaaggtatctatcttttttggcttctagattgtctgcatcttctagtttctgtataactgtgtctctgaccatcttttggtctcttggcctatttgccctgggctcatggccttcagtgggtttgtttccccctctgtcccctccatctctctccactccatcttcaggcctctgtctctttttcagtccgtcttgttcatcatcaccctcatctctcttccctgtcctagtcagctcgcatctctcttcacttatgagtcattctgtagtctgatttttctctgtaatccaactcttcctttctccatctctcttcagttctccatttgactttctccatctttctcattaaaaaaaaaatgctttttcaggccgggcatggtggctcacgcctataatcccagcactttgggaggctgaggcaggcagatcacctgaggtcgggagtgcgagaccagcctgacgaacatggaaaaatcccgtctctactaaaaatacaaaattagccagggtggtggcacctgcctgtaatcccagctactctggaggctgaggcaggagactcgcttgaacccaggaggcagaggttgcagtgagccaagatcgcaccactgcactccagcctgggcaacaagagcgaaactccatctcaaaaaaaaaaaaaaaaaattcatttttgtttttttgaaacagggtctcactctgtcacccagcctgaagtgcagtggcacaatcacggcgtacagcagcctcgacctcccaagctcaagtgatcctcccaccgcagcctcccaaagtgctgtggatgacaggagtgagtcaccacgccctttctcattttctgtttgaatctttttttcctcccttttgtccttccagtattcactctccatcaccacctctctccatttccccatctaatactttatctcccaatatcagaagctttagtaatagctcatgcttacttactcacattaacacacagacctatcctatctgcatgatctattcctatcccacacctatgtacatacacacacacacttttctcacgactgtcaggcactatgatcaccccctattttactgagcaatagagaggctaagtgagtagccgagtgttacatgagccactcaaatccaggggttcgggctccactccctcgcttttccatttctcagcatcgttctccattatctccagcttttgtggggttcttcctatttcaactgtctccatccttccgtatctctcggtctcccccgtgattcagtgtctcgtttctccatctaaattccattttttctgtttctagtgtccacgatcagtttccgacttttccctccactccccaagttcatgggcgaccacgcctctcggcctcgtgggctctaagactctcgctggaacccatcggcactctcgcccacgctctctagttttcagcttccctcctctcccaacaccctcgtctttcagtccctcagtttctcgaagcttcttttcgtgcctccatttctttcggtctctggcctgtcgcccaggttctcccagggacgctcaggtgccatctctgtccgcgtttgccggcccttcggctgcctcctacatttctcctcatctcgagacttccctcgcccctggactcgcaccccaaactacccccaagcggcccaactccgacagccatcgccgccacaacccggtacacccgtcccgcccccctcacttaccacacgccgcgaacgccttaacttccggtcccaagagcgctagtcttgcgcctgcgcacacagccatctcgttctgaccccgccccgccaccacagaagagccaatcggaagctctgggctgcccaagacccatcttgcgcctgtgcacagcacgcttccgccccgcctcgcttggggcggagcctcgagtgattgcgccctctagaggccagtagaggcattgcggtacagacttgcaagcgcctcctccccggccccgccctctcctccccaagcatagccacgtgcgcctcagctccgggacgccggggttttaacccaaagagagagctggtctggggcccaggaacttttttttttcttttgagacatagtctcactgtctcccaggctagagtgcagtggcgttatctcacctcattgcaatctccgcctcccaagttcaaaccattctcctgcctcagcctctcgagtagctgggattacaggcgcacaccactacacctggctgatttttgtatttttagtagagacgaggtttcacgatttgggccaggctggtctccagctcctgatctcaagtgatccgcccgccttggcctcccaaagcactgagattacagatgtggggcatctcactcagcctctacctcttttctttctacaaccccattttctgttacctttctctgcaataaactcaatcacacacattcaggaagacccccaagtatagaaacaatctcattagccagcaatgcaccctctcttttattaactgaaagaagaaacagctgggcacggcggctcacgcctgtaatcccaacagtttgagaggccggggtaggtggatcacctgaggtcaggcgttccacaccagcctgggcaatatggccaacccctgtttctacaaaaaaatacaaaagttagtcggatatggtagtgtgtgcctgtagtcccagctactcaagaggctgaggtgggaggatcgattgaacctaggaggctgagagactgaggctgcagtgagccatgatggtaccaccgcactccagcctgggtgacagagccagactgtctcaaaaaaagaaaaaagtgttgttgttttttttttctgagacggagtctcgctgtcgcccaggttggagtgcggtggcgcgatctcggcccactgcaggctccgcctcccaggttcccgccattctcctgcctgagcctcccgcatagctgggactacaggcgcccgccaccacgcccggctaattttttgtatttttagtagagacggggtttcactgtgttagccaggatggtctcgatctcctgacctcgtgatccgcccacctcggcctcccaaagtgctgggattacaggcatgagccaccgtgcctggccagaaaaaagttctatgtctaaaaaaaagaaggactctaaagtttttggcctgagcatttggaaatatggagtcaccatctactaccatcaggaagacgtgggagagaggctagagagaaaatccgaagatctgttttcagcatattgtttgagttatgcattggacatcaactggggatgtcaagtggaacgttggatataattatcaagcctctggaaaacaacttagagatagagaagccaattcatacattattatcaaaagaagaagaataaatggactaagcattctgcttaaaatttccaaacaaggccaggtgcggtggctcacgcctgtaatcccagcactttgggaggccgaggcaggtggattacctgaggtcaggagttcgagaccagctaagccaacatgatgaaatcccgtctctactaaaaatataaaaaattagccaggcatgatgacggacacctgtaatcccagcttctcgggaggctgaggcaagagaatcgcttgaacccaggaggtggaggttgcagtgagccaacatcgcatcattgcactctagcctgggcgacaaggagaaactctgtctcaaataaacaaacaaacaaataaataaataaataaataatccaaacaataattataatttttaaaaaaggaaaattggaggaa

SEQ ID NO: 1560250 - DNA, 4001 bp, Homo sapiens
gggaggggcacctcttagcccctctcttccttcttgggctcagagaggtccagcagcctgaggaggtcacacagcacagcagatcctgaaatgatggaggtgggggaagaacgctggggggagggcgggtggcttatctccagaattgatgtcctcccctccccttcctccttccaggctctggggcagcggtggggggtgggggaggggtgttccccagcaaggtggtctacagtgggagaggaggaggaaccagtttctacctgctgcactgggggtgggggtgtgtttatggggagggtccagaggttccccgggggtcagtggtttgaacctaaacaggcaaattcaagtccctaagcctccgttttctcttctgtgaaatgcgagccactgttggggcaagtaaggtgacaaggtggagaaaggccctaggcagtgccctgtacagcggagaccccgatcacaattgtgatcacagtcacaagggcttggggccggtgggcagggcacttggctgtgcctgttggttgcaaaggcaccttctggattatcaagggtaacagatttgccaggaaaagaaaagaggctgatgaaagcgccagctgacacagtccccagttgtgatgagccaggcaaacttctgggcgcctcggcaatgccaactcatgtgattggctgccgggtttgtggactacatgcatagtaatttctcggcattcggaggaggctgggggtgctggtggtgggggggaggcggcctgtgctgcagaccctgccctttcctgggtgggcgccctgagaggcgggcacgctgctgtgcagaaagacgccaccaagaccggcctggggtcctaatggccatgggttctgtggacccagatccagcctttgccttgctgcgggcactgaagctccagcccccatgagcagtactgtcctccccgctgggtctggaatccctgaccagaaaggcgcttgcactcaacagccccgaagcccacgccacttcccacctccaccgcctggggggtgcgggtggagggagggggtcgtgggcaccgaggcaggagcaggaggggctggctcaaggtcacagagcaggggggtggaggcgcacagcggggctggaagcccaccctgcttggctagactcctggggtttcccgcctgtgcggggcagcccacccccagacgtccaggcagggccaatctaccccagccctgggtccctgaagcccggctcccggccgggcacggcgtggttggtgggggcgggggtgtcaaagcaaagctcagggtcaggaaagcagagagagccgcgacccaggggtctagcgggggtcacgcctgaccaagggtggggcgggggtctgacccagggccgcctggccggtgaggggtttgatggagaaagggcctgctctagggggcccgagggcgcagaggcacagtgcggggccagcccaggggcgacccttgactcaggaggacctcagtggtggagaggaggagcccaccccggggagggggcgcggagggaggggcttggctgggcagcggggcggagggcgaagaaggcggctgcaggagggaggaggccctgcccgaggggaccaatgcggagaggggcggcggggtgggcctcggtggggcgggctcggcaggggggcgccctccgggtgggggaggggaggcggccgggagctgtccaaggtgagcgcggaggggccggccgggcccggcgggaagggacgggggacgcccggcgaggggccccggagccacgcggggaagggcccggccccaaggcccgggaggctggggccgggacaaaggagggacgcgcggcggggaggacggccggctgggggctgcgcagggaccccctccccgccccgggccgcctacctgggcccgctggtccctgcggcgccgcggccgctgctcctgcccgctccggtgtccgctggcgccgccgccccccgcccgcccgagccgccgcagtcgcgcccgcgccgtccccgcccgccgggccccgcgctccgccccgccccgccccgccccgccccgccccggggacccgcgcccacggggccggcgcgccgcccggccaaggtcaccgccgccccacgcgggacccctgcccgcgcccggggtgggagaggtcgccaggatccgggacccccgccctgccacgtagccacctgcgcgcgccctccctcggggtgggagctggggccgcttcccggggaaccccgagtgggggccaggagcccggcttgggaggagcagagtccagccgggggtggagggctttggcagaaatgcggataaagggggtgcagaacgggacccctgaggccggctggggcccggtcacacgcagggcggggaatcagaggggtgcgttgtgaaatgagtaagtcgataatcaacaatcaatgaacaggtttagaagcgggcagaggcgggagggttcaggtcaatggggtgcacctggaggcccacccatcccaggggcctgggcaggggcgggatgggggcagaagcggactcagcgctctgtagggctggttttgtggaggcggaggcagcccatggcagtcaggcctagggaggtggggggtgagcaaagggggctggcgctgctctgcagcggatgggtttgccgttttcggttaggaaaatgtttgtgttcccccaacaggaggtgtcttaggggagcactggcttttctgatgcgtctgtgtgtccacaagagaccatggttccgcctccattttggagaccgggaggccgaggttccttttggcctcatcgggcagatcccagaggagactggactttggggtctagtgaccaggccagaaggtgctctcaggggtgggtgcgggacagtcccaggccgcaaggctgtcagaggaaggcgccccttggtggagaggccaactctgggacccacaggggtctctccagagtcagagccatcagtgggtgagaggctggtctggaaggtggtgagctccccatcaccaggcctgtgagcaggtgaaccccttgggccctcagctcctggggttctccatgacccaccatttccatggccctggatgaggtgggcccatctgcctctgcggagacttggcactgcctccaagaccactcagtcccctctcctgttgccactgaggctggggcactgaggttcaagcggctttggggctcaaggagctctatttctccctgatttgaccccactccccctcctggcctccagaccccttcctccagccctccttccactctgccactcaatgctccaactgcaacatgggcctcccctgctctaacgccacccatggctcccttctcccaggccaaggtccagcttctcagcctggcatccatggcccggcctgagtgctcctggcgtgcacctccctcccaccctgaccccagccctgcgggagcacctcagagcatggcccggcccctgaccctcatctgggggtgccctcagcaggagatggagacagccctgagggcagacaaatcccagcttctgctctacatggctgcctgcagggaagtgccttctcaagcatcggttcccccatctgtgagtgacgtcactgttgcccgcctgtagggttgctgggaacacatgggcagggcgcccacctacacggggctgctgggcacccaagcactcagacggcagccctgccccttcccagtccgcctgcctgccttcgtctcctgagtgacccaccagcgtggggcagggcgtcgggccggctccctgtctcctccgggcaccagctcaggccggggcaggctgactcatgcgtaggagagtgggcagggcggtaactccacgctgcggctgctatttatagctcccaggccaggctgtgggccgcgtgagccggcgaggccaggccctgttcccctcctcgctgtccctgaggaacggggtctccacacatggcccgcgg

SEQ ID NO: 1560251 - DNA, 4001 bp, Homo sapiens
gatccgatgagagagtgagagcaaacctgctttcctcctccgccctccttccctcccaacagatactgcagcacgagggatggcgggatggagggatcccaaggggacttcaggaagggcttccctgcataggcaccttgtcgatctggaggtggctggagagggtgttgttccccagctggtgctcctggttctcctctttgtggtagttcccagggaggccccggaagtccatgggggcagagaataagctgtctatgccccgaagcaggttaccctggggccggaggagggactggtgagctgctggacctcacatctcctcagtacagccccttctgcagccctgctaggatgctcccgaggccttgccccaagtccctcccatcccctttactttctgccctctgatacttagggcctaacctccggcctccatcccccatgaattctctctctattctcagtcccattgccttactatccctgttcctcttctgtccccatccccctctcctcctgtctctttccccagtctcttgtctctgtcccatctcctctctctttgcctgttacctttcctctcttatttatgcacgtatatatttatttgtttagagacagggtctccttgttctgtcatccaggctggagtgcagtggtgctatcatggcttactgcagcctcgacctcctgggctcaagggatccttctgcctcagcctcccaagcagctgggattataggcgcatgtacctgcaactattttttatatttttttgtacagatgagggtctcactatgttacccaggctggtctccaagtactgggctccaatgatccttctgcctcagcctcccaaagtgctgtgattatagcctgggcccagtcccttccctcttcctatctcttggtctccctgttgccctctcatcctgtctgtccccctgcctggccctgaaccatctcccactctgtgtccctgaacctcttctcagtacttcttcccccatccccccgccatcgcttactttcaggaaaagtcggctgaagccttggagtaggctctggaggcctgtgagacccaaggagctctcttgggcgtcagcatcatggataggagctgcagcggaggggatcaccagggtagagaggagcagcagcaggaccagcagatgccgccttgcgggggcaggtggggaggctgtggcaagggtcggggtcagagccccgcacagtggccacgcccccacccaagacgcccctctccagcaccttgcccaggtcgcctccccagttcaggcaactcccacaccgcgctcatttcccccactgcttctttcttctactcccacaccctccaccttgccaggccccgtcttctcccaggtctggctcttctgggttctgtctcatatgcttttttttttttttttttgagaccgagactctgtagtccaggctggagtacagtggcacaatcacggctcactgcagcctcgacctccccgggctcaggtgattctcccacctcagccccccgaagtagctgggaccacaggcgcgcgcctccacgcccggctaatttttgtattttttgtagagacagggtttcgacatattgcccaggctggtctcgaactcctgatctcaagcgatccgcccacctgggcctcccaaagtgttgggattgcaggcgtaagccacagcacccggcctcatccaatggtcttttcctcactttcgcccacgttcaccaccagatctcaatcctcaccttctcccataccccgccccttcttctgggctccgcctttatgctagaccacagcccgggtcaccggactcccggattccggccgcccacgtactgttaaagccaaacagttatggtctcgagcccaggtctggtctagagcgttggttgcgctccgcgagccgtagccacgcccctattgtctgaccacgctccaaacttgccggcctcacccaggagcccgggcctctactccatgaccacgcccttggtgacacagccacgccccatccttcgttcaccacaccccttaagccagagccgtgagttcattccctggccacgcccacacagtcagaccacgcccacgtcagttgacctcagtcctggagaccaagtcctggaagtcctggcggtgttctctgattgcggccctcgtttcggagtcccgcccaatcgcaatggccacgccccttggctgaaagccacgcccctgcactgggccacgcccctgcactggaccacgcccctgcgtcccagatcttgccctcatcaccccaagttccagtcctaggctcctcctactggagacaccggagtacaagcatcccttttagctctcactctaattgtgtatctgtttcggaaccttttctccgtgtcccttctggttttcccgctcccgctccactaaaaagtcccgttgtctccggaaaccctaaatccagtcttatatttcatcttccaaggaacccagaatcagacttccttttccctgaggacctcaggtccggactcccgccccctctagtcccgtaattttgaacacgcagcctttcacccttaagggaccgggccctaagccatcttccctcaggcaccaaagctctcttccccgtcccgggacagccgccagccgtctccagtccactagcgcctgtagatgaggaatctgcacctacgtgggcctccaataaactcccggtggtcctgcccacgactcttaactgtggtgaggtcacaaggaaaccaggtcgtcataggaatcagtcaaaacccatccccagaccccaatcctcaaaaaaaaaaaaaaacaaaaaaaacaaaaaacaaaaaaaccaaaaaccaaacagaaaaaaagaaaaaaaacctcagggcttaacagtaaagactctttgtattcgtatcacttccgcacccccaatacacaaacacgagggtagccgggattccaggcgcctagccccgtcccctctcagacctaggagcccatatctctctccagccgcttcctctcccagacccaggagtcccagcccccagacccaggagtcccagcccccagcctctcctccctcagatcaggggtttctggctcctatcagccttttccctccgacttggagtccgaacccccaatccccctcctttcccaagcacccaaatcctgagttcctaccagccccgagatagactaatctctcccaaagcaaaaatccttccccaaactgtcaccgtcggatcccccttcccgctgtccgccggccgggcccgcccccccctccggtccctcccacttttcccaaacaaagctcccggcaactttctccctcgcagcgccccgcccgcccgcggctccccagccccaggccgggaggtaggaaggcgccggcgggagtcggggatcctgctttggggtgtgtgagttggggtggggagttgcttcttaggaggtgaggcgtgcgtttgcgggaccgtctctgaatggttcgcagccctctttttgcccgggggcccgaatttgctcccgtgaccgagcctcagtgaggagtgggaactctggccggagttagggtgcctgcggctgggtctgagtttgggcgtgcgcgcaggagcgggtgcgggccaagggcgctggcggggtgtggggcgtgcgtctgcggcggtgtcactttggagtgagaaggaccccttgtgtaatctggggggcatttggtccttcttacggagaagggagggcctctggggtggccgaggggaggttacggggctttctggatcttaagtcttgcctctttggaggtttagggtctggggcgggaaattagggggacctttcttacccggctccaccgtccctttgtctggccacatggggaagggctgggctgggattttggcctacgggggtcctgaacgccgcagcgccactgggcttggctggggtctttgtctgctatggtcg

SEQ ID NO: 1560252 - DNA, 4001 bp, Homo sapiens
ccaacagatactgcagcacgagggatggcgggatggagggatcccaaggggacttcaggaagggcttccctgcataggcaccttgtcgatctggaggtggctggagagggtgttgttccccagctggtgctcctggttctcctctttgtggtagttcccagggaggccccggaagtccatgggggcagagaataagctgtctatgccccgaagcaggttaccctggggccggaggagggactggtgagctgctggacctcacatctcctcagtacagccccttctgcagccctgctaggatgctcccgaggccttgccccaagtccctcccatcccctttactttctgccctctgatacttagggcctaacctccggcctccatcccccatgaattctctctctattctcagtcccattgccttactatccctgttcctcttctgtccccatccccctctcctcctgtctctttccccagtctcttgtctctgtcccatctcctctctctttgcctgttacctttcctctcttatttatgcacgtatatatttatttgtttagagacagggtctccttgttctgtcatccaggctggagtgcagtggtgctatcatggcttactgcagcctcgacctcctgggctcaagggatccttctgcctcagcctcccaagcagctgggattataggcgcatgtacctgcaactattttttatatttttttgtacagatgagggtctcactatgttacccaggctggtctccaagtactgggctccaatgatccttctgcctcagcctcccaaagtgctgtgattatagcctgggcccagtcccttccctcttcctatctcttggtctccctgttgccctctcatcctgtctgtccccctgcctggccctgaaccatctcccactctgtgtccctgaacctcttctcagtacttcttcccccatccccccgccatcgcttactttcaggaaaagtcggctgaagccttggagtaggctctggaggcctgtgagacccaaggagctctcttgggcgtcagcatcatggataggagctgcagcggaggggatcaccagggtagagaggagcagcagcaggaccagcagatgccgccttgcgggggcaggtggggaggctgtggcaagggtcggggtcagagccccgcacagtggccacgcccccacccaagacgcccctctccagcaccttgcccaggtcgcctccccagttcaggcaactcccacaccgcgctcatttcccccactgcttctttcttctactcccacaccctccaccttgccaggccccgtcttctcccaggtctggctcttctgggttctgtctcatatgcttttttttttttttttttgagaccgagactctgtagtccaggctggagtacagtggcacaatcacggctcactgcagcctcgacctccccgggctcaggtgattctcccacctcagccccccgaagtagctgggaccacaggcgcgcgcctccacgcccggctaatttttgtattttttgtagagacagggtttcgacatattgcccaggctggtctcgaactcctgatctcaagcgatccgcccacctgggcctcccaaagtgttgggattgcaggcgtaagccacagcacccggcctcatccaatggtcttttcctcactttcgcccacgttcaccaccagatctcaatcctcaccttctcccataccccgccccttcttctgggctccgcctttatgctagaccacagcccgggtcaccggactcccggattccggccgcccacgtactgttaaagccaaacagttatggtctcgagcccaggtctggtctagagcgttggttgcgctccgcgagccgtagccacgcccctattgtctgaccacgctccaaacttgccggcctcacccaggagcccgggcctctactccatgaccacgcccttggtgacacagccacgccccatccttcgttcaccacaccccttaagccagagccgtgagttcattccctggccacgcccacacagtcagaccacgcccacgtcagttgacctcagtcctggagaccaagtcctggaagtcctggcggtgttctctgattgcggccctcgtttcggagtcccgcccaatcgcaatggccacgccccttggctgaaagccacgcccctgcactgggccacgcccctgcactggaccacgcccctgcgtcccagatcttgccctcatcaccccaagttccagtcctaggctcctcctactggagacaccggagtacaagcatcccttttagctctcactctaattgtgtatctgtttcggaaccttttctccgtgtcccttctggttttcccgctcccgctccactaaaaagtcccgttgtctccggaaaccctaaatccagtcttatatttcatcttccaaggaacccagaatcagacttccttttccctgaggacctcaggtccggactcccgccccctctagtcccgtaattttgaacacgcagcctttcacccttaagggaccgggccctaagccatcttccctcaggcaccaaagctctcttccccgtcccgggacagccgccagccgtctccagtccactagcgcctgtagatgaggaatctgcacctacgtgggcctccaataaactcccggtggtcctgcccacgactcttaactgtggtgaggtcacaaggaaaccaggtcgtcataggaatcagtcaaaacccatccccagaccccaatcctcaaaaaaaaaaaaaaacaaaaaaaacaaaaaacaaaaaaaccaaaaaccaaacagaaaaaaagaaaaaaaacctcagggcttaacagtaaagactctttgtattcgtatcacttccgcacccccaatacacaaacacgagggtagccgggattccaggcgcctagccccgtcccctctcagacctaggagcccatatctctctccagccgcttcctctcccagacccaggagtcccagcccccagacccaggagtcccagcccccagcctctcctccctcagatcaggggtttctggctcctatcagccttttccctccgacttggagtccgaacccccaatccccctcctttcccaagcacccaaatcctgagttcctaccagccccgagatagactaatctctcccaaagcaaaaatccttccccaaactgtcaccgtcggatcccccttcccgctgtccgccggccgggcccgcccccccctccggtccctcccacttttcccaaacaaagctcccggcaactttctccctcgcagcgccccgcccgcccgcggctccccagccccaggccgggaggtaggaaggcgccggcgggagtcggggatcctgctttggggtgtgtgagttggggtggggagttgcttcttaggaggtgaggcgtgcgtttgcgggaccgtctctgaatggttcgcagccctctttttgcccgggggcccgaatttgctcccgtgaccgagcctcagtgaggagtgggaactctggccggagttagggtgcctgcggctgggtctgagtttgggcgtgcgcgcaggagcgggtgcgggccaagggcgctggcggggtgtggggcgtgcgtctgcggcggtgtcactttggagtgagaaggaccccttgtgtaatctggggggcatttggtccttcttacggagaagggagggcctctggggtggccgaggggaggttacggggctttctggatcttaagtcttgcctctttggaggtttagggtctggggcgggaaattagggggacctttcttacccggctccaccgtccctttgtctggccacatggggaagggctgggctgggattttggcctacgggggtcctgaacgccgcagcgccactgggcttggctggggtctttgtctgctatggtcggcgggaggaggggaataggggcctggactctggggtcctgggaaagctgtggagg

SEQ ID NO: 1560253 - DNA, 4001 bp, Homo sapiens
acactctgctctggagccttgatagtaagagagcttcccctacttcgtctggtaccagaaccactgctacatccagtaccagggacatttctgtgcctgagatgccaagagccctggagctgtcaacactcagcaccacatcccaggagctgtgatgacatcataagacctatagataacaccaccaaccccgtgtctcacgtgggccccagctccccaccagtcccaagactgaagacactcacctccaatctggtctcctaactcctctctccaggtttcgatgatgaaagagaaggtgccctggttgggtgaaggaagggggagatgaaagatgaaagacagtggttagggtaagtactcaatgaaggccagagttcaggaatggagggtgatggccattgctggggactgagcaagcaagggacaattcccagagggaccagaccagcccagggagggaatgacatctgtggcttttttttggggggggggggagaatctcactttgtcaaccaggctggagtgcactggcgcaatcttggctcactgcaacaacctccgaggctcaagcaatcctcccacctcagcctccccagtagctgggactacacgcgcatgtcaccatgccctgctatgttttttttttttttttagaaacgaggtctcactatgttactgagactggtctcaaactgccgggctcaggagatcctcctgcctagacctcccaaagtgctggaattacagtgtgagcgactggacgtggcttgctttattgagcacttactacgtggtaagcactttattcaagagatgtggttgaatcgctcaaaagggacccttgtgaggtaccaggatgatcccatttttaagcttaggaaactgaggctggaaaccaggcagtcacttgtccaaaaggacaagggtcaagcattgcaatacaggtctgttcatctttgtgcctttgggttgtgggggtgggagacaggattttggaggtgaaagagtaattaatacaggacccaactgaaagaactgaggacagaaaaaaaaaaaaaaagagagagaagatattagtggtccccaagacaaggtgtgagaggtttggggataaagatgaggaccacagtttttagggatccccaaggagcagaggtagggttccttgagtttaggatttcagagcttgggtttgaaattctgggaatttggggtcccagcatccagggttggggaatcagaacatttagaatccccagtgtgtagagtttagaggtctgtgaatgtggggttccagacggtagagttactggtctgggaatttcgtccaccccctgggaggcaggattagggtcttggaagctggaggggagaggaggtggaggtttcgctggcagggttaggcctccagcaccgggagtcccccgggggcagcacttacaggccaggcgtcccggaagggcacctgcaagaggccgtcgggcagtgggagatcaggcgcgggcgctccgggctgctcggtgtagaccggtccgcgcgcactcagcgccgcgcccagggcgcacggggactcggcggcctcctctgagagcccaggcttcaggcagactctgaagaagaggcggcaggggagccgggcgctgcagggggaccgcggggccccagggcctggacccggcccgaaagagtggatctgcagctcgaagacgccagcgggccgtgtctgggacggagacgggcgcagggtgaggcggccgggaggacccaggcttcccgtccgccccacgctccttccccaggaccttcaggtcgcactcacccctcccctccgcattcatccctttccacgccacctcccacctggctctgacctgggggaggaaaatgagcgctaggatcacagtctgggagaggagcccggacatccgtggggagaccatggccttctggtgggggggtctcgggagtcgcagctgctggcttccaagccttatatctgagagaatggccccgccccttcaggcagctacccggccccaagggaccaagggcggggcggggggggcggtcacaggggagggggagcgtgcaggagcaacagcgagattccgtctgtggtcgtgggcacgagcgaggtcatgcgtgggtgatcccgcgactttttgtgtggctagggtggggtggggttagggggctaagcctgtgtgtgaggttgtacatgattttaagattttgtgtgtgtggtatgaaccagagctaccggagggtgcacatgactttgtcattgtgagtccacgtgggactgtgcggctcagcatacgcctggagttgtgtgtgattgacacatttatgaggttgtaaacaattctgattctgcacgcacacccgagtgggacactagaagtgtacacgacttcgtgattgtgtgacgctttgagattgtgtggctgtgtggctgcttctctgtgcgtgtgtgtttatgggagatcctgtataggcgtataaacctgtgactttgtgctctgtgcgggtgtggtagaggctgtgcaaggtggtgaatggctgagggcgcctgtgtgtgaatgagactgggtttgagaggtccacggatgcagccgcgtgtgaatacgatgaagatccggagttctttgtagacccctgtgtgcgctggtttgtgtgaatgagactgggtttgggagatccacgggtgtagctgtgtgtggatacgatgaagatccagggctctttgtggacccctgtgtgcaggcgtgtgtgtgttccccctccgcaagacaaagccaccctcccaaaccccgcatcgcggacgcaccagacgccagggcgaggagctcggcctcaagagggggctcccagctgtatgtaaatgccgccatctgccgggcggccgagcccctcccccttcgggccgcagctgggctgcccgtttggcctccggaaggtgtgaggagcaaatgggcaggaaattccgtcttcacatacagggacccgctcccccaccccagaagaactggggggggggacatcccgggcccttcagaaaccctttagtattccaggacctcagcaggaaaagccaattaggagcagatgtcccagcccctctggtcataattgctccctgccaggcatggggcaaaacccttgagctggggtaacttcttttttttcccccccaaagtaaaaaactttagtgcttagaggctaataattataggggaaaatacaggttcaatttatatgtctttttccagagaagtaagatatagtaaccaacgaagcctagcccagcagagccaggcatacagtaggcgctctgttttttgttgttgctgttgttgtttttttcagaagaagaagttttgctcttgttgcccaggctggagtgcagtggtgcgatcttggctcactgcaacctccacctcccgggttcaagcgattctgctgcctcagcctccagagtagctgggattacaggcacccaccaacacactcggctaattttttatatttttagtagagacggggtttcaccatgttggccaggctggtctcgaactcctgaccttcaagtggtccacccacctcggcttcccaaattgctgggattacaagcatgagccactaatccctgcgcagttaattttttaatgaatgaaagaagaccaggctgggcacagcggctcacgcctataatcccagtactttccgaggctgaggcaggggactgcttgaggccaggaatttgagaccagcctgggcaacacagcaagacacacttttctacaaaaaaaaagaaaaggaggaggaggaggagaaaaaaacagcctaaagattcttctcttaattctgacaacagtggcgtttgagcaaggcagcgccatgggtcagattgggcagaacatcccaggctccttttccctgtatttgtcttttccactcccttatttttttttaatttattattattgtttgagatg

SEQ ID NO: 1560254 - DNA, 4001 bp, Homo sapiens
tcatgcagagcccccagcgggaagacagggtggttgccggtctcacctttgcaggggtcttgactgagtacttcccaccataggcagtgggatacgcatgctggttgtaattgtagttctgtggaagaagtgggcatggcggttagaacagacggacgaaggccattttgctctggaataaacatcccaccttcctgcctggaccagacctttcctaaaacacctgcctgctcccctccttgtgtcacgtgttttcttttatacaatctcctccagccagccagggcccccaccctcacctgcctttactgtcctagcccaaatggccgccgcctcctcctcctactcctcctcctgccctcaagacctctgccaactcttcaagtgttacttgggaggtgagggtaggagaccaagaaaagaagtgccaggacgtaacccagcgggtccatggtagatgtctcaccttggaagttacagctgccacctcctgccatcctgcacccggctgagaaagccattgaatggaggagtgaaagagaatttcagattgcccagacccgggagcaaggccaagggggaccaagggccctgcagggtaacttgaggacagagactcacctgatcgtctctgcctgcacgtttctgcagtgatgacgcgtccgcaccctgaaaggaagaaggggccacagttcgtgcctccgcagtcgtgcgggcattgccgggctttcagagccccagtttctccctcaccccacccctttccacgtgctacctatagagaaggcagtgagcctggaggagctgatggcccagatagatagaagacagatatccacactcagcattgggagccagggagagaaccaggtttggcaacaccttccccacccatgccgtgggagagttggcagccccagcctaagactgagctagaacaagtgagctgcagccatgcaggctcctctggggcagacgcaggcactgcagcccagcccaccttctgcctgcaccaagtcctgctgctatgcccgtaggcccttagtccctgcacaccgacgccatgccccacagggtgcttgaaggaggggttgttatctgcagaagctgcgtgcttaggttagctctggaccacaggaagcaaaagaagagaaatacaagaaaacagataaagcaacttaagacactgcagatgcaccggacaccccccccagccccagcgcaagaggagaaactctaagcgttgaaaagaagttcagttcctgccatcacggcttctccacttggaccgtccgccctgccacacacacacacagagtgacagtgaagtcctgactccagcattaattctgccttatccatacctgaccttgaacctaaaccccactgcaagccctaaccctgaggtcacaaactggttgaccatgggcctccagatattttttgcttggtctacttaaaaattaaattagttacagttagagatcagcatcctggttcttcgtgaaacatcagacaacacgccaccctgttcacacatgcatgcatgactgcacttagctggagcgcctcgacctccccctttgcagggccccacctgtccagcctcatatacttggcacacgtagacacgggagcaggcagcctttgtctcagtgcccacgggtcctgtttctcaaaggctactggccatgcagaattggagtgtggtctttggcaccgcccagaggttctccccatcctccctgacccaggtcttcagaccctcagcagctgcctccactagacagggacctgacccctgcacaccgccctcccgttccacctcagctgtcctccccatgccgcagcctaggccccttcttcccctcaatacgatctccccgcacctgtgcaccctgcggtacccacccagccgtggctcccctgggtccaggccaggcccagcaggagcaggagcagagcagaggcagtggccggcttcatgttcatgtgcttgtggaggccccagccctcggcctcggcttttatgctagggaggtcctcccaccctgctcctcagtgactcacggcttctccctctcaccccgcccccactcgggattgcacaaagcctgggaaagtgggaagggaggggaagaaactgggacagacacctgggtcagcggctcgcccagggccccgaaccctgtgtcccagagctgagaagtcctgccccccttacctcaataattgctttccagttgaggaaaggagtgttctgtttgaaatcctgcagggagaaggagggcagagtgggccggggaggcagaacccacggggtggtctatgcagcaaattggggggattccagatctcgggtaggaaggagcttttgggtgtggcttggggttggaggaaggtaagcacgtgggagattgagggtgtcagcacttgagatggtattggtgataagatttggtgataagatttggatgagctgtctcaaaaatgaagagggggagttggctgggcgcggtggctcacgcctgtaatcccagcattttgggaggccgaggcaggtggatcacgaggtcaggagattgagactatcctggctaacatggtataaaccctgtctctactaaaaatacaaaaaaaaaattagccgggcacggtggcaggcgcctgtagtcccagctactcgggaggctgaggcaggagaatggcgtgaacccaggaggcaggagtttgcagtgagccgagatagtgccactgtacttcagcctgggtgatagagcgagactctgtctcaaaaaaaaaaagggggggagttttgaaacaggtggttggagcagagggtggctgccttgagggaggcttggggagagtcaggagggccaggcccccagttcttcaaacagcaagaattctcctacctcccagagtcggctgaagtagaggagggctcgggtgctggggggcgggacctggttctgtggatgaaaggcggggagcaggttagcagagagcctgggcccactcacccacccctcctcctgctactgccctatctcaaccttcagaatgtcattgtgactaaggttggggatgggaggagctgagagtctttagggacaccaggaaaccattttgggaaacacagggagagagagaggcactaaccaactctccctgtcccagagcatacaatgttttctatcccaagttccccagcctccagcagaacctaattctagcaaaacctcaagactaggacctgcctcagagtgtcccctttccacctgccgggcctcctccagcccgtttcccgaagctgtggggctgcagccaccccttccacaccaccctggataacagcggagacgtaagaaaggagcagaggccaggagtgtggggcagctaaggtttatttcaagggcaagggctgagattagtgatgagagggtggtgttttaaggagggagtgtgggggctcccatccaatctggtggctccttgtctggaggtcacgggatgcgagagcttctctggtcctgggcaaagaaacaggtttttttttgtttttttttttttttttttgagatggagtctcgctctgtcgcccaggctggagtgcagtggcacgatatcagctcaccgcaacctccgcttcccaggttcaagcgattctcctgcctcagcctcccaagtagctgggactacaggcgcacaccaccacgcctggctaatttttgtatttttagtagagatggggtttcaccacattggccaggctggtttcagactcctgacctcaagtgatctgccagcctcggcctcccaaagtgctaggattacaggcatgagccaccgcgcctggccagaaataggttctaagagagagcttgagaaataggaattccagggcattgtgagccagcacaagggtataagagacccctgctccagaaacctacagggacctttttgcccaccactgctatccaaacaaacccaga

SEQ ID NO: 1560255 - DNA, 4001 bp, Homo sapiens
tccctctccacccaggccatattccatgatgcccagtctaaggggagcagaacttctccatttcctcctggtgcacaactcctgggttgcccctctccactcaccccagagttgctggagcctccacctgagccagatggtgggggattcgtgcactgtcgagggaaagggatggtgagtttggggacggtgagtttggagacgttggcctcggccatggacacaggccaggcctctcccattctttggggcttggcttcctttctcctaatgtgtttctcccacctccccttcccatctgcctcctccccaggcccaggcccgtctcttcctccttttttttttttttttttttttgagacagggtctcactctgttgctcaggctggagtgcagtgatgcgatctcggctcactgcaacctccatctcccaggttcaagtgattctcctgcctccgcctcccaagtggctgcaattacaggcgcatgccactatgaccggctgatttttgtatttttagtgaagacagggtttcaccatgttgaccaggctggtcttgaactcctgacctcaggtgatccacgtgccttggcctcccaaagtgctgggattacaggtgtgagccacctcgcccagccccatctcttcctctcaccccaatccctccactcccccatcttgctttcctctttgtctttccccagctctctgtagcctgcacccagtggcttcttcatttgttcccagccccttcctcttaccccttcattctggttgctggctctcactgaaccatagccaggctgggccacagctccctgcagagagggtgagactgagagtaggatccagagggaccagggaggcacgcggagcatgtgggcttggagggagggaggtggcaggtagcaggtctgggggtgactttacctgagtgttggtcccaaagtttggtggccctccattgcctccttgaccccagggagctccctgaggattcattccaaagctgcctgctgagtttccggggtatccgtggacccacggagtccccagacctccaggattgccctggccctggcctccaaggccaccttgagagccaaagatgccatggcctccagaagtttcctgcaagaacaacatacctgcacttagtgggaccatctctgaccctggtagagaagagccagggcaaatcataaagagaccaggagagagacaggcagagggactccagggtggcataggaggggggcagaacatagaaggaagctgccccagaagcctgcaagtaagagatccatccatcctttcaaccgtttcccaagaatctcagcccagcagcccacagcctcccatttccacatgcagccccacagccactcacccaagcaccattgtggccaggcaccccctgccaggagccgcggacagcatctgctccgtgtcgaatgacatcttctgcctgtctgccaatctcgtgcccagtgtttcccagagcatgggctgcttccccgaccctgttgcccaaagcatctgctacgccaaagcctggaacctgcctgactccagtgccaactgcttctctggtcccttggccaagggcctcactgactttagagccagctgcccctccggcctctttgccaatggcctttcccaccccttcgctcagggcgtctcccaggccatgtccaagggcctccccaatatttgtcccagtgctttcctctccgctctgcagggggccagcctccccactgcccaggcagagggccagcaggaggcaggccaggggcccctggaacttcatctctgcccagccccctctctctccagagtgtcttcctcccaccagggtctcctccttgccgcccttgctctgcgtctctgtgccctcctctgtcctcctccttccgactccctgtcctccctccctctgggtctgcagccttctctctcctgtcctcaactgcctgggcttctcagagtccacctccctgtcactactccttatactctaggttgggagaaggtgacagggctgggcaacctgaggtccctccccgcagtgactcagggcccagccaccaatagggtaatcagctgttattgtgagtctgagagtctctgtcgaaacagagagtgagccgcatcagggagggagggagaaatggatgaggtgatgcaaaagtgctcccatttcccaaccccaggcattcggggagctgggtgggggcaggggcatctaaggagacaggttgtcgttggctcctggaggcggtggggtgggggcagacttagaagagaggagttactggcaggaccccaccaaaggagtaaggacagggaagccccaggggacaggacccacccaggctcagccagcctggctcaggggctccagagtgacaggcattgcccgtcctcggcctggcctttctcggtttcagcacctcagcctctcctctccctctcccctcccgcattgccacctacaggtgactgccttcttgttcctccacaccttccagcccacagagagagactggcaaacacggggctgcgtgtcagtttctgagattctggggagagcccccggggggaccctcggtgtcggggaaggaggtggccatagccctttgagtggtcagcagggtgtctcagcgttcaggctgctcccggctgagaaagctgggcgcggagcagggcagccaggcgcgccagccacccccagggaacgagtgggagggaaggccaagggagggagccgctgacccaggcacccatcctgtttacgcagccctagaggggcacgtgtgagtataagcgcctatgaggggcgggactgggccagctcaccccacccatcccccaggccaggggccagggcagcaatggcaagcgagaagagggtagcgcaaggtcaggagccatccgtgagagccacggccctctccccagtcccagctcgggatacagaacctgggagcctccccccgcctcacccctgcccagcaagtgtggctgcttctctattcccaggggccacagggcctcccactgtttcgtatcactggggttcatcgcccagttaggaggggccagtttccatcagcctttctcaatgtctctcagtcagtctctctcttctctccaccccaatatccgcaccccagcttataacatccaacacttcttaccttgtaaacactatccccatctgtcctcctcagctcctacttccctgttattccatctctgactcgttaatgatgataatagcgatggtggtaataataataataataataataataattacagctccagcttatcagcggttctgtatgtacccagcattggactaagcacaagcagtttaagaattatacaactctgggagatggttctttttttctagagacagggtcttgcccaggctggagtacactggcacaattgtagctcactgcagcatcgacctcctgggctcaagcgatcctcctgtctcagtctcccaagtagctgggactatagatgcacaccagcacacccagctaattttttttttctttttgagacagagtcttactctgttgcccaggctgaagtgcaatggcacgatcttggctcactgcaacctccgcctcccaggttcaagtgattatcctgcctcagcctcccaagtagctgggattacaggcgcatgctgggcctgtaatcccacgctgggctaatttttgtgtttttagtagagacagggtttcaccatgttggccaggctggtcgtgaactcctgacctcgtgatctgcctgcctcggcctcccaaagtgctgggattacaggcgtgagccaccgcacctagcctccagctaattttttaatttttatttttgtggagatgagatcttgttgtgttgcccaggctgatctcaaacccctgggctcatacgatcctcctgccttagcctcccaaagtgctgggatgacagg

SEQ ID NO: 1560256 - DNA, 4001 bp, Homo sapiens
gcagtcctgtccgacagaattcccagaaactccccaaaatactaaggtatttacaagaggcattttaaatcagtggttgaagtgattgaatacatgggaatgggaatatcagtgaagtattttgggggaaaattttagttctagctcatcaatttcctcctctctgtttttaaccagttttcccctcataaaggaggacacagctcggatacaaagcgtagggtaagtctggttagatggaggggtgggactagacagcatataggaaaacaaagtccagatgcatcccagttaaactgaaaaagtgaaattgcaggagtatgcatagtgctagaagaaaattaccttaaagcggtacaccaagagcaaaaaccatagaggaaaagatggctgctttttgactacttatatacttaaaactgaggtatattaaaaaactagaaaagtccgagtgcagtagctcatgcctgtaatcccagcactttgagaggcagaggcggacagatcacctgagatcaggagtttgagaccagcctggccaacatggtgaaaccccatctctactaaaaatacaaaaaaaaattagccagaggtggtggctggcgtctgtaatcccagctactcgggaggctgaggtaagagaatcgcttgaacccaggaggtggagtttccagtgagctcagatcgcaccactgccctccagcctgggtaacagagcgggactccatctcaaaaaggaaaaaaacacaaactagaaagagggttacaaatgggaagaaatttttttttaaaaaaaccagtttgttcccataaaaggttagtatccctcatagattatctaaaaagagatgtctctactcagccccagcacctccggtctggccttgcccctggccacgtgggtcctttcccaccaacgcctcacccaggagcttgttagcaacgcggctaacaggctcagccccacccagccctgttagagcaacctgcactttcacaagatctccgtgacactaactctcagcaccacaggtgctgacataaagcccacatttccagcataactggggggaatgtttttccaaagcactctgaatcccccagagttcaccacagtctgttccccggctggatagaggacatttaagacaattgtgcttctaaaaggaccggtttacatggaatttctcccagccccatctgtggtataaggtgaggtatatcacagcaagatttgcaattaattagtactttggaaatcgttagcatttttaggagtgcatttggtttcttctgccgaaatagtcagttccctgcagacaaggcaggagggggttgagcagagttgagttaggaggagtgggcacagtcctgggcaggaactgcagtccccaggagacttaagagactttggctctcacctgaatcccagattccccgctcccgcgggcttcattccctggcttttcacactgccggggagagaaaggggagactttccctcagtcccctcccagaccagtcccagccccaaaatggcagcattttaaccctggggcgagccgcttccgctccacctccgcggccatccagccccatctccgcggagccttggctccccgatcctgcgagtgaaaccagctgctctccttttccttcccgcggttggtgggagattcacgccagccactcaccccgggtttatgtccatttcctccgccgctcccaccgtggttgccggaggaggagccggtgctggatccctgcaggggaaagcaagatttcaaacgctgtcctaaaggacctaaaggggacccagtcgttcccagcggtgttacagatttgttggaaccccaatcagattccagtcctctttccaacctccagaccttccccctctttagcctgttggtcgctgcaggaagttattccgagcatggagaaggccaggtgtggccgagggtattcggaactacgcaatgatttggagaacctgagctgctgcccaccgcaggccgggggtgggaacccctggagcccggccgcgcagtagccgcgatcctgccaccagggggcagcaagtggaagggaccctagagccctcacctgggagcggccgtagctgccttggtcaccattcccagaactgccctagatgggggagaggaggatcatacggggagcggcgcatgagagcagctcaggttattcggcttattgtgtccacgcacctcctcctgtctgacacttttcccgacccccgaggaagccagatgtggctccctctccagctcgactccaagacacgggatgggagaggccgtcagccaaggggttggacaggccattgaccaggaggctggagagactgccggctctggagtcagtgaggcccggggccctggggtggcagctgcggggtcacagcgccccttcctgccctcacacccatcgtgcaggggccccatgtgtgaatgtcgtctgcaccgtcgctctgtcagcgtccgtaggtctcccggatcacagtcctgcccccattctcctgggagcttcccagacaagtgtcatattctcccatgtccccctctttctccgccaccccacggtctcctgagacttgccaagtggacttgactgcaagagcttagacaggcgggataacgtccccaccatcacagagtggaaaatagggatacagagtcagaagcagtggggtggctctggcagaaacgatagtgcgcgcatcaggggcacagcatgggtggggaacaggaggctgagggagcctcagggtgacgactatcagcgaggccgcccatcctcgggcagcggcagctttcagagaaacttggagccctctcccggcagggaccactagggcctcaccccatctcagccttccacagaggtgccaaactcacccaggaggactcactgccgctgtcacctctgctgccaccactgttgccactgctgccaccactgctgccgccactgctgccgccactgctgctgccactgctgctgccaccactgctgctgccattgttgttgtcaccattgctgccactgccactgctgcccgactgtgagccgctgcctccctgaggggcaggaagggagcagggctgggattaaagacagagcaccaagacgggcccctcctccctccctctccacccaggccatattccatgatgcccagtctaaggggagcagaacttctccatttcctcctggtgcacaactcctgggttgcccctctccactcaccccagagttgctggagcctccacctgagccagatggtgggggattcgtgcactgtcgagggaaagggatggtgagtttggggacggtgagtttggagacgttggcctcggccatggacacaggccaggcctctcccattctttggggcttggcttcctttctcctaatgtgtttctcccacctccccttcccatctgcctcctccccaggcccaggcccgtctcttcctccttttttttttttttttttttttgagacagggtctcactctgttgctcaggctggagtgcagtgatgcgatctcggctcactgcaacctccatctcccaggttcaagtgattctcctgcctccgcctcccaagtggctgcaattacaggcgcatgccactatgaccggctgatttttgtatttttagtgaagacagggtttcaccatgttgaccaggctggtcttgaactcctgacctcaggtgatccacgtgccttggcctcccaaagtgctgggattacaggtgtgagccacctcgcccagccccatctcttcctctcaccccaatccctccactcccccatcttgctttcctctttgtctttccccagctctctgtagcctgcacccagtggcttcttcatttgttcccagccccttcctcttaccccttcattctggttgctggctctcactgaaccatagccaggctgggccacagctccctgcagagagggt

SEQ ID NO: 1560257 - DNA, 4001 bp, Homo sapiens
actgggcagcctgggtgggggaccagctggggtggaggcttgtggctcagggactgtggggacagggaggcctggactcccgggggtggaagaagtggaggcaggatggagagagggatgggtatgggaggggagggaaggagaggagacagtgggttctggaggaaagagaggggttccggggggttccgggagagtgggccagcagggacgaaccagccagggctgaggacgggggagggaggagagagccaagacattgagcccttttaaggcagcaggaaccctggccccctcccccgccccaggcctggcaggggaggggccgcgagatgcagctcgggccacaaaaggagtgctcctcccgggagcgccagacccctaccccacccggtctcagtttaccctgccaacccaacttcatcctctactaaagggaggccaggagagtcattaggggctgtgggaggttgggagaaggtttttccagaggctgaatggcctggcccttcttggcctccaccttcccatctgtgaaatgggaggaggagggaaaggaaccaggcctgggtcagaaagagatggacacaagaggaagcaggggaaggcggagaaacaggaaacaagtgtcacacacagtttgttacacacaggccaaaaaccaaacaccagtcactgagggccagacatatgagggccagaggggcagggtgctgggaatgaaagaaaccagtgaccagtgagcccgagtcctgggcttggggaggaggtgggcagacaaggcagctggcagaagcggaagcatcctccttccagccctggccccaggccctggaaagcccttgcaagaaggggttttgtgggacagctggaaggttggaggccctgggccaggagaactaaaggacgcagggacccggggtggcgggaatggtggctgacccacacggctcataggaaccgagactttggggctgggggtgggggtgggtgcagaacctacaaaagaaggagacacacccagaagaacccaaagttgtccctcctggatcgcagaggagggggcactggtggcgcctgtctgcaaagctggttctcccacagggcccgcgtgagtcaccgccctcccagtgcctgggcacctgttggggcagctggagaggctggcgccgaacacctgcctgtcggctgcgcccctggcagctgccccatgctggccctcctggcttgccccaggccacaggaaaccaggggagagggccatagagcccacttttggggggagggtcctaggagagggagctcccagcatgaccctgaccctgaccctgaggcggggtgcagagaggccatgggaggctgttggcagcctagcctgctgtgactcctaagccatggctctgagtcacagccaccctagcctctgctgaccttactctgcccctccagagtggtggcataggacagagaaatgttgccccagggcccaggtccacactctgagccccaggatgggaggatctccccatgcccatcctgccatcctgcccccccaacagccaggcctctgtgcccagacctgtctcctgccccacccccaccccatctgcaggagccccgagggtaggcactcaccccactgcaagaagtcggccacgtacttgtcctgggccagttcggaggcgcccagctcctggtggacgcccaggagaaggtcgagcaggggctccagccccaggaagcccgggtccaacaccagctgctggagccgcctcagccgcacctcggctgacatgttggacaggcagcaccatggcccctccccgggccgggggctcggggtcctcctgtcacagggcctggcagcccctgtccaggccctggagccctggctgcatgtctgcctgtccctggctgtcccctgggcctctctggccacttctctctgcggccggccgaggcctcctccccttctccccaccccttggtccagcccccctcccgcctcccagccttaacccctcacaagccagccccccaagctccctccttccagggcccttcagaacccttcagtgctagagtagggggaatgcatggagaatctcagctgtcacactgtcaccccaataaaaaggtagagcacagaggaagccacaggtgtgatgaatttcaagaagaacctgcccattgctgaaacagggccaattgaggctgagtgacccagtagcaaccacccccttgctcccgacaagctccagaactgggggctagggggtgagggctgggggttggggctgggtgggagaaaggggttgaggcctgggaaggggacgggaggccagggcagcttcttgggtgactcagagatggattccgactcggacagttaaatttagccctcaggctctctgctttataccagctttttttttttttttttttttttttcccaggaggtggggaaggggtggtgaggacaggaccaggagggggcaccctcagagcctgaacaggggtgacctgctgcccaaaggctgggggaggaaagtggtggagccaagccctccctgggcaaacgagaccccaaaatagctccttggcccctggccggggagccacattcctgcccaggctgggattagaaacagaaacatttcggggggtggagggtggcgcgggaagacacactccctgcggctccgagagccaagaggaatctgagctcttctttccagggtggacggttctccagagtggaagtcggggcctccaaccggcctggggtgcctgggccttgagagggccaggcctgagaaactaggaggcaaggaccgaggagtcccagctgggcagggcctgggaaacgtggtcctgggcagttctgataatttaaaaaacaccgaggactttgatgaggggccctggctgcgggcaggatgctcttctccccaagagggtcctgctccagccgctggtgtgggtcaccagttgtgtgactcgcaggtccgttccctccctgggctccggcttttcctgctatgaaaaggggtgggaggcgctgggctgggagcaggcctgcactcctcctctggggaaagcggactgcctagaaccacagagtacacacacaggtcctctacatcatctcctccgaaggggacagacccgctgagaaaacagggaactttagtataaataagaggtcctgcgggacagggaggaacctgaggggcttccataatttaacactcttcaaaagcacagacaatagcaagggcagctggggtgggggccgggcgagggctggaccacccccggccctgcccactcaactgaggggcacactgcagacctggggctcttgtggcaggggcggggagtctctccccaggagtgaccagtcacatgctggggacagggatgagggtaacactgatgtttcagaggaagaggtcattgtacttggcagtgggtgggggacaaggctgaggccacaagggctattacatcgcccgtgtccgggccagtctggggggcccccaaattttgtgcaggtggggggactggagcagtccatccatcatggttagtcttgttaatacgttgatctgtgaggtcagcagggagggttatggctaggaggctgggggcatggggttgggggggcccgatatccatggcttcacaccactgtgccactcggggagttgcctggttgggaggagatgccctggggaagatgagagggagagatgggaggggttagagaccacctgggcttcagccagtgtcaaggggagggagccagcccagagtccccaaagctgctgccaccctggccttgcccttgggtccgccctagaccccccagaggccactgctctaggctgggaacttgcatcttagctagcttcctgtcctggcagtcagcactttcacgcaataatcaaagtccttggcggatcctgagtgagaccatggggtaagggtaagggtgg

SEQ ID NO: 1560258 - DNA, 4001 bp, Homo sapiens
agcaggtccccgcccacgtaatactccatgaccaggtactgagaaggggttcgtcatgggtggttggtagtcccctgaggccctgatccatcacggatggctgggacaacccctcccagagacaccccatccttgggcagagacctgcagccccagcccagagataaccatagagatctgccgggccaaatcagagaccacctgcggcccccgcccccgcccctcaaaaaaaaacacaaacaaaaaaactttcctgggatgtcactgggcagattcactccccctgagatgttctgggaaagagaacccagaggccacccaacacccagagaataggtcccagacactccttccctaggcagtggccccgttagaattcctgaagacctatcccattccaggtaagagaccccccgcaacagagacatctttataagagtcccccagatcaccccagaaacgggcagtgaaggacaccatccccgtctcagatagggaaggcccctcatccacctgacacaccctcttaccgcacacagactttcccacagacgtttccgggcagcacccccaatcctagagcttcctctccccacctcctcgtccagtgacagcacgggctcttgtccctcttcctagtcaccccggcccggagctcaccaggtagttctcatcctggaaggcgaagtgcagctgcgtgatccaccgccggtccccattcaccaacacgtccctctcctcacggaagcacgacacctgcagggcacccggaggagctgcagccggagacggggcgcggatcctcaaagccccccacgtccgcccagcccctcacctcgcccctcttcagcatgtcccacttgttcatgatcttcatggcatacacctggcccgtctgcttcatcttcactaccgctacctgaggtcgagatagtgagacagagtggagacggcgggaaaacaaaagggctcgcccagacccaactccacccgcttctgcacccagccgtggccccgccccacctgccacaccacgcccattggtcccaagccccgcctccagcccagccctaggttctaaggctcggtcattcatcaatttctaaggccccgccccaacccctatgccccgcccaccacgagtcaagtcaggctcccgcccggttcggcttacctcgctgaacgccccgcgtccgatcaccttcagaatctcgaagtcgtccctctgcagtcggacctccttaagcctcaccacgatgggctccgctgggggggtggtgggggaaaagaaccgagggtcaccagaaagggcactggagacaagggggaaagccccaccctctgtctgtctccccttctctctgcctctcagcttcaccctaggactgtctgcttcccaggggcttccccacataaacaccgtgtaaggttctgggggccaaaaatgccctcccatagaggtgagatgcctgagaagccctttgcgggacagggcattggcccagagggctccaagggtgtgcaggatggttagggtggggtaacggagtctgcagaaggacagaccctaaagaacaaggggagaaggaaataagacccagttcttccaccttccaccctgactccaggtgacagttcaggtgcagccagggccccacccccacgttctcatgtagaatgtcctgggtaacggcccagacgtggggttgtatccagtacctctagattcagatgcaggtggttcttgaaccacactttggaaaaccctggatttggggctgggggaaggaacaggacagggagacaaaggtagcatggtcacatatcccagactcaagtgctccggtccagcccatctctcagtcctccaggaggagtgctttagtcctaccccttatttacagatgacaatcaggcctctcagaagtcaaggtcctatgactaggaatgttaaactgggcagcctgggtgggggaccagctggggtggaggcttgtggctcagggactgtggggacagggaggcctggactcccgggggtggaagaagtggaggcaggatggagagagggatgggtatgggaggggagggaaggagaggagacagtgggttctggaggaaagagaggggttccggggggttccgggagagtgggccagcagggacgaaccagccagggctgaggacgggggagggaggagagagccaagacattgagcccttttaaggcagcaggaaccctggccccctcccccgccccaggcctggcaggggaggggccgcgagatgcagctcgggccacaaaaggagtgctcctcccgggagcgccagacccctaccccacccggtctcagtttaccctgccaacccaacttcatcctctactaaagggaggccaggagagtcattaggggctgtgggaggttgggagaaggtttttccagaggctgaatggcctggcccttcttggcctccaccttcccatctgtgaaatgggaggaggagggaaaggaaccaggcctgggtcagaaagagatggacacaagaggaagcaggggaaggcggagaaacaggaaacaagtgtcacacacagtttgttacacacaggccaaaaaccaaacaccagtcactgagggccagacatatgagggccagaggggcagggtgctgggaatgaaagaaaccagtgaccagtgagcccgagtcctgggcttggggaggaggtgggcagacaaggcagctggcagaagcggaagcatcctccttccagccctggccccaggccctggaaagcccttgcaagaaggggttttgtgggacagctggaaggttggaggccctgggccaggagaactaaaggacgcagggacccggggtggcgggaatggtggctgacccacacggctcataggaaccgagactttggggctgggggtgggggtgggtgcagaacctacaaaagaaggagacacacccagaagaacccaaagttgtccctcctggatcgcagaggagggggcactggtggcgcctgtctgcaaagctggttctcccacagggcccgcgtgagtcaccgccctcccagtgcctgggcacctgttggggcagctggagaggctggcgccgaacacctgcctgtcggctgcgcccctggcagctgccccatgctggccctcctggcttgccccaggccacaggaaaccaggggagagggccatagagcccacttttggggggagggtcctaggagagggagctcccagcatgaccctgaccctgaccctgaggcggggtgcagagaggccatgggaggctgttggcagcctagcctgctgtgactcctaagccatggctctgagtcacagccaccctagcctctgctgaccttactctgcccctccagagtggtggcataggacagagaaatgttgccccagggcccaggtccacactctgagccccaggatgggaggatctccccatgcccatcctgccatcctgcccccccaacagccaggcctctgtgcccagacctgtctcctgccccacccccaccccatctgcaggagccccgagggtaggcactcaccccactgcaagaagtcggccacgtacttgtcctgggccagttcggaggcgcccagctcctggtggacgcccaggagaaggtcgagcaggggctccagccccaggaagcccgggtccaacaccagctgctggagccgcctcagccgcacctcggctgacatgttggacaggcagcaccatggcccctccccgggccgggggctcggggtcctcctgtcacagggcctggcagcccctgtccaggccctggagccctggctgcatgtctgcctgtccctggctgtcccctgggcctctctggccacttctctctgcggccggccgaggcctcctccccttctccccaccccttggtccagcccccctcccgcctcccagccttaacccctcacaagccagccccccaagctccc

SEQ ID NO: 1560259 - DNA, 4001 bp, Homo sapiens
gggagcgcctaccgggagaggccaggtctccctgcggccgtgctcaccttgtagtggacgatcttgccataggtctccgccgtggaatccgcgtagaagggcgtctgcccatagaacatttcataggcgaatacacccagcgcccaccagtcacactcgggcccgtagctgcctgtcccaggcccaccgcccacagcctgcaggatctcgggggacaggtagtctggggtgcccacagccaccagcgaccgcacctggaccaaaaggagcagagcgaggcttgggcccacccctctgggcccaccagctctgggccctccttccaaccactccccaaatgcttagcccctccctctgcctggtctaatactccgccacacagatgcacacttaagcctgggtcacaccacctcttttcccctccaaatccagtcccgctcccacactctgtgccttccatccctcatcagcagccccagttgctctgtggccagggcactggctcaccgttccatctgcccgcagcttgaggcaagagccgaagtcggccaggcggatgtggccacagcggtccagcaggatgttgtcgggtttgatgtccctgcacggaggaaaagagaagggtgggataaatgaacctcccttctgtggtcccaccaggctccgcccctccgggcagtgccacctgggaccccacttcctcgggttccgcccctgtagggcttctacagttctgacccctactcccaggcaccccccggtgggccccaaccaagaaggtccctctccaggccctggcctctctgggctctgaccttccaagaacccggccagggaacaagcttgctatcccctcggccatgctgcacccacctgtgcacgtagccaagccggtgcaccgagtctatggccatgacaatctccgccaggtagaagcgcgccatctcggccggaatccgctccccaaacttgctcagcagtgtcagcaggtccccgcccacgtaatactccatgaccaggtactgagaaggggttcgtcatgggtggttggtagtcccctgaggccctgatccatcacggatggctgggacaacccctcccagagacaccccatccttgggcagagacctgcagccccagcccagagataaccatagagatctgccgggccaaatcagagaccacctgcggcccccgcccccgcccctcaaaaaaaaacacaaacaaaaaaactttcctgggatgtcactgggcagattcactccccctgagatgttctgggaaagagaacccagaggccacccaacacccagagaataggtcccagacactccttccctaggcagtggccccgttagaattcctgaagacctatcccattccaggtaagagaccccccgcaacagagacatctttataagagtcccccagatcaccccagaaacgggcagtgaaggacaccatccccgtctcagatagggaaggcccctcatccacctgacacaccctcttaccgcacacagactttcccacagacgtttccgggcagcacccccaatcctagagcttcctctccccacctcctcgtccagtgacagcacgggctcttgtccctcttcctagtcaccccggcccggagctcaccaggtagttctcatcctggaaggcgaagtgcagctgcgtgatccaccgccggtccccattcaccaacacgtccctctcctcacggaagcacgacacctgcagggcacccggaggagctgcagccggagacggggcgcggatcctcaaagccccccacgtccgcccagcccctcacctcgcccctcttcagcatgtcccacttgttcatgatcttcatggcatacacctggcccgtctgcttcatcttcactaccgctacctgaggtcgagatagtgagacagagtggagacggcgggaaaacaaaagggctcgcccagacccaactccacccgcttctgcacccagccgtggccccgccccacctgccacaccacgcccattggtcccaagccccgcctccagcccagccctaggttctaaggctcggtcattcatcaatttctaaggccccgccccaacccctatgccccgcccaccacgagtcaagtcaggctcccgcccggttcggcttacctcgctgaacgccccgcgtccgatcaccttcagaatctcgaagtcgtccctctgcagtcggacctccttaagcctcaccacgatgggctccgctgggggggtggtgggggaaaagaaccgagggtcaccagaaagggcactggagacaagggggaaagccccaccctctgtctgtctccccttctctctgcctctcagcttcaccctaggactgtctgcttcccaggggcttccccacataaacaccgtgtaaggttctgggggccaaaaatgccctcccatagaggtgagatgcctgagaagccctttgcgggacagggcattggcccagagggctccaagggtgtgcaggatggttagggtggggtaacggagtctgcagaaggacagaccctaaagaacaaggggagaaggaaataagacccagttcttccaccttccaccctgactccaggtgacagttcaggtgcagccagggccccacccccacgttctcatgtagaatgtcctgggtaacggcccagacgtggggttgtatccagtacctctagattcagatgcaggtggttcttgaaccacactttggaaaaccctggatttggggctgggggaaggaacaggacagggagacaaaggtagcatggtcacatatcccagactcaagtgctccggtccagcccatctctcagtcctccaggaggagtgctttagtcctaccccttatttacagatgacaatcaggcctctcagaagtcaaggtcctatgactaggaatgttaaactgggcagcctgggtgggggaccagctggggtggaggcttgtggctcagggactgtggggacagggaggcctggactcccgggggtggaagaagtggaggcaggatggagagagggatgggtatgggaggggagggaaggagaggagacagtgggttctggaggaaagagaggggttccggggggttccgggagagtgggccagcagggacgaaccagccagggctgaggacgggggagggaggagagagccaagacattgagcccttttaaggcagcaggaaccctggccccctcccccgccccaggcctggcaggggaggggccgcgagatgcagctcgggccacaaaaggagtgctcctcccgggagcgccagacccctaccccacccggtctcagtttaccctgccaacccaacttcatcctctactaaagggaggccaggagagtcattaggggctgtgggaggttgggagaaggtttttccagaggctgaatggcctggcccttcttggcctccaccttcccatctgtgaaatgggaggaggagggaaaggaaccaggcctgggtcagaaagagatggacacaagaggaagcaggggaaggcggagaaacaggaaacaagtgtcacacacagtttgttacacacaggccaaaaaccaaacaccagtcactgagggccagacatatgagggccagaggggcagggtgctgggaatgaaagaaaccagtgaccagtgagcccgagtcctgggcttggggaggaggtgggcagacaaggcagctggcagaagcggaagcatcctccttccagccctggccccaggccctggaaagcccttgcaagaaggggttttgtgggacagctggaaggttggaggccctgggccaggagaactaaaggacgcagggacccggggtggcgggaatggtggctgacccacacggctcataggaaccgagactttggggctgggggtgggggtgggtgcagaacctacaaaagaaggagacacacccagaagaacccaaagttgtccctcctggatcgcagaggaggg

SEQ ID NO: 1560260 - DNA, 4001 bp, Homo sapiens
ttgtatgtttagtagagatggtgtttcaccatgttggccaggctggtctcgaactcctggcctcaagtgatctgcctgtctcggcctcccaaagtgctggaattacagccatgagccactgcacccgtcccccctttttttaatttaaaaatttttaggccgggtgcggtggctcaagcctataatcccagcactttgggaggccaaggcgggtggatcacaaggtcaggagatcgagaccatcctggctaacacagtgaaaccctgtctctactaaaaatacaaaaaattagctgggcgtggtggcgggtgcctgtagtcccagctactccagaggctgaggcaggagaatggcgtgaacccgggaggcagagctggcagtgagccatgatcgcgccactgcactttagcctgggtgacggagcaagactctgtctcaaaaaaaaaatttttttttaattgttttttatttttatagagacaaggtctcattatgtttcccaggctggtctggtctcgaactcctgggctcaagcgatcctcctgccttggcctcccacagtgctaggatcagaggcatgagctgctgcgcccgacattctgtattctttcaattcaaacattcttttctttcaatccaaacactttcccacccacacacacatcctaggttccaacctactcatgtcctcacataccccttcagcgagtcctacatccccttttcacaagcaccctgttccgtcccaacagtgtttcctggcatcctcttcaacaatgctcaccccactctcatgcattcatccaatgcctaccagtagttttatgcccctttcaattcttagttcaatttcaattcttagtctcatctatgccctgcaaagcaactgcctccttgcattcctttagtcttattttgttcttgtacccctttaaatcagaaccctctcttgcacccccaataattaccttattctcatggattccctgctccactttctttttttttttattgacagggtctcgctctgttgcccaggctggagcgcagtggcgtgatcatggctcactgcagcctccacctcctgagctcaagcaatcctcctgccgcagcctccccagtagctgggactacaggctggagccactatgcttggctcccctgtcccactttctttctttctttttttttgttttgagatggagtctcactctgtagcccaggctgtagtgcagtagtgcaatcccggctcactgcaacctccgcctcctgggttcaagcaattctcctgcctcagcctcccgagtacctgggattacaggcctgtgccaccacgcccgtctaatttttgtatttttagtagagatggggtttcaccatgttggccaggctggtcttgaactcctgacctgcctcaagcgacctgcctgcttcggcctcccaaagtgttgggattacaggcatgagccaccgcacccgccacctgccccactttcaagttattttccttcactccttcattcattccacaaatggttactgagcccctgtcatgtgctaggccctgatctgggccaaaaaccttctccttggggcactaatgtctctcttgcgctcacaccttattcaggtttttgtgtaaacatgtgaagtcactgtgtccagcgcttcctgctcctgtggccactaccaacaattaatttcatgcatgtccccctccccccttcccgtgccccagggagcgagtggggaaccgggaacgcgccaaggggcccgcgaggcagggaaggggagagggggcgcgagggcgggaggggcgcgagggggaggagaggggatgcctgggttagggagtccggctaagagggaggaggacggaaaggcaggagggaccgtgttcgtgcagctagttcacggttaccacagcctccaatggagtcagattcagtcaagaagacgcccaaagacactgtgagaaagtggccagaggaaccgccaagctcgcgctgcttttcttaccctgtctcacaaagaccaatgaacttcaagcatcgcctctctcagccgaggcagacgaccaatgcggtttgagatcctgaactgatgtcccgccccttcccttctgccagcttcttggcgcacaagactatcagtcccaccaatagcgcttcgagttgagcctcgcgccaccgctgcctctccctccgcacgtcctgcccgcccagactgtcttccccctttcgaggcaggtggccaatggggcgtcgagtaccccttattggaccgaggctggccccgccccccaggaacggcccgcctggccccgcccctggggcgttgaccaagcccggtctgtgcacgggttgcctcgtttctggccttcccttgccttgtacctcgacttcgcgcgtggcttgtttttgctgagtggaggcctgcgttttctgttatgtctcttccggtgccccacaactcctgagctacccttcttttatgcgttctctcccagcgctgtgattaccgggttgcttaccgggccctccttcctcagattgcacccctttccttgtgtctcttcttgtctttgtgtcggttgtgattttcctaatctctgattttccttttctctcggacgctctccctcttcggacccattttctcccgtgcttcatgccctgatagcctggccccttcccggcttccttcgctaccggggacgcctctagtttttctgaatttctggctggctccaccctccgcgttcatcttcctcaagagttcgcccctctgggggctcctctgtgtaatcgtcgccttctctgggtatttctgtgaactccgtctcacaccatcccgccatcttctctgccttggccccttttctctgtacagccagctctgtgtccttttcttctccccctctaaaatcgactcctcttctccctgagagccccacctttgtgccccactcctcattttcctacgcctccctctctctgctggtcctctctctccctgcaaggttccattccatcaatttgtttgtcttttgtaggggtggcatcccctctgactactgctccatcctttttttttttttttttttttttttttttgcttgaggatttcacttcaatcttttctggttgcgtctccacttgtactcagcttgttaggtccaggtccagttgttctgcatctgaggctggcgtgtgctgtcttctctgattggcctaatctccctcacccccgtgagatctgttgtcagccttcgtttctctttcctgtgtcccagcttttctgcgggtcttggcacctttcttggccacagatttctgggttacagagcatgtgtgtctgaggcattgcaggcagaaaagggtggccgacgtgacctctagctggactgctgggcaggggagctgtcctagataaaattggaaaggttgggtggcgcttatctggggtggggtggggtgtggtcgggggaggcttaaaggccagctaaagaggttgaacttgatcctttaggtagtggagagagagtgagaggaagtgtgtgtgggagggagggatagtggtagaggaacagggtaaccaacgattataaagagcttagcatttgcctaatacttatggtaataattttattgatcttcacaatgaccctatgagatgtattatacttcattttataaagaaggtagtaggctctgagttcaacaaattggacagctagtaaatgaaggggtaaagattccaacctgggtctctgaggccaaggtcagtgatctttgtaccccctcctacactgttattttccaccaattccccactttcattccctaaccttcttataggcaattctcattctaaggtggttaatatgtatcttttggtttgtgtgtgtgttctcccaggatgtgtgtagtgttgttgttggggtttttttttttttttttttttttttttttttttttttttttttttagcgatgggg

SEQ ID NO: 1560261 - DNA, 4001 bp, Homo sapiens
ccctctcaggcctacactgttccgcaggcagctgcatcctaatggcatatagtgggtaggtgagaaggcagagaagttgggggctctgggggctgcaatcacctcctcattgaacagcttgctggtgtcctttttgatgagatccaggtactgcacttgacccgctgagaagcccaccagcagcgagatggtctcggtggcagcagtgaactggttgaaatcgtggcaggtgggctgggtgcccttgtagatccgcttgtcaattggcttgttgaggtcaatggacttgaggggtgggagaaaaggagttaatggtgtatgccactgaggagaaggaagaggatgttgaggttgggggaaaccactaagaggaagcagggttagaacccagagggaagtggggaggtgagtaggtggattgcgaaggacggggcaaccacagacgggaaggggacccaaatcacagacaagagtagcaaaaaagatggtaaggatcccccttgaccacagtgcctccccaaagttgggtcacctctaattcagagacacccttgtccacataatcagggttctgggtccacacagttcctaagctccgattccttttagcctcaccactccatcctataacctcagcaactcccttgggacctagtaccacactattccaagacccccaaaccttgaggtcacccaaatttccaggactctaaagcctaacatcctagcattctcttcactttgtagtccctaaaccgccacagttctgggacccgtcaaacctcacggtctcccacattttaggcccatttattacctaggggctccgaaggatccccatcatttctgggatcaccataaacggccagggttctcaccacatcgctttagagatgtcctgaatcacacctgcagattcccctgccagggcctctcattcccttgagagctcccatcagcttccggacgctcatctcctccaggaccctcatgacttccagaccccaattttctctagaatcccattcagcttctggatcccctatcaccttcaaggcccccatcacttctagacttctcctcattcctgggctcaatctcaagacccctctcccacacctccaggctgcaatactgggttctccatcacctctgggcttgcatcacctcatgattccccattacctgcagaatgcctgccaccccagaacccgggggatcccacctcatctcagataccccatcatgtccaatagtcaccatcccagaactcctacgcataacgggggtaaaggggatttcccccatcacctccaagatgcctgcccagcaccccgcgggcctctcatcacatttcagaatcctgtactccctccaatgctgtcgccctacaacgtccatcacatttagaatgcctatctcagggccccatatcaattcggggaccctcctatcagttctctggaacctccatcctttcagcacccagggccccacgatgcaggccgctcacccgttggctcccacgacgacagcagcctgggtagaaatagagctcacggcccaagttgaagcagacgcggtctccccccgagcccagccccgcgggcgtggcgggcggctccccggccccggcgctgtccggctccccgaggcgcacgaggctgaggcgcacggcgggcagggcgggcccgggtccggggcctgcgggcggcggggacgacgcggggcctgcagcgccgggaccggaggcggaggcagggccgggcgggggctgcggtggctgaggcggcaccggagtctgggcggaagccggacccgacctgcgagcggcgccgtcgcccgggagtagcttgtagaaaccctcgcgcgtgcggaattgcgacttaatctccgcgcagtcccccatggcggcgccggggcccgagccgccctccgcgccgcccgccgccatcttgggcgccccccgggccccgccactgccggactgccgcccgcagccgggccccctcccggaagccgctggcccgcgccggaaaaggtggggtcgtcgcccgggcaacgcctcttcgattggcacccagatccggaggcgggacgaatccccgcggtcgctcgggtaacggtgctgggactgtgggcggggcgagaaggtgggcgcggcctttgagcctgtgaccgacttgtggttggctgcgggggcggagcccgcaatggaaagaggcgtggccagttagaaagctcaagtccttagcaaccgcgccctgggaacgtttgcctagcaacggagggatttttttttttttttcccccacgacaaagaagccctcatccatagtccagccttcccatgaagtcacagccaaccccaagtgaccctggtctctccttagacgcccaatatacactcccctgacctccagtgtttcccactgacatattcaaatccctgaatgaccacagcatctgctaccattcttccccacccttggtgacccaccaaatccctgtgtccccacacaactcagaggacttcctctgacccactattgattaatgctaactccaaacatccttcatattttccaccaacctccaatgtatatttccatgattttcttattttcaacaacctcacttgtcctccaaaacctacctctgattcccaaattgtattgatccccacggtgccccagtgtcccagtgatccactcgtaacccaaagtctccccctgatcccaacagctcctactcatagccagtgctccccatgtctgctgaagccacccagccccatcatagatctttctagtctcatgtagtcaatggcctctacgatttctccctagagtgtcccaagggcatctcacacttaaaaaaaaaaatcctacaatggttcgggcatggtggctcatgcctggaatccgagaatcccagcactttgggaggctgaggtgggaggatcgtttgagcccaggagatcaagactgctatgaattcacatcactgcactaaagcctgggggacagagtcagactcagtctctctaaaaaaaaaaaaaaaagaaagaaaaaagaatcctacaatgaaattgacgtcttacaccaaatcctccacctctcttgcatccccaccttagggctagctctgccgtccactcagtcaaccaggccacagacctgggtgtcttcctagatgtgtaccatttatcttcactctgcccccgcttacagcctccaagtcttttgcattcgaccacgtggaattcctctttctcagttccttgttctccctgatccaagcttctcctctacccaagcccttcccccacccccacatcaaccgtgtctcttggtctcccagatttctgtctcacccccacttccacctttcacttggcatgtagagaggttttattttgtttttgtttttgttttttttgagacagtctcaccctgtcacccaggctggagtgcaatggctccatctcggctcagagacggggtttcaccatgttggccagtctggtctcgaactcctgacctcaggtgatccacccacctcggcctcccaaagtgctgggagtacaggcatgagccactgcacccggctttttttttttttttttttttttttgagacagagtctcgctcttgtcacgtgggctggagtgcaatgggacgattttggctcactgcaacctctgcctcctgggttcaagtgattctcctgccttagcctcctgagtggctgggattacaggcacctgccaccacacccagctacttttttgtagttttagtagagacggggtttcaccatgttgggcatgctggtctcaaactcctgacctcaggtgatccgccaaccttggcctccctaagtgctgggattacatgtgtgacccactgcactaggcctagagaggtctttctaaagcatgaatatgatcagggccctcccctgctcaaaacccatctgtagctccctagtgctctcag

SEQ ID NO: 1560262 - DNA, 4001 bp, Homo sapiens
ccatgttgagcaggatggtctcgatctcctgacctcgtgatctgcccacctcagcctcccaaagtgctgggattacaggtgtgaaccactgcacccagcctctcctggaattttctaagtggctctaagatgtattatatttagccccattttacaggtaggaggagctgaggctctaagatggcaaattacatcagaggggaccatcatcaataaatatattggattttttttttcatcagaggtaccacactggaaaataccaaacatttttggtttttagatggagtttcgctctcttttttttttttttttttttttttttgagacggagtctcgctctgtcaccctggctggagtgcagtggcgcgatctcagctcactgcaagctccgcctgccgggttcacgccattctcctgcctcggcctcccaaagtgctgggattaacaggcgtgagccaccgcgcccggccggagtttcgctcttgttgcctaggctggagtgcaatggcgcgatctcggctcactgtaacctccgcctcccaggaaaataaccaaactttttaattgtaccattgaaatgccagaatccctctagggagggggaggagaccagcggtcagaatgcctgggtcctagcaacagaccttgcagccccatcttctccggttcctccagggctaggctgaagatcagcatgtgtcgggccacagcttccagattattctccagcacaaagaactagaaggatggacagggcagaataattctgagacctgtttgcctgggtcctaggagacccaggagagcaggccctcagctctctccttccacacacccgagttctgtacaccagcctcttccttcaaacacagaagtctgtgtccccagagctctcttcccttccattactcagaagacctcatcctcgagctcttccccactatagaacccaggagttccaaaccccagccccttccttcccccaagacgcatcggttcgctcccagcttctgcctccctcagatctaggagtctccagccccttcattcctggacctgaggttttagaatttcaatcccttcctccctcaaggactcgggaatctgggctctcatcttcatcccagctcacgttgaacctcctgcgaggccagaacttcgctcgggacagggtccgcagcaggtgccgtccatccacagagcccagaagcagcacatctagctcggggttgctgtgcactgtatcggcctgggagtctgggtccacaggaggacctggcaagatgacagctggctggggcaccatggtggttggcagagcgtccaccgtagcatcccctataaaaaatggactacaaatcccagtaggcgttccgcccgtggcctaggttctaaggggaggtgtttcctctgagtattctgggattcgcagtccgcagacaggacctcggggctgcccctgggagcgcgccctctgccgctggagcgttggagaacgttagcgccccccttgccaccgacgctgggactacgagctctaaaaggccgtctgctcaggctgggaaggcagacggtgtatcagaccttgcgtgctgggactcactttcagcctgcaggtccagcgccggggacaggccccaccaggacacggagccgaagccgctgccggagccggcaggtgtggtcatcaccctgcggaaaagacattctgggaatcgcacacattgcccgccccgctcccctctcaccgcccctcacttctcgcccctttgcctccacatgataccttgcccacacctttatcctccaaatatcccgggacgccccttcctctctgctcagtgcagcactgtggacccgcggcactccacaaccgctgcccagagtccccgcccttttcgaggaatcaagcaatggaagcatgtgggatgggaccacagcgagcaactgaccaatgagagtgagcgaggcccgccctctacaaacttttggccaatgggagcactgagggccagccttcccccacacctaggagaagagggcgtgtggacgcggttgtcatgacgacggcgccggcgggggaaggggcggtgctagaacaggttggggcggagtcagggtcggtccaaatttctggaatgggggaggcctgggctgattaaaattgagagtgaagggagcttaatcttatttcttgttttttgtttttttgttttcttcatatgcctttgctcatacgtaacggaattttcatcaattcaaataaagtgaagtgtctagactttagatggcaggcttctgagcccgctccccgccccagcacaacgtgggctctaccacacagaacagcccacaggtgggacactgatgtgcaggtcattaaaaattcagggatttgtgagctggttattgttacacgaagccataatttaaacttacagctagatccttttgtagtttctaagcgggatgattgggtgttcacgcgcatgcgtgagatgtgcctccctcaaaccttgttacgacatcggcacattactcttctgacatgaacaaaaaaattacaggtaaattctgtaatcgtacagttaaatcaactgcattaaaataagggtaagtcggccgggcgctgtggccacgcctgtgatcccaacactttgggaggtcaaggtgggcagataacttgaggtcagaagttggagaccagtctggccaacatggtgaaaccgcgcctcgaccttaaaaaatacaaaaattaaccgggcgtggtggcacgcacctgtaatcccagctactccggaggctgaggcaggagagtctgttgaacctgggaggcagaggttgcagtgaactgagatcgcgcctctgaactccagcctgggcgacagagcaagactctgtctcaaaaaaaaaaaaaagaaaaaccaaagtctgaatgaggcacatctctagatcaccccagcacccagcactgggctcagcgcccaaggggacttggctctctgcctcctctccttgcccagacacatgagcttagaccagtcaccctttctgagcctcagtctgctgctctgtgaaatgggaatgtagcgtgcagcgggcagaggtgcagcggatctgcctcctgagggcagatctgggcactgggaagacaatacctactggggaaacgaaggttgagacctcagacattcctgcagaatcaggctggctaaccagccccttccaggccagctctaagcctgcaagagccccagatcctgggtttctctctggagaattaatgcctttcctccctatttctcccactctcccaacaaattctcagcaaaggaaccagagtgacattttttttttttgagatggagtcttgctgtgacacccaggctggagtgcagtggcgcgatctcggctcactgaaacctccgcctcccgggttcaagcgattctcctgtcccagcctcccaggtagctgggactacaggcatttgccaccacaccagctaatttttgtatttgtattttattttgtgtatatatatatatatacacacacaaaataaaatacaaatatatgtatatatatttatatatacacaaaataaaatacaaatattttgtatatatatacaaaataaaatacaaatatacatatatatacatatatatatatatatatatagagagagagagagagagagagagagagagagagtttcactcttgttgcccaggctggagtgcaatggcgcgatctcggctcaccgcaacctccgcctcccgggttcaagccattcttctgcctcagcctcccgagtagctgggattacaggcaggcgccaggacgcccggctaattttgtattttttgtagagacagggtttctccgtgttggtcaggctggtctccaactcacgacctcaggtgatctgcccgccttggtctctcaaagtgttgggattacaggtgtgaaccaccgagccaggcgatttatttat

SEQ ID NO: 1560263 - DNA, 4001 bp, Homo sapiens
tccacaactggtagaaaggtccagaaatccttgagctctggaaaggtccctggtcagtccttggggagctcagatagctatattggaagaacctgctcaagtacggttcttgatgtctggggaatcctttcggggaagatcacttcaaactcaataatgaggtccccacgtttctcgggtgttttggggagggggaggccttctccaggaacttttcgccgcatgccaggcctgataacatctttgaatacgacgggtatcgtcctgccgtccagagtggggacgttcactgtgcagccacacagagccttgaaaagcaaaaggacagcattagatggaagctggctcaagaggctcagctcttgcccagaggccgtctgccatagataagacccatcaggcctctgcagctaagacctggcccccaaatctacacgtccccaccacgaaagctccacaacagcgccctggtcagtcctgttcactgttgtgccccaagcctggcacgcaccacacaccccaacacattggttcagcaaatactaaactgcttcaaaaagcagccatcgccctctacagacaccgccccacctggcaccttacctcccggaggctgatcctggcaggataaatgacatcagagccatctctcttaaagatattgtggggcttgtcctttaaaacaaagacgatatcagctggaatgttgttggaggtctggtctccttccttggggaaagtgattttggttccttctttccaccccttcttcacttcgatggtcaatattttgtcttcgtttcgaatgctctttccgtcggggtttagccgcttgtgggagattttcatcttcttggtacagccgctgtagatctcttcaagggagactcgaaggtcgtgggtgactgggggatcttgcttctttcgggcgggctcttgggcagagcgggagcggccaaagttcacgttggtgaagccacccatgcccatagggaagccagagaatgggtcatcaatgtccatgccttcctccccgttccgctgcccaaaaaaggtgtcaaagggatttctgccaccgaagaactcagcaaacatggcatgagggtctccatggaatgtgtagctgaaagaggtaccattggcaccaccgccgctaccgccactggggccactcccctttaggcctgaaaagcagatttagaagcagtcagatggctgaacagcagactctctctcgagcttcccttacagggggaaacagcttggaagccatgggggaggaacttttttgtctgtcaggggagagcaaggaagaaccccaagtttctacctctcactgccaacagcagagacgcccccctaccaacagtatttccgcgtagcctgacagtggaaaaggactcatgcggttaggtgttcacctccaggtgccacctaggccctgccactcctggactgacccatcctcctggcaacatcaccaagagatggctaaagacacatggtccagggtcggctttcggtaagtgtttactctcaacgttttagggctaatggtgcgtaggaagagaagaaaaaaaaaaacaaaaataaatagggagtttttaaatcctcacacattagcattcactgccaccatccttgcacaaaaagtcagctccagatcaagcccagaagccagcctgaatcatcaacgggcacaggaacaaaaagccctgctctccttaccctccgaggcggccccgctctccggacctgggcggccgctgcctcctgcgtgccctgccggggccaggtcatcacttcccgggaattatcccaacccagcccccaagcccacgaacggggtcggctcctgcattcacaacccctcgccccgcagctgagccggaggcgccgccccgcggaccccggcggccgagcccaggtgagcccgggtccgcagcgggctccgccgcgccgtccccgtcgtcacccccggctcccccacccccatgcaccgcaccccggggctgctcggggccgcgggaggaggcgcccggggaggggcagccccagacatgctagaagcttctggccgagcggctgggccaaggctcctcctcccaccgcgcggccgccaatccgagggcggaggcccgcgaggccggagggcggggcagctcggccccacggcccggggcgtccttcccggggggccgccgagaggggccagcgtgcctcagtttccctgtctgtcaaaaggcggggccgcgcccctggccgcgagcacacaccttcctccccgtagcggtcgaagatctcgcgcttgcgcgggtcgctgagcacgtcgtaggcctcagcgatctccttgaacttctcctcggcgccgggctccttgttcttgtccgggtggtagcgcagcgcctggcggcggtaggcccgcttgatctcctcgtccgacgcgccgcgggccaggcccaacgtctggtagtagtctttacccatgaccccctcctgcggcccgccgacccgctgtcgccgtcccccggctccgccgccgaccagtcccggactctatatacccgtccggcggaagcttccagagcccgccagccccctccagaaccttccgccccgcccgcccccgcggcgccggccaatcgccgccgccctttcagcgacacgcgacatccggggcggggcctcgccgtcaacggccgcccgcgcggggccacgccccctcccgctccgccctcggcaacacctccccgcggcgcgcgcgcacaggtcggaggaggccccgcccacctttcgggacgagccaatcgcgaccttctttccctctctacgcggccccagctaccctgcgtcccgccctccgcctgggtcagtaggtcgggacccacagcgaacttgctgttccaggaaggggtggggcctgggactacccagtcctttccccgggaggcgatgaacctgctcgcccttgtctcgtggggcctgcggtgggctcccgcccggtgacgccggacgaactacctaacctgtgtctgcctaacccaggggcccccttctatctacaacatggcaataagagaacctatcaggccgggcgcggagcctcatgcctgtaatcccatcacttcctgaggccaagacaggaggatctcttgagcctaggagttggagaccagcctaggcaacataaggagactccgtttctatttaagattaacaaacaggccgggcgcggtggctcacgcctgtaatcccagcattttgggaggccgaggcgggcggatcacttgaggtcaggagttcgagaccagcctggccaacatggtgaaaccccatctctgctaaaaatataaaaattacccgggcgttggtggcacgaacctgtaatcccagctactcaggagattgaggcctgagaatagcttgaatcggggaggcggaggttgcagtgagccgagatccggccgttgcactccagcctcggcaacagagcgagactccgtctcataaataaataaaataagtaaaataaagtaaaatgaacaaaaaacccaccagcgctattctcccaaccgtggggagaaggattttgggacggaagactgcctctgttctcacctcctaaagcaaggtgaggatctggacggaagcgcatctcccaaggtcctcccagtcccgccttcttccctttactgccctctcaagatcacttgccgctaaatttgaaatttatcttgtctcttggctttcaatgtgtcttccctcccagtctgacatcgccacctgggcaggggccaggtcctgtctgcactgggtccccagtgcctggaacgcagtgagaacctcataaatattccccgttcttacacacgtgcttctttttcttccccaactacctttataatttggggggacataggtgtgtcacacacctttcaaggcctctgtttcctcaattgtaggcaacacgatcgcgtttggctctgaaagtctggggtgcc

SEQ ID NO: 1560264 - DNA, 4001 bp, Homo sapiens
gctggaatgttgttggaggtctggtctccttccttggggaaagtgattttggttccttctttccaccccttcttcacttcgatggtcaatattttgtcttcgtttcgaatgctctttccgtcggggtttagccgcttgtgggagattttcatcttcttggtacagccgctgtagatctcttcaagggagactcgaaggtcgtgggtgactgggggatcttgcttctttcgggcgggctcttgggcagagcgggagcggccaaagttcacgttggtgaagccacccatgcccatagggaagccagagaatgggtcatcaatgtccatgccttcctccccgttccgctgcccaaaaaaggtgtcaaagggatttctgccaccgaagaactcagcaaacatggcatgagggtctccatggaatgtgtagctgaaagaggtaccattggcaccaccgccgctaccgccactggggccactcccctttaggcctgaaaagcagatttagaagcagtcagatggctgaacagcagactctctctcgagcttcccttacagggggaaacagcttggaagccatgggggaggaacttttttgtctgtcaggggagagcaaggaagaaccccaagtttctacctctcactgccaacagcagagacgcccccctaccaacagtatttccgcgtagcctgacagtggaaaaggactcatgcggttaggtgttcacctccaggtgccacctaggccctgccactcctggactgacccatcctcctggcaacatcaccaagagatggctaaagacacatggtccagggtcggctttcggtaagtgtttactctcaacgttttagggctaatggtgcgtaggaagagaagaaaaaaaaaaacaaaaataaatagggagtttttaaatcctcacacattagcattcactgccaccatccttgcacaaaaagtcagctccagatcaagcccagaagccagcctgaatcatcaacgggcacaggaacaaaaagccctgctctccttaccctccgaggcggccccgctctccggacctgggcggccgctgcctcctgcgtgccctgccggggccaggtcatcacttcccgggaattatcccaacccagcccccaagcccacgaacggggtcggctcctgcattcacaacccctcgccccgcagctgagccggaggcgccgccccgcggaccccggcggccgagcccaggtgagcccgggtccgcagcgggctccgccgcgccgtccccgtcgtcacccccggctcccccacccccatgcaccgcaccccggggctgctcggggccgcgggaggaggcgcccggggaggggcagccccagacatgctagaagcttctggccgagcggctgggccaaggctcctcctcccaccgcgcggccgccaatccgagggcggaggcccgcgaggccggagggcggggcagctcggccccacggcccggggcgtccttcccggggggccgccgagaggggccagcgtgcctcagtttccctgtctgtcaaaaggcggggccgcgcccctggccgcgagcacacaccttcctccccgtagcggtcgaagatctcgcgcttgcgcgggtcgctgagcacgtcgtaggcctcagcgatctccttgaacttctcctcggcgccgggctccttgttcttgtccgggtggtagcgcagcgcctggcggcggtaggcccgcttgatctcctcgtccgacgcgccgcgggccaggcccaacgtctggtagtagtctttacccatgaccccctcctgcggcccgccgacccgctgtcgccgtcccccggctccgccgccgaccagtcccggactctatatacccgtccggcggaagcttccagagcccgccagccccctccagaaccttccgccccgcccgcccccgcggcgccggccaatcgccgccgccctttcagcgacacgcgacatccggggcggggcctcgccgtcaacggccgcccgcgcggggccacgccccctcccgctccgccctcggcaacacctccccgcggcgcgcgcgcacaggtcggaggaggccccgcccacctttcgggacgagccaatcgcgaccttctttccctctctacgcggccccagctaccctgcgtcccgccctccgcctgggtcagtaggtcgggacccacagcgaacttgctgttccaggaaggggtggggcctgggactacccagtcctttccccgggaggcgatgaacctgctcgcccttgtctcgtggggcctgcggtgggctcccgcccggtgacgccggacgaactacctaacctgtgtctgcctaacccaggggcccccttctatctacaacatggcaataagagaacctatcaggccgggcgcggagcctcatgcctgtaatcccatcacttcctgaggccaagacaggaggatctcttgagcctaggagttggagaccagcctaggcaacataaggagactccgtttctatttaagattaacaaacaggccgggcgcggtggctcacgcctgtaatcccagcattttgggaggccgaggcgggcggatcacttgaggtcaggagttcgagaccagcctggccaacatggtgaaaccccatctctgctaaaaatataaaaattacccgggcgttggtggcacgaacctgtaatcccagctactcaggagattgaggcctgagaatagcttgaatcggggaggcggaggttgcagtgagccgagatccggccgttgcactccagcctcggcaacagagcgagactccgtctcataaataaataaaataagtaaaataaagtaaaatgaacaaaaaacccaccagcgctattctcccaaccgtggggagaaggattttgggacggaagactgcctctgttctcacctcctaaagcaaggtgaggatctggacggaagcgcatctcccaaggtcctcccagtcccgccttcttccctttactgccctctcaagatcacttgccgctaaatttgaaatttatcttgtctcttggctttcaatgtgtcttccctcccagtctgacatcgccacctgggcaggggccaggtcctgtctgcactgggtccccagtgcctggaacgcagtgagaacctcataaatattccccgttcttacacacgtgcttctttttcttccccaactacctttataatttggggggacataggtgtgtcacacacctttcaaggcctctgtttcctcaattgtaggcaacacgatcgcgtttggctctgaaagtctggggtgcctctgtcaaggacagagctgatgggaaaaggaggctcagaaaggggttccacctgggaagggcccagggaagtgggggaggttcctggaagaactgcctgggaggtcagagccatgtaacactggctctggaaccagacagctgggcttcattcccagctccagcatttcccggctgggtaaccttgggttagttactaggcctttgctggccttagcttcctcatctgcacaatgaggaatgaggatagcagttgtgcccacatcatgagggctttgaagtttatatgagtcaacatttgcaaagtgctcagagcaggcatggcacaaaggaagcattgtcaaaggggtgactaaccattttcttagtggtgggctcttcagccatcacctcattcctggcagctaaaagattccagtgacagctgcccctgggcagacagggactcctgaagaagaagaccatcctcctgcctcctgaggcgggaggatctcttgagcccaggaatttgaggctgcaggcagctatgattgtgccactgcactccagcctgggtgacagtgagaccctcagcctccccataaaaaagttacataaataactatcaggagcatcatggcggatagttacataaataactatcaggagcatccagcaggcagatctggttctcttggcccactcaatgatctctgagg

SEQ ID NO: 1560265 - DNA, 4001 bp, Homo sapiens
gctccaggcctcccagcaagctcatctgcaatcaggaacaccctcagtttgcagcggggcttagagagggtgccagcagtgttagaaccacagctgagctcagtttttgcaggcataaattcttatagtccagaataacgccaagagtaatgtaaggtagggaaacaggccaggtgtggcggctcatgccggtaatcgcagcacattaagaggccaaggtgggtggattgcttgaaccaggacttagagaccagcctaggcaacatggcaaaagcccactctacaaaaatacaaaaagtaggccaggtgtggtggctcacgcctgtaatcccagcactttgggaggccaaggcaggtggatcacctgaggtcaggagttcaatatcagcctgtccaacctggtaaaaccccatctctactaaaacatacaacatttagctgggcatggtggcgcacacctgtaatcccagctactccagaggctgaggcagaagaatcgcttgaactggggagatggagattgcagtgagctgagattgcaccaccgaactccagcctgggtgatggagagagagtgccgcaaaaaaaaaaaaaaaaaaaaaaagccaggcgtggtggggggtaccggcaggcccagtacttgggaggctgaggtaggaggatcacctgagccctgggaggtcaaggctgcagtgagctgtgatactgcactccagcctaggtgactgggtgagaccttgtctaaaagaaaataaaataggggaaatagatgcccaaggtctgacaggggagatctcccaccccactatggaggtcaggggttagcttggaaaaatgcataggaactcggctgggcagggtggctcattcctgtaatcccagcactttgggaggccaaggcgggtagatcacttgaggtagaaaccaggagttcgagaccagcctggccaacatggtgaaacctcgtctgtactaaaaatatgaaaattagcctggtgtgatggtgcgcctttaataccagctacttgggaggctgagacaggagaattgcttcaaccccagaggcagagattgcagtgagccaagattgtgccactgcactccagcttgggtgacagagcgaactcccaccgtctcaaaaacaaagaaaaaaaaaagttggggggaatagatgcccagggtctgacagtgcagatctccccgaccaccccatgcacgtcaggggttaccttggaaaaatgggacccgagtctctccccagcccccaatccaggcctcacccttcgtgtgcccacgcatggaagagtcctgagccttgctgggttgaggcggttggtcattgtagagcaggaaggcgagctgcgggcggataaacggaggcaacgtgaaattcctcccaggcagggcagccctagagtttcgcccctagttggcccggggcccccttcacctggctggtgttgctccggtacagcggctgcaggcttcggcccacggccccctccgggctgttgatgagtgccctgccgtcccgccagcctccggagctctcgtccagatacttgtactgcagccctctctgcgccgcctccccggaccctctaagagctggcagcttgtagaccacgaacctggaggtcggagaatgcacagaaataggagagagggaagagaaggcaccccagggttccccgaggaggtagccatcccggttgagtgaccgcagccggaccccggggcgatggtaggccccccgctgcgcactcaccagtctacaggctgcccggagtccccgtagcaggtcagggccccggcggggacgcacagcagcgctgccagcagcagcgggatcatagctgctatggggctgagatccaggaatctgtgtcgggactgcggggcgctgggttacatcagaggccaggactggcacctggcgcctttcacttccctaaacttgcctgggaaccggggcggggacatcacgagggtacagactcctcccccgagacgcgatgctgcgttttggagaggcaaaaggcaacgctgagtctgcccagaccacgcccacgacgggcccggcgctccagcgtctcctggagcctggccaccgttccttttcgtggtagctaatcccagcccacgctcttctgtctgacccaactcccgcccgggtttctggatcaggcacaagtttgtattttattttttattccagccctacaacctgggtccaactcttgggacctttgttcttcctctttttttttttttttttttttttttttttttgagacggagtttcactcttgtcgcccaggctggagtgcaatggcacgatctcggttcactgcaacctccgccttcctgattaaagcgattatcctgcctcagcctcccgagtagctgggattacaggcgcccgacaccacgcccggctaatttttgtagttttagtagagacggggtttttccatgttgactaggctggtctcgaactcctgacctcgtgatccaccagcctcggcccccgaaagtgccaagattgcagaagtgagccactgcgccccttaagaagcatttgtgttccagtgtatcttcccctttttctttctttttttttttccttccttttttttttttttttttcccggacaatatctcgctctgttgcccaggccggagtgcagtggcgcaatcttggctcactgcaacctctgcctccccagctcaagtgatcctctcacctcagcctcccgagtagctgggatcacgggcacatgccactatgcccagctaatttttgtagttttttttttgaaacacggtttcaccatgtggctcaggctgaactcctgagctcaagggatccacctgtcttgcctcccaaagtgctgggattacaggcatgtaatccacgccacccagactctcctttttcattctgcacgttttctccaggatcccctgagctagcaaagaggtgactgtatgtttgttttttgtcgttttgagacaggataatggtttctcacccaggctagaatgcagtgactccatcacagttcactgcagcctcaacctactgggctcaagagatcttcccaggtagctggtactacaggcctgtgccaccacacccagataattgttcattgcagagatgagggtctcactatgttgcccaggctgctctggaactccggggttcaagtgattctcccacctcagcctcaaaggatcatggcagggcaaagggctatgggaatctgagtactggcttgaaactgcctttgcaaaaattatgacagaaaattatgtcagtgaaagagctctgacctaaccaactccatcttgcctttaatctccaaactgcccttgcttggtcattcctggagtggggtcaagctaactttttttttttttttgacacgttgtctcactctgtcgcccaggctggagtccagtggtgtgatctcagctcactgcaacatccgcctcctaggttcaagcaatcctcctgcctcagcttcctgagtagctgggattacaggcatgcgccacatgcccagctaatttttgtatttttggtagagactgggtttcaccatttttggtagagatggggtttcaccttggggctcaggctggtgtcgaactcctgggctcaagtgatctgcccgcctcagcctgccaaattgctgggattaaagagggagccaccatgcctggccccaagctaattttgggaggaatttagtttatagcttaaatgataatagcccttccccaaactaaactgcctttgtagaaataatgaaagggcactaggttaggaggatgagaggagcctgaattctgctaaactgtaggtgtagtagttaaattatgaccagccatttttccggccgggtgcggtgcctcacgcctgtaatcccagcactttgagaggccgaggctggcagattacctgaggtcaggatttcgaaaccagcctggcc

SEQ ID NO: 1560266 - DNA, 4001 bp, Homo sapiens
ctcaaaggggcccacaccacagtccagcctgagatcaggccaggcccagctggctgcaagtccacacctttccaccacggtagacagaaggcaatgagctagagacaaggtagcaaaagaggagatttgtgctgcttggagcaaagccccaaggctctgggatggcagacacaaggccttacgccagcctagtggccttgggtgatcacagtcccttctgagcctcccagctcagctaaggtggggatgataacacagcctccaccccactccttacttgggattcaagatgttgaatcaagaagggacattatcccttgacaatgataacaacaataacaatgacaataatgacaggaggaggatgttatcatttggcagccacaccaccacaaatgagtagttcctggaatggagaagtggccgcccatctgggagacaagaaaggcaagaggggttggtgggagggagaggtggctgcacgggctgttctcattcatttgcttcctgaatcctggaaacagccccagagagtggagtttgcccactggacagatgggcacaccgcggcttctcaaggctgtccagagaaggctacatcccagcgctagccactgaggcctgatcacgcaagaagccccttcccaggctccaaaggagggcccccaatttgtaggctgtagctgggaggcgggcccctgtgttctagcactcggaaaggaatcctgaagtaaggtacccccagagtcctccttccagctgagaggggaagtagggtccaaacctcctccttcagctctgttctcccctctaccctcctaccacccctttccagagccgttgtgccagacactcaggggtagtcatgggcagactaggagatggccagacagacagaagaattcacacggaagagaggagccagcgctagccaggaatcaagctgtaagagtcagccagagagaatcaaacagggtcccctaggagtcagctagccagtcagacagtagaggccagctggtgtcacccaacagagggactgctcagtgttaaagtctgtgaggggcacggatgggcggccagacagcagaggtcaccctggacagctagccagacagcagggggctgccaggtgggactggacagatggacaaccaaatggtggtggcagggaggcttgcccaggacagagagacagccaaccagacggcgggggcagctccagatacaagaacaagccagccagaccgcagcggtcgccccaatagatatctagatggccggtttcacctctgatggacagcccgaaagagcagaagagggatctaccccagacccacggccaaccagatggcagacttcacccacgaaagctgggaccagatggaccgcagggttccagcgcacctcctgtcctacggcgccctggcccgtgacaccgcccctggggcccgggcctgctccggagcccctgcagggagtcctctgcccagggcgtcccacagggcccgcctccccgaccccgtccggttccccgccgcgggcacgcaagcgccgcagttacgccggcggcgcacggcgcgccattcccggtccgccctccgcgccctaggccgccacccgcccgcgatccctgccgcgcccgctcaccggcccacgaagttctccagcaccgagctcttgccggcgctctggccgcccactacagcgatctgcggcaggtccaggtggcagctctggccgatggagctgaaggcgtcctgcagtttgttgaccagcgggatcagctcttccatcccgcggttgcccatggcgccggcggcccccggcccgagcgccctgcgctcctcgcccgccgccgaccctcaacgacctggccccgcggcgtctgtagccgttgctccccgcccgcccgggcctcggcaagacgcccgctcccggctcggcctcacggtcgccgcctcatccggttctcaggcgacacccgacccgagcgacctcccgccccggccccgggggctgcgcccaaagcactcgcgccgcacgcgactggcctgctgcaccgccactcggatacactagccaataaaaactaggcacgggcctatggttgagtaaaccttccccctggggaccgtcttgctgacttattggacaaaagaaccgtcactgttgtgcaacagccaatagcggcagaaagcaagttgtcaagagaggaagggggtgtttccgaaaaaggcacgttggctctgcccattggcgaagttccaccatcttattggcaggcagacgtgccagtagacaatgtggaccaatggtgttggggattgagctactacctcgttccctaagaatttcccattggttcatataaatatcacttcgttgctccagccaaccaggcaaaagagggcgggctttaacatccgaatcttgactatcattgagaaccatatctgtcaatcagaaaaactcccgttcttccttgtgattgttggatgtctgcaacagccttctgaagtataggatagatcccaccgtactcgctcaagggcgacacctcgtggtgggatccgatgtctcgatttttgagtttcctggcactggggaaaactacaagtcccagagcgcatctcagttcccagactgcaaaccagctctgggagcagggtcccaatgcgctctgcaaatggtagaggccaagtcattgcttcctagggatagaacgcaataaaatcactcctccacgcctttgcaaatgctgtgccctttctgctcacgcccgatcttgacgccgctaacactccaatgttttcccccacttcttcaactttagcagatcatgaatcttttttcttttcttttttttgaggcggggtactcactctgtcacccaggctggagtgcagtagcgcgatcttggctcactgcaacctccgcctccccggttcaaccaattctcctgcctcagcctcccgaatagctgggattacaagtgtgagccaccacgcccagctaattttgtatttttagtagacggggtttcaccatattggccaggctggtctcgaacgcctggcctcaagtgatccgcccgtcttggcctcccaaagtgttggaattacaggtgtgagccaccgcgtctagctaatgaatcttcttttcttagaaactgggtccttactctgttgcccaggctggggtgcagtagtgcactcatagctcaattcaacaagcacctgggctcaaacgatcctcccgcctcagcgtcccgagtagctggaaccacagacgtgcgcaactatgcccagctaattatttttattttattttttatagagacagggtcttgctgtgttgtccaggctggtctcaaactcctgcgcccaaacgaccctcacaggccggcctcccaaaagtgctgggattacatgtgtgaacccccccaactggctttagatctttttgagtacccactaaaactcaacaaatcctctccccgtgaaaagacacgctattttgtaggcaaaattggggttctgggaactggaactcctgacagtggacagagacaaataggaggatttgaagtgttttgacccctctggagacaaataggccagagacaaggaaacccagtgagaaggcaggagcaggtaagtgctctgacctgaggcagcacaagaagatggagaaagaggaggagggtggctcatggcatttgcctgttttgtgacccaaaaccccaggtctcaaagaaataggcaaaaagcgccaggtgcggtggctcatgcctgtaatcccagcactttgggaggccaaggagggcagatcacctgaggttagaggttcgaaaccagcttggctaacatagtgaaaccacgtttctactaaaaatacaaaaaattagccaggcgtggtggtgcgtgcctgtaatcccagctactcgagaggctgaggcaggagaatcgcttgaacacgggacgcagaagttgcggtga

SEQ ID NO: 1560267 - DNA, 4001 bp, Homo sapiens
catgatggctcatacttgtaatcctaacctttgggacacaaaggcaggaggactgcttgagggcaggggtttaagaccagcctgggcaatatggtgaaacctcacgtatacagaaacaaaaactaagaaagtcatctgggcatggtggtgggcgcctgtggtcccagctactcaggaggctgaggatcccttaagcccaggagttcaaggctacagtgagttataattgtgccagggcactccagcctggacaacagagtgagacccatctctaaaaataaaaagtgtttctttttttgagacagggtctcactctgtcacccaggctggagtgcaatagcgcgatctcagctcgctacacacagcctcaacctctggggctcaagtgatactcccaccttagtctgttgagtagttgggaccacaggcgcacggcactactccaggctaatttttgtatttttagtagacatggggttttgccttgttgcccaggctggtctcaaactcctggctcaagagattcgtccgccactgcctcccaaattgctgggattacaggcataagccacagcacccagccttcaaaaaaaaaaaaaaaaagaaaagaaaaaaagcgggggttgaaccaaatatccatccctccccaaagacccaaatcagaaccggactggcccaaccaggtcagttaacaagcctaaggaaatagaaaaatggcaaagagtgctttcacaaatccagctggaagtgtccacgcctggtgagggttcctctgactcacgcacacctcacttgaacaagttttcaggaatgaactgatggcgttcatgaacaaggggctgggaccagtgctcccactgatccttgtgcacggaagttggacagaggcatgaactgctaaagccagggcctccaacattagacacacactaaagaacacacccatgaacacacacaaacacacacgaaagtgtagccagttctcattagcaagacttccctgatgcccacggctcacaggcacagatttacaggaaaagaccaaccatgcagccttcacgcttcccgggccctgcgctgcaatgcacggttaaagttcctgccaaaacatggactttcccaaggagcaagaaccacacagtcccaactgacagaatgagtaccccacggaaggctgggctctcgaacatgagccagcccagcccaggccccgacgggtgacatccgtctctggaggccgccatcgagatgcacagctttgggggaaaggcactgagggaccccccaccacagaagcgcccccggggaccgggccggacaccggaagtggaggccgaagtgccggtgcccgaggggtgtccgttggccgcgggctgcccacttcctgtgcgaccaagctggagtcaagagcccggcccaccgctgcttgaagaaggggaccccggaaacgaacccaaagcttgctgtatttggggatcaaaagagaacccccaccccgcctagtttctagccaccagggagctacgggggaatccacggtccattttggcgccaaacagcccgggcacgcgcgaccggaagtgccaccctgcccgcgccaactgccgctgcgcgccgcaccaccccacgcatgcgcgcccgtctgtcagcagcggccaccggccaccccgaggggaagcgaccccccacccagcgccctgcctgtccccctgagtccgtgttcccccccatggtacctaccgcctgcggacatcgtcgggcagcgagatggccgggacggccagtgtgggcacccgggctggggcggtacgcgccggcatctcggaggcttcagcagacgcggcggcggcagcgcaggcgccccggcttttcgcgcggaaaccgatggggaggggcgatgagcggaggcggcgtctaccaccccagtccgggcgtgggggaggaggggatgtaccaaacggagagaggcgataccctgtgcagaaggatggaacggagccggccatgcccagggaacacgcatgcgcaaggcgggcacacaccccccccacgcggagcagtgggctcgtccaagctccacggtttgctgggaggtgggcacggtgcccgaggcattcattcattcattctttcaggtgtgatggggataaagcagcgagaagcccccaagggtttgtgagagcccttgagtaaagtcctcagttccaatccaacctccatctatttgctggctatacgaccttaggtgggtcactacggctcagcctctgtgtcctcatctgtaaaacggggtaattgcacctactctagaaaatcttgagtatacacagaatttgtagctagtaccaagaatctcacagtgtatagaggcccatgccacttctatacccagtgtgtggggggttttttgttgccttttttaagcaccacgtggctcacgcctgtcatcccagcactttgggaggccagggtgggaggatcgcttgagcccaggagttttagaccagcctaggtaacatagagaaactgcatctcaaaaaaaaaaaaaaagaaagaaagaaagaaagaaaaaaagaaaaacaaaaattagctagtcgttgtggcatgtgcccatagtccaaactactccagaggttgaggcaggaagatcacttgaaccggagaggcagaggttgcagtgagccatgattgtaccactacattccagcctgggagacagagcaagaccttgtctcaaaaaaataaaaataaaaagtaagaataaattaagaagcaccatgtcaggcgcagtggctcacgcctgtaatcccagtgctttgagaggcccaggtgggaggatcgcttgaggttaggagttcaagaccagcctgagcaacatagggataccccatctctacaaaaaatacaaagatttgctgggcatggtgacacacacctgtaatcctagctacttgggaggctgaggtgggaggatggcttgaaccctggcagtgtaggctgcaatgagccatgattgggccactggactcctgcctgggcgacagggtaagaccctgcctcactctgtcaccccggctggcgtgcagtggtgagatcttggctcactgcaacctctgcctcccaggttcaagcgattctcatgcctcagcctccctagtaggctgggattacaggcgtactccaccacgcctggctaatttttgtatcttcggtggtagagacagggtttcaccatgttggccaggctagtctgggactcctagcctcaagcagtccacttgcctcagcctcccaaagtgctgggattataggcctaagccaccgtaaccagccagaattttttttttttttaaagcaccagaacatgggggaaagattgtgtctttaacaaatggtgctgagaaaactgtataaccacatacaaaagaatgaagttggacccttaccttacaccatatacaaaaacacaaaacttattaaagattaaacataagacctgaaactatagtgctcctagaagaaaacatggggaaaagcttcatgacaatggatttggcaatgatttcttggatatgacagcaaaacacaggcaacaagacaaaagatagacaaatgggtttgcaacaaacttaaggatagctatacagcaaaagaaatgaccaacagtgaaaaggcaacctacagaatggggaaaaaaaaagtttgcaaactgtattatctggtaaagggttaatatccggaatatatgaaaaattacagccaggcatggtggttcatgcttgtgatccctgcactttgggaggcccgggtaggcagatcacttgagcccggtagttttagaccagcctgagcaacatggcaaaacctcgtctctaccaaaaaaagaagaaaaaaattatataaaaaataaattactacccgtcaggcttggtggctcacgcctgtaatcccagcactttgagaggccaaggcgggtggatcacctgaggtcaagagtttga

SEQ ID NO: 1560268 - DNA, 4001 bp, Homo sapiens
tcacttgagcccgggagattgagactgcagtgagccaaggtatcaccactgcactccagtctgggtgacagagcaagaccctgtctcaaaaaaagaaaaggaaaaaaaaaaaaagcctgggtgcagtggctcacacctgtaatcccagcactttgggaggtgggcggatcacctgaggtcaggagttcgtgaccagcctggtcaacatggtgaaaccccctctctactaaaaatacaaaaattagctgggtgtggtagtgggcgcctgtaaccccagctactcaggaggctgaggcacaagaatcgcttgaacccaggaggcgaaggttgcagtgagccaagattgtgccattgcactccagtttgggtgacagagcgagactctgtctcaaaaaaaaaaaaagaaagaaagaaagaaaagaaaaagaaaaggaaagaaaaagaaacagacagcaataatgtttgcagcctcaaagacgccaaaggtctaagacattttgaaagccaatttacagacaaagataatgatagaacataaaaattgcccagccattacgccccagccaccaagtctcatccctcctctgctgagaactccccatggctcccacctcacctggggtccaaagtcaaagtcccttgcacagcccacacgaccctgtacattctactcttactgtccccctccagctctctgttcctgcctcagggcctttgcacaaacccttcccactctttccccccacaaactggcctcgatcgatccctctctcatctccttgaggtttttgctcaaaggcacctgctcatccaggccttcctgacccacctcccgcatctcaagcagcccccaccctcccatcccccttccctgtcttcttgtccctacagcacttgtcactgacaggtaatctactcgatcaggcttctggtctctctccgccactatatcccaagagggggatcttttgtctccataagaccagggcccaacccacagggcagctctttcacctgggggcagtcaggacaggtcccccggggagaggatacctgagcttctgaacgcacccttgtcgcaaagaccccccgccaactgggggcgaggcttttcagccccagagagtctgatatacccctcccaggctgtgactctcacaatccccagtggccacggaaatggatcccccagcgcctggggcctgtcccctcccccgtctgcccaccagctggttctgtccccagcccccactccctccattcaatcacccatccatccccagcgcggtccagcccgtgacgggagagcctgaagcagaaggtgggggggcgtccacagctgtcccccttccccccccccgacagctgggcactggaccctggagggggaagggcacgggaaactcctcgaggggtttcaaacgccaccaaggagcccatctctgtccccaaatctcagagcctggagcctccctgccccaaaccaggcactgaggaaggaacagaaagtccggcccaccccgatctccgagagcgcggggacagtgaggggccgagaggcggacggggagcgcagggagttcagggggcgcccgtcatccgcatccccacgccacctcctccgggaagccctccggacacacccccgcgcgtcacggaggcagaacggcagccgccatcgcgctcccagccccgacgcgactcccatctgggacccccgccgggacccccgcggccctccccgccttctcccgctcccagccccggccggaggaagctggcgggacccgggccgaggcggaaaggggttgaattgggggcgcccgggcggggagggtcgcaccgccccggggcggagccgggccacgtgggggaggtgggagggggccccgcggccacactacctgttgatcttgtgcgcgaaggcgcggcgctcggaggcagccatggtcctcgcgtcccgccgccgccgccccgggccccggccccgccgccgccgccgcctcccggttctgggcagccggggcggggcggggccggcgcgggggcggggcccttccgggtggcccgggccgctccgtgctgcccctgcaggccggaggggtcgcctggagtcctgggggctggggaaactgaggctggggacggagaggaggccccgggatccaggctgggcgggccccagactcccgggctggggggacgctctttctaccctaggagaagggctggggaaactgaggctgaggagggaagttagggagaggaggcgctgggacccagactgggggtgccccagactcccgagctggcgggggcgctctttccaccctgggagctgggctggagaaactgagcctgaggagggagggagggaagggaggcgctgagacccgggctaggtggaccccaggctcccggggtttagtggggtggtcttaccaccccaggagcagggctggggaaactgaagctcaggagggagggagggaggggaggcgctgggacccaggctgggtaggccccagatttccggggtttggggggcgctctttctgccctctgactcctggctggaaaacaataacgatgttcatgtatctaataatcatacctgtaagtataatcgtggccgtgcatggtggctcatgcctgtaatcccagcactgtggggggccaaggcaggaggattgtttgagcccaggagttggagaccagcctgggcaacataatgagaccccgtgtccacaaaaaatgcaaaaattaaccaggcatggtggtgtgtgcctgtaatctcagctacttgggagtctgagggaggaggatcgcttgagcctgggaggtcaaggctgcagtgagctgtgattgtgccatttcaatccagcctgggtgacagagcgagaccctgtctcaaaaagtctaattgctaagatgtcattgagcctggccctgcaattcacacatgcagaagaaattattgttttcctccttttacagatgagtaaactgaggcacagaggtgttcgggtgcttgctcagtgtgactcacaggggtctccagcgcctgcattgtccgtgctcccagtctacagcatgggagtcagaggagcctggctaggcactggagtgctcggagatgtgccccaggtccaggtggtgggacctgagtgagccagtttgggagtctagactttcggggccgcctctaccaagaggaagaggtggggatgtcttggttaatctatggtctcaaatctctccccactggcctctctcccagcactgctgcagcatttttagagaattctccagccgacactcccctctggaggagctcacccctttctcacctgcatgcctctgcaccggcaggtccttcctcctggacagcccttctttccctggtcagcaaatgccccagggagaatttgaggttgaatcagacaaggccgtggctctgcctcagggcctttgcacgtgctgttctcattcccatctatgggttgctggcattttatcctctattatttatttatttatttatttatttatttatttatttatttatttattttgaggtggcatttcgctcttgttgcccagactggagtgcaatggcacaatctcggctcaccgcaacctctgcctcccaggttcaagcgattctcctgcctcagcctcccgagtagctgggattacaggcacccaccatcacacctggctaattttttgtatttttagtagagacggggtttcaccatgttggccaggctggtctggagctcctgacctcaggtgatccacccgcctcggcctcccaaagtgccgggattacaggaatgagccacatgcccaccctgagtcaccatgcacccccgagacacagtttcttgccttgctgcccaatgaatccatgtcagaccttgaacccacaggaaagaggcctggattgtaggggaacccccaaaccctgccagtcagacgcaggatagcatcctgct

SEQ ID NO: 1560269 - DNA, 4001 bp, Homo sapiens
agattaaaagaagttagtcactttaagtctttagatggatgctcagttacatgtagatggagagcttagagggtatataagctctggaaaactttgtcattttgagttggtctggcgatattttccaggccttctccctgtaaccggttacagaaataaaaactctcttcctccccagttaatctgcatctcgttattggaccatgagaaatagcagcccgaccctcagtttggtccaggaacacccgtgctcatcctcttgctttcctgggtctccaacatcacttcctcatggaagccttccctgatcacaatggacaatgttactcttccatctcttttcacttattcagctttatttttctccacggcgcctaagactcctagatatcatattggaaagtattggtttagttgcttgtgattggtcttatccctcattagaatagaactctgaaggctgggactgagtctatcttggtcactgttgtattcccagcacttagtgcaatgacctgcacgcagtagggcctcaataaaaacaataaccggctgggcgcggtggctcacgcctgtaatcccagcgctttgggaggccgaggtggacagaccatctgagttcaggagttcgagaccagctgaccaacatggtgaaaccccatctctactaaaaatacaaaaattagctgggcgtggtggtgggcgcctgtaatcccagctactcgggaggctgaggtaggagaatcgcctgaactcgagaggcggaggttgcagtgagccgagatcgtgccattgcattccagactgagctacaaagcaagaccctgtctcaaaataaataaataaaataaaaacgacaaccgtgacaatagcagctgacacttatgtagcatttgctacgcgccaggcactccatgctctttacattcattaattcattcgatctacatcactaccctgtgaggtagttactaagattgtccccattttacaggtgaggaaactgaggcacagtttgggactgtgcttgggaacttgcttgggagcagcgtgaagagttaggaatccaggaagtctggctccagagtcgggctctaaaccaccaacgctttgttgaatgacttaggataaaagaacacagccaaggggagaagggacccctctctttccagatcggctgagaacctggcggatgcttcatctcaagacaggctggctatggcatgctggcagccctctctggtgaacagtggcgtcagcaaggctgcctgggcttgacgagggcagtgtagccacctaagcacaggtgaccatcaaaggagagtgacacctttaaagaggggtcatcagaaaccagagggcaggcctgtgcgagctggcagggcactggggaccattgagacccaaccgtacgacataggagcttcaggacgtgaggtgggcactctttcatgtaaaaaatcccagaggaaagagatcgccgggactcgagaccccttaacccgccccatccacagtcaacgaatccctgagaccggattccctaacgaggcgctcccggtgccaccgcccgccagacccgggccccacaccgtgatcgccgcctccgggacgcctcaccgagctctggagactcaggacccgtcggcccggccagtaaccgcaggcgcctctgccaccaccgcttcacctgccgcgacgcccgcagtgcggtctgggggccgccattttctcgcccacgtgaccgtgccggacggcaccaacgcagccgcgggtgagacctagtgagaggctccgtgcatgagggaggcccggaaggctgagtcggtgctggtgccacagctcatgcaaacgcaggaacagtattcctagtgcgttcttcggggaaggggacgggcaacgtatgccctttcatgggaaaaaattctctccaacctccccactgcggtacaagaagtgagactggtttgtgccgattcagcgccctgcctgggctggctagcaacggagcatgcgcagtgtttctaggcgtggtcagactccagaggtgttggccaatgggctcagggagctcgaaccttaagtaggtgaggaataaaaaaaggaagaaatgcagtcgttcattcattcatgtatgtaataaatagtacatggccttgaggacaagagagccttcagcccttaccctcgtacgcctcccagtgttgttatagagacagaaaataacacgataagtaaatgcaatacctattagatggtgaaaaaggctaacgagaaaaaattcggtagccaagggcggtgtatgtatagggtgtgcagtttcaggaagggtggccagaatctgaggtggtgacatctgaagaaagacctgaaagaggccgggtacggtggctcacaccggtaatcccaacactttgggaggccgaggtgggtgttatcacttgaggtcaggagttcgagaccagcctggccaacatggtgaaacccccatctctactaaaaatacaaaaaggcttcagcttcccgagtagctgggattacaggcatgcaacaccacaccagctaactttttgtatttttagtagagacagggtttcactatgttggccaggctggtctcaaactcctgacctcaggtgatccacctgccttggcctcccaaagtgctgggattacaggcgtgagctactgtgccctgcttgcaatctcttatttttaaaatgtgggtgactgccaggagtggtggctcatacctgtaatcctggcactttgggaggctgtggggtgagaggatgatcgattgagcccaagattccaagaccagcctgggcaatgtggtaagcccccgtctcaacagaaaaaaaattttttttaatttggctgggcgcagtggctcagcctgtaatcccagctacttgggtggctgaggcaggagaatcgcttgagcctgggagacacaggttacagtgagttgagatcctgtcactgcactccagcctgggcaacagagcaagactccatttccaaaaaaaaaaaaaaaaaatcaactgtgcctggtggctcatgcctgtaggcccagctactcaggtggcttgatagcttgagtccaggagttcaaggatccagtgagctgtaatcacaccactggattccagcctgggtgacagagcaagaccccatctcaaaaaaaaaaaaaaaatgagcaattaataaaaaaacatggctgggcattgtagctcacgcctgtaattccagcactttgggaggccaaggcaggtggatcacttgtggtcaggagttcaagaccagcatggccaacatgctgaaaccccatctctactaaaaatactaaaattagcttggcctagtggcgggtgcctgtaattccagctactcaggagtctgaggcaggagcatcacttgaacccaggagacggaagttgcagtgagccaagatcgcgtcactgcactccagcttgggtgacagagtgagactccatctcaaaaaaataattaaataaaaattaatgaaaaaacataaaatgctgtgcatagcaaagaaatccttttggaaggccaacttctattttaagacaacattcacaaatacttattgagcaactactgtgtgctggacagtgtcctgagcacagaggatagtgtcctgggcacagaggacacaggacaaaacagacacagtgtctggcctcatggagctgacacccccacttttatttttttgagacagagtctcgctctgtcacccaggctggagtgcaatggggcgatctcagctcactgcaagctccgcctcctgggttcacgccattctcctgcctcagcctcccaagtagctgggacgacaggtgcccaccaccaagcccagctaatttttttgtatttttagtagagacggggtttcaccgtgttagccaggatggtctcgatctcctgacctcgtgatccgcccgcctcggcctcccaaagtgctgggattacag

SEQ ID NO: 1560270 - DNA, 4001 bp, Homo sapiens
cgaactcccaacctcaggtgatccacccgcctcagcctcccaaactgctggaattacaggcttgagccaccacacccagccaataacgaaggaattcttaatgtgacccgtttaggatgaaacaagttttactgggtgtctgaagaactccccaaacctccatgatttagcaggagacaagataaggatgatcaccccagcacctggacccactggagatgagataagggtgatcaccccagcacctggacccatttagattaagtaaatttactgaggttccaaaggaaagtcttcaggattcagatcttagttatagattaaaagaagttagtcactttaagtctttagatggatgctcagttacatgtagatggagagcttagagggtatataagctctggaaaactttgtcattttgagttggtctggcgatattttccaggccttctccctgtaaccggttacagaaataaaaactctcttcctccccagttaatctgcatctcgttattggaccatgagaaatagcagcccgaccctcagtttggtccaggaacacccgtgctcatcctcttgctttcctgggtctccaacatcacttcctcatggaagccttccctgatcacaatggacaatgttactcttccatctcttttcacttattcagctttatttttctccacggcgcctaagactcctagatatcatattggaaagtattggtttagttgcttgtgattggtcttatccctcattagaatagaactctgaaggctgggactgagtctatcttggtcactgttgtattcccagcacttagtgcaatgacctgcacgcagtagggcctcaataaaaacaataaccggctgggcgcggtggctcacgcctgtaatcccagcgctttgggaggccgaggtggacagaccatctgagttcaggagttcgagaccagctgaccaacatggtgaaaccccatctctactaaaaatacaaaaattagctgggcgtggtggtgggcgcctgtaatcccagctactcgggaggctgaggtaggagaatcgcctgaactcgagaggcggaggttgcagtgagccgagatcgtgccattgcattccagactgagctacaaagcaagaccctgtctcaaaataaataaataaaataaaaacgacaaccgtgacaatagcagctgacacttatgtagcatttgctacgcgccaggcactccatgctctttacattcattaattcattcgatctacatcactaccctgtgaggtagttactaagattgtccccattttacaggtgaggaaactgaggcacagtttgggactgtgcttgggaacttgcttgggagcagcgtgaagagttaggaatccaggaagtctggctccagagtcgggctctaaaccaccaacgctttgttgaatgacttaggataaaagaacacagccaaggggagaagggacccctctctttccagatcggctgagaacctggcggatgcttcatctcaagacaggctggctatggcatgctggcagccctctctggtgaacagtggcgtcagcaaggctgcctgggcttgacgagggcagtgtagccacctaagcacaggtgaccatcaaaggagagtgacacctttaaagaggggtcatcagaaaccagagggcaggcctgtgcgagctggcagggcactggggaccattgagacccaaccgtacgacataggagcttcaggacgtgaggtgggcactctttcatgtaaaaaatcccagaggaaagagatcgccgggactcgagaccccttaacccgccccatccacagtcaacgaatccctgagaccggattccctaacgaggcgctcccggtgccaccgcccgccagacccgggccccacaccgtgatcgccgcctccgggacgcctcaccgagctctggagactcaggacccgtcggcccggccagtaaccgcaggcgcctctgccaccaccgcttcacctgccgcgacgcccgcagtgcggtctgggggccgccattttctcgcccacgtgaccgtgccggacggcaccaacgcagccgcgggtgagacctagtgagaggctccgtgcatgagggaggcccggaaggctgagtcggtgctggtgccacagctcatgcaaacgcaggaacagtattcctagtgcgttcttcggggaaggggacgggcaacgtatgccctttcatgggaaaaaattctctccaacctccccactgcggtacaagaagtgagactggtttgtgccgattcagcgccctgcctgggctggctagcaacggagcatgcgcagtgtttctaggcgtggtcagactccagaggtgttggccaatgggctcagggagctcgaaccttaagtaggtgaggaataaaaaaaggaagaaatgcagtcgttcattcattcatgtatgtaataaatagtacatggccttgaggacaagagagccttcagcccttaccctcgtacgcctcccagtgttgttatagagacagaaaataacacgataagtaaatgcaatacctattagatggtgaaaaaggctaacgagaaaaaattcggtagccaagggcggtgtatgtatagggtgtgcagtttcaggaagggtggccagaatctgaggtggtgacatctgaagaaagacctgaaagaggccgggtacggtggctcacaccggtaatcccaacactttgggaggccgaggtgggtgttatcacttgaggtcaggagttcgagaccagcctggccaacatggtgaaacccccatctctactaaaaatacaaaaaggcttcagcttcccgagtagctgggattacaggcatgcaacaccacaccagctaactttttgtatttttagtagagacagggtttcactatgttggccaggctggtctcaaactcctgacctcaggtgatccacctgccttggcctcccaaagtgctgggattacaggcgtgagctactgtgccctgcttgcaatctcttatttttaaaatgtgggtgactgccaggagtggtggctcatacctgtaatcctggcactttgggaggctgtggggtgagaggatgatcgattgagcccaagattccaagaccagcctgggcaatgtggtaagcccccgtctcaacagaaaaaaaattttttttaatttggctgggcgcagtggctcagcctgtaatcccagctacttgggtggctgaggcaggagaatcgcttgagcctgggagacacaggttacagtgagttgagatcctgtcactgcactccagcctgggcaacagagcaagactccatttccaaaaaaaaaaaaaaaaaatcaactgtgcctggtggctcatgcctgtaggcccagctactcaggtggcttgatagcttgagtccaggagttcaaggatccagtgagctgtaatcacaccactggattccagcctgggtgacagagcaagaccccatctcaaaaaaaaaaaaaaaatgagcaattaataaaaaaacatggctgggcattgtagctcacgcctgtaattccagcactttgggaggccaaggcaggtggatcacttgtggtcaggagttcaagaccagcatggccaacatgctgaaaccccatctctactaaaaatactaaaattagcttggcctagtggcgggtgcctgtaattccagctactcaggagtctgaggcaggagcatcacttgaacccaggagacggaagttgcagtgagccaagatcgcgtcactgcactccagcttgggtgacagagtgagactccatctcaaaaaaataattaaataaaaattaatgaaaaaacataaaatgctgtgcatagcaaagaaatccttttggaaggccaacttctattttaagacaacattcacaaatacttattgagcaactactgtgtgctggacagtgtcctgagcacagaggatagtgtcctgggcacagaggacacagg

SEQ ID NO: 1560271 - DNA, 4001 bp, Homo sapiens
actccagcctgggcaacaagagcgaaactccgactccaaaaataacaacataacataacataacataacatataaatgtgggccgggcgcggtggctcacacctgtaatcccagcactttgggaggccgaggtgggtggatcacgaagtcaggagatcgagaccatcctggctaacacggtgaaaccccgtctctactaaaaacacaaaaaacattagccgggcgtggtggcgggcgcctatagtcctagctactggggaggctgaggcaggagaatggcgtgaacccgggaggcggagcttgcagcgagccgagatcgcgccgctgcactccagctttggcgacagatcgagactccgtctcaaaaaaaaaaaaaaaaatgtgaagccatgtactggggctggtcggacggtggtaagccacctcaattgatcttcagtcagttacagttagaactcttatggtcatatgccttctaccacctaaaacgatgagagcccaacagagagaagtggaggctggaagggttctggagtttgaactttcgagggaggaaaccggtcggggcgctgaagcgcggcctctgctttcagtttttgtcctaggacctctcctggcgggatcccggctcaggccgcccaggcgcacacccggagctgcccaaccagagaagccagagccccagggccctaccccgccagccccgcgcgcgggacgtgcggccaggctggaagctgcgctccctctcccatccactcgcaccgacccggggcagtgagccagcccgggctccccagcgctctccgcgtcctgaccccgcccccagcgagcacgtttccaaaaactgacacaagcccagcgcgcgcgggagtcccagggcgcgcggggatgcccggccgggccctgcagacgcgccccccaaaactcgcgccccggacacgctcgctgacagcgcctgcttcacttttccccgaaaacgcgccctgcccagcccggagcgtggccagagggtcccaagcgcggacgcacgcgccccgcctcctcaggggccacgccgggactcgcaccccgggagccgcacgcgggtttctggaaccacccggtggggtgcctctgtaacattccacccggcctgtcattttccaacggtcaccaagatgaagaagacaaaatttactaactccgggggtgagcccaatcctgcccactcaagatcggggagaagtcccaatttccaaggataaataaagcctgtccccaaccaactaggattaacaggtcaaagatgcctaatttcccagggccagggcagcccatacccactcaaaattacggggacaaaaattccccatttccaaaggtcagaccgctcccgcccactcaaggggacgttaactcccaccttcgcagggtcgggcccgccgtgcccgagtaggaaaagcgtgacaaacgcccaatttttaaaaagaagagaagaggagacaggaaaggatgccctcaaaaagaaaaataaggcggcggacacactgacagcgccgggaacgagcggggcgggcgggcgggcttccagtcaaaacgcggccggcacgagttaccccttccgttccgcgcccgggacagcccggcgggggcaacggcaccgcggtagggctcgggggcgccggctcccgctcccaccccaggcgcgcggggctcccaccctgcgggaaacagccgcggggccctcggccgggaagcaacgggggtggagcagcgacagtggagtccagggtctccgttccgcaggggggaccggtgagcgcggcttgggggggtttggggtgtccccaggggcggcggaggaggggaggccgggaggtagggacggtggagggcggcactcacgtagaccggcagcggccacgggtagacggcgggctcagcccccacgggcgacttcagtctcagctccagcttctcccccatgtccgcgcgcgcggccgccgcaccatgctaggcgggcggttgggggaggggcggggccgccggtgggcggaggagggcgggcgggagggaggggcgggaggctgaggggagggggcctggcctcggcctcggccgccgccgccgccgccgccgcgctccggtccggcccggcccccgactccctctttgtagtcacaggcccggggcctccagcgcctccgccatcttgggccggcgtgaagcgagcacaatgagccgggggccgggcggaaccactcgccccgcgcgctaggggagcccggagcgaagacgccggcgcgtgcccgccgcccagcgggccgacccgcgcgcgccaccccctcggcgccccgccccgtggactcgcccgcccgcccgaatccacgcacgcacgaacgtacgcacgcacgtcctcggttgccctcggccgaccccttcccccactcgccggcccgaagcggggacccggggagaccctgtgggcgggcccgtcggatagcgggttcgaatcccgtcccaggaggaggacgccggacacctccccacacacggcttagtaaaaccaaaaatccgaatttccccccataagagtcacggtccaggacttgctgtagctccaagtccagtattcattcgacaacaatgctgtttattgggtacaaaaaaaaaaaaaaaggccaggcgcggtgattcacccctgtaatcccagcactttgggaggccaaggcgggcagatcacctgaggtcaggagttcgagaccagcctgaccaacatggagaaaccccctctcacggccaggagccctggctcatgcctgtaatcccagcactttgtgaggccgaggcgggaagatcacctgaggtcaggagttcgagatcagcctggccaacatggtgaaaccctgtctctattaaaaatacaaaaattagctgggcgcggtggcgggcgcctgtaatcccagctactgcgggggctgaggtaggagaatcgcttgaacccaggaggcagaggttgcagtgagccgatattgcaccactgcactccggcctgggcaacagagcaagactccgtctcaaaaaaataattaattaattaattaattaatttaattaaactataagtttctcccaaagttagttcagcctatgcccagggatgaacaaggacagcttggaggttagaaggaagagggagtcggtgaagttagatctctttaactgtctcagtcataattttgcaaaggcggtttcaccaccagcacctccccaagtccccgggggacaccaacaccctccctgcccagccagattccagccctgccccaccccttccctgctgggtgacgttgggagagtcacttgacctccgatgctttcctcctctcagcaatagagtcccgcagtcactgccacagcccctggtgattaaagcctttcagtgtcaagtacaagtgccttgtactgttttttggggttttttttttgagtgggggggtttgttttttgacacacagtctcgctctgtcgcccaggctggagtgcagtggcacgatctcgggtcactgcatcctctgcctcccaggctcaagagatttctcctgcctcagcctcccgagtagctgggactacaggcacgagtcaccacgcccggttaatttttgtagttttagtagagatgcatttccgccatgttggccaggctggtctctaactcctaatctcaaactcaagtgatccgccctcctcagcctcccgaaattcgaaattcggagatttataggcatcagccaccgcacccggcccctttagtgttgatcaagatctcaacaggggccgggtgcggtggctcacgcttgtaatcccaacactttgggaggccgaggcgggtggatcacgaggtcaggagatcgagaccatcctggctaacatggtgaaaccccgtctctactaaaaatacaaaaaattagccgggcgtggtgactcgtgcctgtagtcccagctactcatgaggctgaggc

SEQ ID NO: 1560272 - DNA, 4001 bp, Homo sapiens
gccagccaggcagacacttgctagaaggcgataaaggtgatggacgagtgctaggacacacagcaggcgctgggacaccgatgggggccccagcggctgcacccaccgatcttgtactcgcagggcctgagtctggggtcctccaggatgttgagtctccgtttcttcctccaacagcgggcggggtacgtgtaaatctgtcccggggccaaacctggagagagaggggggtgagagggcggcggcggtggggcggcctggccccgccccgccctgcgccagccctcccggcggtacccggcccgcggtgggtcttctccatccagatgtagcagttgttctgggccacgccggtctgcgagtcgaggaagggcagtcgcaggctgcgctcggcgcacaggcgcgcgttgtaactgcggcagtgctcgatggcctcgcggtagaagtcctcgcctaggctagaggggcggcgaacgggcgggcggctgtcagcaagggcaggcgcacagggtcgcccagcaccccttccccggctgccgggccgcccaggctcgggaggggtgggccgacccctccagcctcacctctcccctcctcccactccgggacccaggctgggggaaggggacagggcccaggggcccccaaactgggactcaaacaggcccccagctcatgagtagaaacacgatacagaaacaaacaaaaacacaccgggacgtatccctacctgaacacatgcagacacacaacacaaatcacacacagtcacacgggattcacacacaaagagagacaaatcccaatactcacaaaggagaaacagacaaacctcacacacgtgcacacataaatatctactgaaaaagacaaatatcccaagttccatagtgtggagacaaatcacacaaataaccatgcacaaagacacatcacatatccacagacacacaccagaaacacatcacccacacaaagacacacaacatggaaacatcacaccacacacacatacaccccctcatgcatccaaagacacaagcatgtcaaaagacaggaactacagaaaccacttgcgcccctaggcacttacccatgtatccaaagacacaacacaaaccacacacacaatatccagacacacaacacaaagaaatcacacagattcacacaggtacacacacacatttacaaagatgcacgatgcgcaaccagtatctaaaatatcacacatccacacagacacacacacatataaaacacagaaacagccaaatccacccatagtcacacaaaaatttacacacaaatacacgcagccctacatacccaaaaacacagaacacaagacaaatgacatatagttccaaaggacacggacacacactgggagacccaaatatccaaagatatctagtgcagaataaaaggaaacagacacatgtccacacacctatcccccaaaaattcttaaaaaaaccagaacacaaataagtgatacacacacacactccacatcccaagacaaaggtagtgtggacttcactccagttgccaaggcccccgcacccccgggtcatttcagtctctcccagacccgagggttgcagggaagggatgatgtctcccttccccaaaaagaatctggaggccccccacgccctccaccccgccagggagcggtgcatccgacaccattcttgtcagagacccacagtcacacactctcgcacccccgcgcagccccgcactcggtgacagccccccagacaccccttcggccccacccccggtcgccacacacacacaggcccgcgtagacccgcccgcgcttcctctccgcctcccgccggcccgcaccacctcagggggccagggatgacagtggccatcttgctccccgggtcctgcccccagcaggtccccgccgggtcggtcctcccagcggtcgggcgggcgctgaggccgcccatccattcattcccggggggcgggagcacgagggccacggccaatcgcggcgacggggcgggcccgcccgggccatgctgggagtggtagtcccaggccagggggcccccgggaccccgcggggacgggacggcgcggaggaggggcccggggcacgcaccgtcactcacccgccctcactcgtccacatatcctgctctcgcgtgcacacaaccacatgcacacctggactcgcacacgcccacgcatggcagtttacacacacattcacgcggatactcacagcctcccacacactcctactcacacaccttcgcacggactcacacagccacacgcacacacactgcaatactaagagacgcagagacacctcccaggtgcccacacagacttctcaccaacatgcttccagcagacaccccctcaccgccccccacccaagtccctcctggctccagagaccccacccggggctgtctctcccagcagccacgctcacggtcaccccgccctgctcaacgccttctgcaggcctgacagcagcagtgcaggttagaaacagtagtcacacctccagggttcaaatcctagctctgccacttggtggccatgtgaccttggcaaatgacttaacctttctgggcctcagtttcctcatctgtaaaaagaggatgatgcctcactggagtgttgtgaggattaaatgagtaaatataggtaaagcattttaagaggtgactggcaggccaggcgcagtggctcacacctgtaatcccggcactttgggaggcccaggcaggtggatcacctgaggatgggagttcgagaccagcctggccaacatggtagtagtctctactaaaaatacaaaattagccgggcatggtggcgcatgcttatactcccccactcaggaggctgaggcaggagaatcacttgaactcaggaggtggaggttgcagtgagctgagatcgtgccattgcactccagcctgggcaacaagagtgagactccctctcaaaaataaataaataaataataagaaagaaagaataatgcggccaggtgcgatggctccagtctgcaatcccagtacttcgggaggcctagatgagagcactgcttgagcccaggagtttgagaccaacctgggcaacatatccagacccctgtgtctacaaaaaaaaattaaaattagctgggcatgatggcgcagcagtgtagtcccagctacttgcaaggctaaagtgggaggatagcttgaacctgggaggctgaggctgcagtgagctgtggtctcaccactgcactccagcctgggtggcagagcgagactctgtctctaaaagcaaacaaacaaacaaacaaacaaacaaaaaactaagtaagcagggcgccgtgactcatgcctgtaatcccagcaatctgggaggctgagatgagaggaccgcttgagctcaggagaacagcctgggcaacatagcgagacctggtctctactaaaaaaaaaataaatagctgggcatggtggcacatgcctatggtcccagctactcaggaggctgagtcaggaggattggttgaacccaggagatcgaagctgcagtgagctatgatcacaccactacactccagcctggacaactgagcaagaccctgtctccaaaaaaaaaaaaaaaaatagatgctcagtagatatttgttgaatgagtaaatgcacccatcatgtgctgggcacagttcaccccgggatgcttttattatctgcattttccaggtgaggaatctgaggcacaggaaggtaacctcacatgcccgcatgccctggcggctctttgaaggtaagactgaaggaaggaggcaggcacccctgacggccctccccaagtagtcctgacctccttctctctcccactgtcacccacactgactccacccgaagagatccccagggagtgagcagacccactgagtcacaaactgacccagtctctctgcaacaccaccaccccgtcccccctcccgt

SEQ ID NO: 1560273 - DNA, 4001 bp, Homo sapiens
cccatacacagatggcaaaactgaggctcacggcagggaacattcgtggctcaagctggttttggaactcaggcagtcggaacttccgagggcggcaccctgcagctccttctccccaggggatttgactcacattctttcaggagccagggagtccccaccttcacccccacagagaccttttggaagggaagggcacagaggggtagggccctcccagtccaggcttactgtagctgggcccctgctcacggctgtagcacacctcctcccaggggtctgggccagggtcagggtgaggggccccatcgcctgtagatccaccaacctgcacaagagccccgttcccagccattttgcggatgtcccctcacaggagagacagctgtctgtgtgtgccacttagggtgagagggcagcagaggggtgtcaccatcatacaccacctcacacggacccgagccccacacacccgctcccggcaccctgctcacggcgaagccacacgtgtaggcgcttgcctctaagtccctgccccccttcctctcccaactcccaccctccacctcccacccccattcccgccagaaaccagaagcaactggcggcctctggtccagccagcaggcgcatcccttctcgtgggtggggtaggggggcgctccctctctccctctctccccccaccccccacccccgcccccagccctcgatgttcaaggtcaaggcagccagcgcacggggttgggggaagggtgggggaggtcgccccggcccctttgtgcgacgccgcgggcgctcgccctccgcctcctccaccaggcccgggaggagggggaggggagcgcctcgctcgcctgcggggagggagggcgggagcggccgagtgcctgtcacttggagcccgctgtcaccgcctgggaacggggggtggggagcgctgggacgtggagtccgggatcccgaagaggaagcaagagcgagatggagagggggaaggggaggtgtggagagcgcgagggatggcaaggagaggagagggtcaggaggggccaggctcggacccaggcttccggattcccagccaccgggcccgggaagaggcgaacgctcggaggaccgcggccagggagaaagggagggaatccccggagaccgagggcgctcccggcaccccctcctgggcagccggtccccaaagggatcagagatgctcccgtttgatgtgtatgcgcggggagagggagggatgccgcggtccagactgacggcgggttcggggcttccagttcccgggatcccgggaggaaaaaggggaggcagcggggatggaactggggacccccgacgtctcagctcccaccctgcggccgcgagggccggggtcctcagagaaagaaggggaaagagagaaaggcgctttgatgagcggagagcgggtgatggaaaccctggagaccgaggtccggacttaggtgttcgagctttcagccccggccggggcaggcccggcacctccggagaccctgagggagagatggaggagagggaaacccctacccccactctgggtggggaaacggcctccgccacccccagcccgcgccgcattccttcactgacagcgacaaagaagaggcgcccccgcgaccctggaggggctcccgcccccaaccccagggggcgacagggggtggggacccccggggcaagggttcgcgctgggggcccccattcaactacggtccgcgcgctgcgtccccctcctcagccccagggcgggcgggggaagggctcctggtgggggggtctggacagggggcggggacggcagggacactcacgacttgagcgggttctgaatggcggtggccatggcccgctcggctgggccgcctccggcccggggcgccgctgccgccgcgcgcgggcccagcccggcctgcgccgcccgctctgccgcccagcgcgctacgatttcattcattcttggggctgcggcgcgagcggagcggggcgggccgggggcggggctcagccaatccccgcgcctcccagcgcacgacgggacgtggagtctaggggcgcgcggcggcgcccgagggcgcccctgcccggactacacgtcccagggggcgtcaggaggaccgcgctcccattggctgctggggatacagggaggggcggggctccccccagagcatctttcctccctccctgggagtgctcggtctccaactcgggatctccaccctccaggcaccgcgggcgcggaagcaggtggtccctagcttctagatgtccccagggtatgtggatgaccctagggtctgtcgtgtattcttgtctaggcctatttgggtgtctcttctatgtcggacagcctgtgaacaagcacaggggttaatcagtgcctttgttcatttactgagtgcctgctgtgttccaggaactcttctaggcactggggatacagcaatgaccaaaacaaagttgccgctctcaaggagctgacattctagtggagaaagacagataataagaaaataaatagataaaatcatttcagacagtgaaaggtgctataaagaaaagaaaatggggccagtcgtggttgctcatcactttgggaggcctgtaatcccatcactttgggaggccaaggcaggtggatcatctgagcttaggagttcaagaccaatatgggcaacatggcgaaaccccgtctctacccaaaatacaaaaaattagctgggtgtggtggtgcatgcctgtagtcccagctactcaggaagctgaggtgggaggatcacttgagcctgggaggcagagattgcagtgagccgagattgtaccactgcattccagcctgggtgacagagcgagaccctgtctcaaaaaaaaaaaaaaaaaaaagagagagagagagagagaaagaaagaaaaagaaaaagagaagagtccaggcacacacctataatcccagcactttgggagcctgaggcaggaggattgcttgagccccatagcacaagaccagcctgggcaacatagtgagatcccatctctgcaaaaagtttaaaaattatctgggtgtggtgatgcatgtctggagtctcagctactcaggaggctgaggcaagaagatcacttgagcctgaaagttggaggcagtagtgagctccagcctggacaacagagagagtctccgtcaaaagcaagaaagcaagcaagcaagcaagagaaagaaagaaaaagaaagaaaagaagaaaataaaatagattcagcagaacacagattccagaaagaaaaaagaagcaaataaaagataattttaaaaaaagaaaacagattgatttgaaggagtgaagaagtggcttctctgaagagatgacatttgagctaaggtctagaagttgccagcatgcactaagaagcatgtctaggcacaggatcaccaagtgcaaatgccctgggctgggaacaagtgtggcatgttcaaagatcaggaagcaattgagtgtgactggagcagagtgagcagggggagacagcctggggagagagcaaggacccggctcatgtagtaccttgtaggtcattataaagaaaatggattttgttctaagtgcaatcaatcatcctgaactctccttctcctcttctttttcgcacacacactccaagcccatcggcaaattctgttgtctctacattcaaaacatatccagattccacccactctctgcacttcatggcctgcaccccagtcctgtccatcattgtctgctgcctggactatggtagcagcttcatcactgggctcctgcccctcaagtctgctctccccacacagccagagcaggctatctgaagcatatctctgtgctgagcacagtggctcatgcctgtaatcccaacactttgggaggccaaggtgggtggatcacttgaggtcaggagtttgagaccagcctggccaacatggtgaaaccccatct

SEQ ID NO: 1560274 - DNA, 4001 bp, Homo sapiens
taaagtcaccacgaaaaatcactggccatactctcagtccagtggtgaaaagcgtgggctctggtctcagagagaaaggttcaaatcctgactctgccacttctggggaagtcgctgaacctctctgagcttccacttccccagcgagaacatggtatgacagtatctacgcctggggccaccaagggaattgaatgagactgcacacatacagcttttaacacagtgtctgatgtagcacaaactaaatgacagctagcattgtcaactaaacaagatactcaaaaccacaggaagggggagactcaaactaaagtcctttcagggccagaatccacaccatttactgaccgggtcaggcagtgtaggtggatccaggcacccctccaccaaatcctgctgaaatcagcactctccccttcctctcctcaaagccttcaaaaagctccttccaggggcagctagagggggacaggggtggaaagaaaagcctccagcaggcgcacaaaaaactgcagccactgccctgcggaggacaaccatccagggccatagaaaaccatttcctgcccatgtctatattctagagcaggcaaaggaatcccaccagcccacaccccagccttcctggctgccaaaccccagcacaactgaccttctaaagggtccagagagcctccattccagctgcaggcgtgggacacagacctttataggataaacatgtcatgaatgtggcaggttaatggaagcaccggccagccgttcagcctcccccactcaggagctgcagactgtcaggcccgattctacctggctagattctagctctgccttgaagccctgcagcactgtctgcatgccctggacagaatctgggagagaagccatcccacgggccccgattcccctgggacccagcagaggaatgcagggattggtgcctacggtccacaccccctgggctttagtcccagctcctcgaaagcaggttggttcttgcctgggaggcaagtgacttcctcctggggcccctggggaagaccagggggtgggggccaagggaatagaccacttttgatggctcagaggcagcgtgaacagggaagtgtcagggctggcctaaggctgtgtgggaagaaggtaggcggttggacaggcctgagaagggaggctgagagaagggggctgaaccctgtgggctggacccttggaagacagctatgctaaccactacaccaccaacgcctcggcaggaaaaagagtctctggatacccttaatagagggatcaagtagggttgaggatcaggactggattggggagaccaagcctcggggcgaaggttggaggaagtggtaaaggagtgaggacaggatgcaggtcgagggaggtggcctctgtgcatatacagcatttgcatggggagagggaggagatcgggacctccagagcctgcacgaaaggggagagggtgtcaaggtctgcagctacgaggacgttcttgggtgcggccacctccggaaggggtcagagcctggtggcctgggcagcaacgggatgggtggggaagcccatcagggaaggggagaaactgggaggtggcctggccagcgcaggaatcggggagggaaagaaggtggaggagggcctggggcggagaggaaacgaggcagggggccggagggacccacagacgggtgcatggaggctccggggtgcggggaggccaggcgatggcgagggcagggtcagggccgaggcggggccggtcaatggcgggttcagggtcgcggccggggcgggacgaggcgcgcgggcgctgctcaccgggacgtggggcggcggccggactgggcaggtcgtcccgggtccagcggcgcctcacggtcgcggctccatgcccgggactgcgaccccggaagtggcgggagcgggggacgacagccgcggcggacacaggggacccgccggctcaggcacctttgacccggaagttgagcgacccaggcggcggcctgggattggacaccaccaggcacgtaccaaggcgtccgcggcgcttgggggggagcccgcggcgcggcggcctaaggtgcgtaacgccccatgaacgacatcttccggtgggttagggagagacacccccctgtgacttggtatcactcagtcaaacccatgatcccccactattaaggatatccggagaggatgctacctatcagggcgttggtggtatagtggttagcatagctgccttccaagcagttgacccgggttcgattcccggccaacgcatgcggtaccacttttgcgagtttgaaattttcattttagttttgagacggagtctcgctcggtcccccaggctggagtgcagtggcgtgatctccgctcactgcaaccaccacctcccaggttcaaacgattctcctgcctcagcctcccaagtagctgtgattacaagcgcacgccaccacgcccatctaatttttgtatttttagtagagatggggtggggtggggcggggtggggcggggtgggggggggggggcggttcaccattttggccaggctggtctcgaactctgacttcaggtgatccgccctcttcggcctttcaaagtgctgggattacaggcgtgagccatcaatcacggaaaatttttttaaatcccataaaaatgtctaaaaggcaggaggaaggcggaagagaaagaatgggactagaatcgttctttcggtgaatttcaaatagtattactctccggttaggaaaaacagctgacctgtttccgcccgggatcgaaccggggacctttcgcgtgtgaggcgaatgtgataaccgctacactacggaaaccggtaggcgtcagggttctttaaattctcctatagagataatgttgcagtgatagttgcgttgtcccaccaaagaaacactggctacagtcagctaaagcaatatccgctcttcctgaatatctgttattgtatttgatacagtagagaccgaaagaaggaaaataaggaagacaaaaagaaatccaataaacaccctttccaacacacccacccacccacacacatgtttatcactttatcataaatccaccttccattaaaacaatgcacgtcaaacggcccacaaacccatccggggtcaaatgaagcttttcatctcatagatatcaatctatacttgatatcacattagtttctgcagatattcaccattttgctttagatcaaactacttttttgtgtgttttgttttttgtattttttagagagagtctcgttctgtcgcctaggctcgagtgcagtggtacgatcatccctccctgcagcctccacctcctgggctcaagcgatcctcccacctcagcctcctgggtagcttggaccacaggtgtggaccaccacgcctggctgaattttaaaaaatgcgtttgtagagacggtgccttatagctgggactacaggcgtgtgcaaccactcccagctaacttttgtattttttgtagagactagagggcctgcactatgttgcccaggctgctttccagctcctgacctcaacgtgattcgcccgcctgcagcctcccaaagtactgggattacaggcatgagccaccgcgcccgaccccaactacactgtaaaagagctttctgaaaagaaaaactgtgtgtgtatgtgtttaccttccgatggagttttgctcctgttgcccaggctagaatgtagtagcgcaatctcagctcactacaacctccgcctcccggattcaagcgattctcctgcctcagcctcccaagtagcggggattacaggcacccgccaccacgcctgactatattttgtatttttactaaagatggagtttcgccatattggtcatggctggtctcgaactcctgacctcaagagatccgcccgcctgagtctcccagagtgctgggattacaggcatgtgccaccacgccaggcctctttat

SEQ ID NO: 1560275 - DNA, 4001 bp, Homo sapiens
aaagcagccctcggtgcatttgcagtggttccagaacctttccagcactccagcgtcaaaccctgttcccattccttagcagtcactccctgtcccggggcagccaccgatctgtgctctgtctcaatgggtttataagttccgttaatttggatgaatgtaaactggaatttcaacggcgacgtgtggccactggctcccgtatcggacaggaagggctagggcagccgattctggtgaggctgcgtgttggcctcaccagtagcccatgccacactccagaccacagacagcagcagacctaggtgggtttttgttttgttttgttgagagagtctcactctgtggtcccggctggagtgcagtggcttaatctcagctcactgcaacctccacctcccaggttaaagcaattctcgtgcctcagcctcctcagtagctggaattacaggcatgcactaccacacccagctaatttttgtatctttaatagagatggggtttcaccatgttgcccaggctggtcttgaactcctggcctcaagtgatccacctgccttggcctcccaaagtgctgggattacaggtgtaagccaccatgctcagcattttttttttttttttttaatcatagctcactgcaccctcccagggtttaggtgatcctcctgcctcaggctcagctgggaccacaggtgtgcaccaccacgcctggctaacttttaaatatttttgtagagatgaggttttgccatgttgcccaggctggtctcaaacaactggactcaatccacccagcttggcctcccaaagtactgggattacaggcatgaggcactgcacccggcctgggtttttgtttttgtttttctaatttagagatggggtcttgctctgtcacccaggctggagtgcagtggtatgatcatagctcactgtagcctccacctcctgggctcaagtgatcctcccgcctcagcctgcacagtagctggacttacaggcgcaccactacactcagctgatcttttttttttttttttttttgagatgctgtctccatctgtcgcccaggctggagtgagtggcgcgatctcagcgcactgcaacctctgcctctgaggctcaagcagttctcctgcctcagcctcccaagtagctgcgatttcaggcacctgccaccatgcctggctaattttttttaaatatatttttagtagagacagggtttcaccatgttggccaggctggtctcaaactcctgaccttgtgatctgctcccctcctaccccacggacaatccctggcctcagacccttccccatctgttttccaggcccaaccgcttgcttatcctccacggcttcctggacgaaaacgtgcactttttccacacaaacttcctcgtctcccaactgatccgagcagggaaaccttaccagctccaggtgggtggctgttgggggcttcggcccctccgcgagccgacagatccctgggagtggggggtgggacgaggcggggtggcttcccactgtgaccaggggctccctgggggatctggggctcccagccccccaccccacagccctgtgtccccgccctcccagctcccagggccattgatgtatcagtcctgtcttgacagctcagggttccgcctgccttcggtgctggaagcacgggatcgggggctgccacacccacccctgctccgggcctaatggagggaggaacccttaccgaaattgccccgcagacgggctttatttgaaactgagaaattgcgtagaagaaaccgctgagtgctgaaggccctagcaggctccttcctaaggcgctggggccaagcattccctgaggaggcagcagtgaagggtgctagagtgagtggagccagccaggcttgggggaccgagcgggaggagagtgggggagtgggtggagccttggcagcaacgtggggctcagtctaggtgggcggggcttctgcgctaaggggtgggcatggttatgggcggggcctcaatggcgaggagggtgggacttctgcagagggacggggcttcagtgttacggtgggtggggcttccgcagtaaatggttggcctcggtgtggggaagggcctcggtagtggagagggtggggctcggtgtgggagcagcgcctcagcggtgaggagggtggggcttctgctgtagaggagggggggccctcagtaagcagggtggagcttctgctatagaggggtggggcctcagcgggggcggggcttcggctggattttcaactgagggtggtgggaggtgactcgggcttgtgagcagagcatagagttgggcggcttgccatttgacccacatttctctggctgctttgtggatggcctgtgggggacagtgggacgtggtccatagttgtaccggcgggagattcaggaggtatcttggaggcaagagggccaggttttattacctgtggactgcagacaatttctgcttcctgggcgcctcggcatgctctgtcctgtggggagcgtcctgttgcctttcaacagagcagggaaatggggccgcagagcaggagggaggcagagccaccttgtgcggtgatgagctgatctcttggcggtgccccccaccgacaccccacatcccaagcagcccagggagtgatatcaggcagggctggaatggaacttcagatgtctcttcccagcctgagacccgagcccactgccttcccaggggccaggtagctgggacagcattcacccttgcacctcgtttctccgtctttgaaacggtcatgataactcggcctccttgaaggctgctggggccaaacaaggtcttcagaaaagcattcaggccgggcgtggtggctcacgcctgtaaccccagcactttgggaggctgaggcgggtggatcacttgaggccaggagtttgagaccagcctggctaacatggcaaagctccgtctctactaaaaatacaaaaattagccgagtgtggtggcacacgcctgtagtcccagctactcgggaggctgaggcaggagaatcgcttgaacctgggaggcggaggttccagtgaaccgagattgtgccactgcactccagcctgggcggcagagggagactccgtctcaaaagaaaaaaaaaaaagaaaagaaagaaaaaagaaaagcattcagcacacagggtgggcccagggtcctgtctcactgcctccccacaggaagtagaacgtgagatgagataggctgtggggtgggaacatggcattgtgtgggacagatagagtgcacctctccttctgtttcaaagaccccaaaacatctgggccaggcagctggcggccccaggccctctttatacacaaatcacatttgtcacatgccgggccttgggcttggtctggaagctcattggggagccagacagaccctctatctgccctcttagccaagaggaaaaagtaaccaggcagctgggacccagagtggcataaaggcatgggcacaacatgtgcatatggctggtgtcaagggcagcagagtctgccccagggagtgccactgcccgggctggggaaggagtgggcccttgaagtgcctggggcagcaggacctggaagctggtcttgatgtcagactggcaagtccttgcagaggtctaggctggggacggtgtcatcaaactcgtgattcatccagggatggattaaagaaggcaagagtagaggaggggaaaccagtgggtggcttggtgcattcccagggtgatgggcaacagtggggaccaggagcctggagaggaggggatgattcagaaacccatctcactggcaggaggtggcgtagatgggccacctgcccctgctgccggccagccccggggttctttgtggagaacgtagggttattttcatgccttggtcctaccaacccctagggggcagtggggagctataggggttgtccgtcagtgcctcgag

SEQ ID NO: 1560276 - DNA, 4001 bp, Homo sapiens
aacttgatctgccttttgtccttgtttttccaagcctcatttgtcattttcataggaaaaggttgttcctttcccccttggttcctccatcctttttttctgttatcatttaaatatgggatcccttgctcacgcctgtaatcccagcactttgggaggccagggcgggcagatcatatcaggtcatgagtttgagaccagcctggccagcatggtgaaaccccatctctattaaaaacacaaaaatttggccgggcacagtggctcatgcctgtaatcccagcactttgggaggccaaggcgggcggatcatgaggtcaagagatcaagaccattctggctaacatggtgaaaccctgtctctactaaaagtacaaaaattagctgggcgtgatggtgcacgcctgtagtcccagctactcgggaggctgaggcaggagaatcgcttgaacctcagaggcagaggctgtggtgagccgagattatgccactgcactccagcctgagacagagggagaccctgtctcaagaaaataataaataaataaataaataaatacgtaaataagggatcgcttgtgccttacctcttgggttctattttctttgtgtagaaataggcaactcaatccaaggtgaaatggatggacatggttttattcttatcatttattcaatgttcattaagtatattcttttaggaatatagcaaggaaataagcagaaaaataacatcactgctgtcacggatgtcaccttttactttctttttcttgagacagtgtactgctgtgttgcccagtggcatgatcacagctcacttcagcctcaacctccccaggctcaagcgatcctctcacctcagcctcccgagtagctggaactacacaacactgacatgcccggctaatttttgtattttttgtagagacaacgtcttgttttgttgcccaggctggtcttgaactcctgggctgaagcgatctgcccacctcggcctcccaaagtgctgggattacaggcatgagccaccgcatgcctcgctctaaaagatctgaatcgcatcatgcctgaaaatggtttggcagcagctccagagtctagtaagtgctcatgaacatgagatttccagcttggctaagcctatattctatctaggacctaatcatcctcataggaatcagattcccctgtgctcaagaacaagcatcggggtgggaagaattaggacacaactacgagggagaagatttcggatttgaaggcagaaacaggcttccctgcatttgcctgtgctgtcagatgacagccgcggccgggcaccgaggctcatgcctgtaatcccagcactttgggaggccgaggccagccaatcacatgaggtcaggggcttgagaccaacctagctaacatggtgaaaccccatctctataaagatacaaaacttgggccgggtgcagtggctcacgcctgtcaccccagcactttgggaggctgagccagacggatcacaaggtcaggagttcgagaccagcctggtcaatatggtgaaacccccggctctactaaaaatacaaaaaaaaaaaaaattagccaggtgtggtggcgtgtgcctgtcatcccagctactcgggaggctgaggcaggagaattgcttgaacctgggaggtggaggttgcagtgagccgaaatcgtgccactgcactccagcctgagcgacagagtgagactgtctcaaaagacaaacaaaacaaaacaaaacaacaacaacaaaaacgatgacagcctctgtgggaagtccctgccacccacgtggacgaagcaccagcttcggccgcctggtccctctgccttttcccgccgccagctgctttccacttcttcacgtgtctttgcttcggttctcattttttctggcttacctttacgaagatcctctgagcctggcatcttctaatccagatgtgcgcctgggttcaggtccagggataagaactagcaaagatcaaatccggatttaagtagcttcctccacagccacacccgactcccacctcctccacctttctctgccctatctgcctccaatatgatccctcggtcctccagagccccctggatttctcccaatactgtcattttatctaatattgattgagcggagaccaacgactcaaaggcgagtccacaaaccagccccactaacactcctgggagttgttaaaatgcagaatcctggcccactccagacttcctgagcagaagctgcaatttcttttctttttttctttttctttgagacagagtcccactctgtcacccaggctggagcgcaatgacaccatcttggctcactgcagcctctgcctcccaggttcaagggattctcatgtctcagcctcccgagtagctgagatcacaggcctgtgccaccactcctgactaatttttgtatttttagtagagacggagtttccgccatgttggccaggctggtcttgaactcctgccctcaacgtttctgactcggtctggggtgggatctgatgatttccatatctaacaagcacccaggtgaccaggctccgtaatggggaccgggaatgtgattgtgaataatgaagtccaggtttaaaccctaaaggggctttcaggcaacttatatattctttagtggctaatatatgcttggcattgttctgcatatcctgatttagttaactcactcagaaatcatctcattttatttatttatttatttatttagagatggagtctcactctgtcacccaggctggagtgcagtggcacgatctcggctcacagcaacctccgcctctcaggttcaagcaattctcctgcctcagccttcccagtagctgggattacaggcacccaccaccaagcctggctaattacaggtggctcacacctgtaatcccagcactttgggaggctgaggcaggcggatcacctgaggtcaggagttcgagaccagcctggccaacatggcgaaaccccatctctactaaaaatacgaaaattagctgggtgtggtggtgggcacctgtaatcccagctactcaggaggctgaggcaggagaattgcttgaacccaggaggcagaggttgcagtgagctgagatcgcaccactgcactccagcctgggtgacaggagtgagactccatctcaaaaaaataaaagaaaaagctgcaacacctttcagatgcccaggctcacaccatgtataccttttatcttgacgacaagggcagtttgacttcaggttcacagaagtggcagtttttcttgccattccatccatttgaatctcagttctgcacatctctacttgtgacagtggttagcctttgcataaatgagcttgtagctacttttttttttctttttgagacagggtcttgctatgtctcaaaaaacacagctgactgcagcctcgacctactgggctcaagtgatcctcctacatttgcccccaagtagctgtgactacaaaggcctaggcccagcctggagtgcagtggcaaaatcatagctcaatgcagccttaacctcctgggcctaggtgagcctctcacctaagcctcctgagtaactgggactacaggtgcacactaccatacccagctaatttttgcattttttgtagagaagggattttggctaggctagtctcaaagtcttaggcacaagccatcctcccacctcagcctcccaaagtgctgggattagtaagaggcagtctgtgttgctcaggctggagggcaattcacaagctgattccactactgatcagcatgaaagtttttttttttttttttgagatggagtctcactctgtcgcccaggttagagtgcagtggcgtgatcccggctcactgcaacctctgcctcctgggttcaagcaactctcctgcctcagcctcccaaatagctgggattataggcacatgccaccatgcccagctaatttttttt

SEQ ID NO: 1560277 - DNA, 4001 bp, Homo sapiens
caaatatttattcaactcaatcatatttattcatgaagcatgtgctctacagcaggccctgccaggagtcaggaatacaggtaagcaacacaaacgagccactgcttttcttccagaacatcttgggacattccagttccggctgatcttctccctccctgagccatagcagttaccacgcaatgcgtcacgtaactacacagttgtatattattttctacttccataggcggtagtaggtcttcagtacctcccacagaagtggccacgtgggagatactccatagtaaatgtgttgacaaccggattttgaagaattaaaatattgttttgtctcaggtacctgaattttaacaccagtgttctataaaacaattcacactggcagcttcaggaatacgcctcagtggtgatgactgcgggggtgtgccaatcagggcagctgctatcccagggagcgtcggtgggagtaatgggtgggggggagcaggagcctggtttggcagcagcaagtgggaggcgggggagtggtggcagtgagtaagcgggttccagtcctccagaacatcttgcttcactcctctgaataatgaacagcctcttactaattatttcttaaatgtgactagtagcctgacatgattgtttccacagtttattaattcctaagggtaacttgctctacagaacaaaccaactaacattatacaattcatgtattcattcataccaaaaaaaaaaaaaaaagcaggaagccagatttaagtactgtgctttcaagcactggaaatggagaatctggaacagagagggagaagaggagtgtttaacaaagtcctacagccacagatgggcttatcccccatgtgacctcatcctagagtcctccctaagtgtgagaggacttttttaaacaattcatatattctaatatgttaaggcagaaaaccaacacatatttaagtaccaattatgtgtcaggcactgcaacagtcccatgaactaagaaaaaaagttcctccatcagatcaaaaggaatgccattgtaaacaactgaaaagggaccagaagcgattctttattaataaggacgactagcgctagccgggcgaggcggctcatgtaatcccagcgctttgggaggttgaggcaggaggatgacttcagaccatgagtttgagaccagcctggggaacagagcgagaccctatctatacaataaaatagccaggctcggtggtgcatgcctgtggtcccagctactccagaggctgaggtgggagaatcgcttgagcccaagagttcgaggttgcagtgagccgtgataacgccactgcactccagcctgggcgagacagcgagacccctgtctctaaaaaataaaaataaaaaagcctagcgctctagtgagcatcccctggacgaggcaggcaccgggtccgcttacctacgcgccacgcccctgcacacctggcgtccccatcaggtaggtctccaaggacaggggcagccgggaagttcaggcacgcgccccagctctcccaagaccgcgagcggccgccggggtcgcagcccaggccctgcctcgccgcacggccgacgagcagaagccgctccgcaaacttggtccttccggagcccagcccggcccgcgtcccggcagacactcccgcgctccgcccctcccgacgccccgacgccgcggccgcgccccccgactgcgccacgcggcggggaggggcggccccaggggctcggggctgtagccgagggttccgccggcgcccgcccgccctctcggtagaccctcgcccgcgcgtcccggcgcgccgccacagacctgcggcctcagccgtcctcacgcgcggctccgggaggggaaggaggccgacggggctaggcgggaacggggccgcgccacgggccgcagcgcgccgcgggtacaaggagggcagaaccgccgcggagctttgtggaaatgaggggctggggggcgtcaacagccccggggagggggcgcgccggagaggccgggcggctgcccccgcgcccataggccccgggagctgttcgtcaacactaggccccgcctcctcccgcggttccccgcctcgtctcgtgctgcgctggccggaaggaagcggcacacttccgcttgcctggtccgcattgagtccggtctgttccggagactctgagcgcggccgcggagctgcagtggcggggagtggggtgcggatcttgtgtttgcgcacgcagtcgccggccacctcaggccggagctagagatacggctcgggataggagggcccggcggctctgaggcaggttcgcctcgagccgcacggcccggagcagcggctccgcggtggtccccggggcttgagaggggtgcgggcctgggagcccctgagggcctgatttacggaactccccctccttcctcctttctgccgttccctgctctgtggcggatgcgcagggatcagtagggacggcagcagtagggccactcgggcctgccccgcttcccgcattgcccggtttggcgcgccgcctccgggccttggcaaagccccagcgcccgattgtcactgaccagtgcttggaagtcctttaccgactgcccgtcagcgtcccgcggagaggattttgcgtctccaaagacgcccctcttccgaaaacaggctcctctgtgttctcagtcgggtatatttttctgtctccaaactagattggcagccgttttttgagagcaggtactgactgtgctttatttctagatacttttcttagtcacaccacggaaaacactaggtggaaccttttttaaaattattttttacaggtgaggctctcagtctgtcgcccaggctggagtgcagtggtgctatcacggctcactgcaacctcggcctcctgggcgcaagcgatcctcccgcctcagcctccggagtagctgggaccacaggctcgcactactatgcccagctaatttttaaatttttcgtagagatgggggtcttgctttgtcgtccaggctggagtgcagtggtgtgatcgtagctcactgcaaccttagtcccctgtgcccaagtgaccctgcttcctcagcctcctgagtagctgagattcattttaatttttatagtgatggggtctcgttgtgttgaccagtctggtctaaaactcctgagttcaagcaggcctcctgcctcagcttctcaaaatgttgggattacaggctttagccactgcagcgggcccatcaaacgttgtatttgtcagtacataatttacatgttaattgatttttgttaaagggatggccatctgggacctccacccgtgaaaaggcggctcattggtctgactccaacactaaattacgccatccaggaagcctttcctagtcacctctgttggagatcgtcctcctttgtgtgtcggttgttagtaaagagcacacgttctgtggaaagatgttgaggtatctgctggatggctttgatagaaacaaatgtcagctgttttttcagatggcatttgtcttgtttcagcctggttgttggtagcttttctgtcgcctggcttgagggcaaggactgtatgtttatttttcacgttaagatgcctttatgtgcatgtgtctgtttcatgaatacataggtgaattgagttccccttaaataggatttccctcttattttataggtttttttttttctctcaagttgtttcactctgggggaaatgtgaccattgtgaaatatcatcgcttagttaaaaagaaagtagaattcagcagtagctgctttttttaatactatgaaaagacattcctaagcaagatgaagctttgagacttttcctaagtaggacctactgctgagagtaagtcttggggagaataagccaattaagaatgagtctttggttctgataaagtaaccatggaggtgatggataatgagtgtaggtccttgctcacacttctggcc

SEQ ID NO: 1560278 - DNA, 4001 bp, Homo sapiens
attagcatgccctccctttttttttcttccccccaagacagggtctcactgtcactcaggctggagtgcagcggcaccatcacggctcactgtagcctctacttccacaggctcaggtgatccacctcagcctcccgagtatctggactacaggcatgtgctactacacctggctaattattttttgtaaagatggggtctccctatcttgcccaggctggtactgaactcctggcctcatgcgatcctccccgccttggactcccaaagtgctaggattacatgaatgagccattgtgcccagcctgccctcgatcttgccatctaaatcgttgctggccttcaaagctacactcaaaacacaattcaaatatttattcaactcaatcatatttattcatgaagcatgtgctctacagcaggccctgccaggagtcaggaatacaggtaagcaacacaaacgagccactgcttttcttccagaacatcttgggacattccagttccggctgatcttctccctccctgagccatagcagttaccacgcaatgcgtcacgtaactacacagttgtatattattttctacttccataggcggtagtaggtcttcagtacctcccacagaagtggccacgtgggagatactccatagtaaatgtgttgacaaccggattttgaagaattaaaatattgttttgtctcaggtacctgaattttaacaccagtgttctataaaacaattcacactggcagcttcaggaatacgcctcagtggtgatgactgcgggggtgtgccaatcagggcagctgctatcccagggagcgtcggtgggagtaatgggtgggggggagcaggagcctggtttggcagcagcaagtgggaggcgggggagtggtggcagtgagtaagcgggttccagtcctccagaacatcttgcttcactcctctgaataatgaacagcctcttactaattatttcttaaatgtgactagtagcctgacatgattgtttccacagtttattaattcctaagggtaacttgctctacagaacaaaccaactaacattatacaattcatgtattcattcataccaaaaaaaaaaaaaaaagcaggaagccagatttaagtactgtgctttcaagcactggaaatggagaatctggaacagagagggagaagaggagtgtttaacaaagtcctacagccacagatgggcttatcccccatgtgacctcatcctagagtcctccctaagtgtgagaggacttttttaaacaattcatatattctaatatgttaaggcagaaaaccaacacatatttaagtaccaattatgtgtcaggcactgcaacagtcccatgaactaagaaaaaaagttcctccatcagatcaaaaggaatgccattgtaaacaactgaaaagggaccagaagcgattctttattaataaggacgactagcgctagccgggcgaggcggctcatgtaatcccagcgctttgggaggttgaggcaggaggatgacttcagaccatgagtttgagaccagcctggggaacagagcgagaccctatctatacaataaaatagccaggctcggtggtgcatgcctgtggtcccagctactccagaggctgaggtgggagaatcgcttgagcccaagagttcgaggttgcagtgagccgtgataacgccactgcactccagcctgggcgagacagcgagacccctgtctctaaaaaataaaaataaaaaagcctagcgctctagtgagcatcccctggacgaggcaggcaccgggtccgcttacctacgcgccacgcccctgcacacctggcgtccccatcaggtaggtctccaaggacaggggcagccgggaagttcaggcacgcgccccagctctcccaagaccgcgagcggccgccggggtcgcagcccaggccctgcctcgccgcacggccgacgagcagaagccgctccgcaaacttggtccttccggagcccagcccggcccgcgtcccggcagacactcccgcgctccgcccctcccgacgccccgacgccgcggccgcgccccccgactgcgccacgcggcggggaggggcggccccaggggctcggggctgtagccgagggttccgccggcgcccgcccgccctctcggtagaccctcgcccgcgcgtcccggcgcgccgccacagacctgcggcctcagccgtcctcacgcgcggctccgggaggggaaggaggccgacggggctaggcgggaacggggccgcgccacgggccgcagcgcgccgcgggtacaaggagggcagaaccgccgcggagctttgtggaaatgaggggctggggggcgtcaacagccccggggagggggcgcgccggagaggccgggcggctgcccccgcgcccataggccccgggagctgttcgtcaacactaggccccgcctcctcccgcggttccccgcctcgtctcgtgctgcgctggccggaaggaagcggcacacttccgcttgcctggtccgcattgagtccggtctgttccggagactctgagcgcggccgcggagctgcagtggcggggagtggggtgcggatcttgtgtttgcgcacgcagtcgccggccacctcaggccggagctagagatacggctcgggataggagggcccggcggctctgaggcaggttcgcctcgagccgcacggcccggagcagcggctccgcggtggtccccggggcttgagaggggtgcgggcctgggagcccctgagggcctgatttacggaactccccctccttcctcctttctgccgttccctgctctgtggcggatgcgcagggatcagtagggacggcagcagtagggccactcgggcctgccccgcttcccgcattgcccggtttggcgcgccgcctccgggccttggcaaagccccagcgcccgattgtcactgaccagtgcttggaagtcctttaccgactgcccgtcagcgtcccgcggagaggattttgcgtctccaaagacgcccctcttccgaaaacaggctcctctgtgttctcagtcgggtatatttttctgtctccaaactagattggcagccgttttttgagagcaggtactgactgtgctttatttctagatacttttcttagtcacaccacggaaaacactaggtggaaccttttttaaaattattttttacaggtgaggctctcagtctgtcgcccaggctggagtgcagtggtgctatcacggctcactgcaacctcggcctcctgggcgcaagcgatcctcccgcctcagcctccggagtagctgggaccacaggctcgcactactatgcccagctaatttttaaatttttcgtagagatgggggtcttgctttgtcgtccaggctggagtgcagtggtgtgatcgtagctcactgcaaccttagtcccctgtgcccaagtgaccctgcttcctcagcctcctgagtagctgagattcattttaatttttatagtgatggggtctcgttgtgttgaccagtctggtctaaaactcctgagttcaagcaggcctcctgcctcagcttctcaaaatgttgggattacaggctttagccactgcagcgggcccatcaaacgttgtatttgtcagtacataatttacatgttaattgatttttgttaaagggatggccatctgggacctccacccgtgaaaaggcggctcattggtctgactccaacactaaattacgccatccaggaagcctttcctagtcacctctgttggagatcgtcctcctttgtgtgtcggttgttagtaaagagcacacgttctgtggaaagatgttgaggtatctgctggatggctttgatagaaacaaatgtcagctgttttttcagatggcatttgtcttgtttcagcctggttgttggtagcttttctgtcgcctggcttgagggcaaggactgtatgtttatttttcacgttaagatgc

SEQ ID NO: 1560279 - DNA, 4001 bp, Homo sapiens
cgtcctcatccgtcaggggcccgcaggtccgcacggggctgctgggaggggtgctagtgcccggccctgcggggacctgctgggcaccacagttttcctgcctgggagcgccctcggctgccgtgccctcggggacagcggcagcgggtgtggggccctggctgaaccggcgcagggcctgctcagctcgctcgaagcggacctcgcgcttccgcagctgctgctgcagggctttgtccaggccgttgcggatggacgggggctgggtcccgcgggccgccaactcctcctgcaccaggttctgtccctcgggcctcaggtgggccccagcgaagcggcaggtcacgccgtaggggcaccggccgaaggtctcgaagagcacgcagcgggggcccaggtcggccggcttggtctccaggtagcgccccacgtcgtgcagaaagcggcagcgatcaccgaagaaacacttagcagccgactcctgcgaggaaacagggaagcagtgagggaggacagggagaccccggggcagcccagcagccagggttcaaactctagatcacccctcctggctcttgtgtccctgagcaagtcaggcacctcaccgtgcctctgcatctccatttatacaatgagaacaatgacaagccctacaatgtatcccgaggagaatgaagacggaatggcatcagagcaagctcactgctcgttgctgaaggcccaggagctttctaacaattacccgctgccaggaaacacaccctgctcctgcctgccccggcaggaatgctcacgtggccgcacttgcctggattagggagggacacagcctgttcttgtcgtagttcgtgggcttcacatggggccggcccttgttttgtccccgggccctcttctgagtctgtagctgctccccgggctctgctgcctcctccgtctgcccgtccgccgtctgtccatcctccagtcggatccgcttagcctcaggctcagccagctcattgccagcagggtctcctacctcggtttcccggcaagtcttctcctgccctttggcttccaggaattggtgaaactgctccttggtggtgaggtatctgccgacagaaagggaaaggaaaaccctccgaacatagtcaataaacactggggaaaggaggctagaaacacttgcacgtccttaaatccttctgctgatggggagctcactacttaagaaccagccagctcccagcctgggagcccctcacggcctcaaaaaagacctattttgtccctgggtcctcactgtccaaagtgttgcgcgaaactattatcaggttcagtcaagaacgtccctgcgcacgttaggctgcgaaaaactacaattcccagcatgccttgaagcggagtctaagccaccacatttcccagcacgcctttcggcccttcaaacaccgcaggccccagcacgccccgcggcactcgcttcaaccccaagacccgccagtaacggccgctggcagagcacatgcgccgtacgtccatatgcagggactacaatccccagtatgcagcgcgggcctggcctcaaatcccacctgccctagcatgcacgtggtgtccttcgcgcatgtgacaggccccaacgtgcacgatctcaggtacctccgctgaccaccctgcaggcggaagaacggcccggaatgaagagccggtggcttctcgccctcagccgctgcctaatctcccggcatgcacagctcggaccgcgctatgggtgccggaaaaggcccttcagcttccctcctgccccggcgactcactgacgcttaatgggcgccactcctcgttccaaagctccggctcccgagtcgccaccaccaccattctctagaggagcctccgccgttccctccgccatcggcgcccctcacatccgctctggagtgtggcgggaagaccttccgggtcacgcgtgtcttccctgattgtgctggggaagtgcgcatgctcatgtcgttccaatgacgccattgctcgctcgtgacgccacgggggcggtgcctgcacatgggtggagcctcaggtcctatataaactagagcctggccaattgcgaactggactgcaatcagcttctggactgaggaaatttaactgttagggtgttttggaggtttttgtctttgttgttctgttgaaacggtttcgttctgtcgcccaggctggagtgcagcggtacgatcacgactcaccgcagcctcgtcctgggctcaagctatcctcccacctcagcctcccaagtagctgcgtctacagacatgcaccaataggcctggataatttttaaattttttgtagagacgaggtcttgccaggttgcccaggctgatcttgaactcttgggctcaagcgattctcccactttggcctcccaagcattgggattacaggcgtgagccatggttcccggcccctgctagggtttttaaaaatgtaaattaggggtcgggagcggtggctcacgcctgtaatcccagcactttgggaagccgaagcgggcggatcacttgaggtcagcagtttgagaccagcctggccaacatggtgaaaccccgtctccactaaaaatataaaaaattagctgggcgttgtggcacatacctgtaatcccagctacttgggaggctgaggcaggagaatcgcttgaacccgggaggtggaggttgcagtgagctgagatcacgccattgcactccagcctgagggacagagcgagactgtctctaaataaataaataaataaggccgggtgtggtggctcacgcctgtaatcccagcactttgggaggccgaggtgggcacgtcaggagttcgagaccagcctggccaacatggcgaaaccccgtctctactaaaaatacaaaaattagccaggcatggtgatgggcgcctgtaatcccagctactcaggaggctgacgcaggagaatcgcttgaacctgggaggcggaggttacggtgagccgagatcggccgtttcactccagcctgggcgacagagcaagactccatctcaaaaaaaaaaaaaaaaagtaaattacactacttttatgcaggacattagtttcaacaaataattagttgagcatctgtatgccagatgctgtgctagatgctgggggcgtggtagtaaacaaaacggagaaatcattacctttaagagctaacttgggagtcggaaacacagacgaaaaacataatactcctcggaattttggagattggttccaagaccgcatataccaaaatccgcgtatactcgtcccccagttgcccaacagaatccctgtataggaaaaatccgccctttgtatccgcaggtttcccatcctgcctccgcatttggtaggggttaaagaacccgcggatacggatggccaactgtattttatttttcgaaggccacttataagtggatggatgcaattcaaacccgcgttgttcgcgggtcaactgtacataagtaaattaaaccgtaagtgagtaggtaataaagcagtaaggtggattgggaatgccacccttggctgttggaatttttttcttttttttttttttaagaggaagtctcgctctgtcacccaggctgcagtgcagtggcgcgatctcggctcactgcaacctccacctttccggttcaagcgattctcctttctctgcctcccaggtagctgggattacagacgcccactactatgcctggctaaattttgtatttttagtacagatggggtttcatcatgttggccaggctggtcttaaactcctggcctcaagtgatccacctgccttgagtgtgagtcaccgcacccagccacattttaattgtttttgagagacagagtttatttatttatttaaatttatttatttacttatttatttttaaaaatagacttatttatttattttttgagacagaatcttgctctgttgcccaggctggagtacagtggc

SEQ ID NO: 1560280 - DNA, 4001 bp, Homo sapiens
aaaaaattattaacgcctattaaaagccagaccctggccgggcacggtggctcacgcctgtaatcccagcactttgggaggccgaggcgggcagatcacgatgtcaggagatcgagaccatcctggctaacacagtgaaaccccgtctctactaaaaatgcaaaaaattagccaggcgtggtggcgggcgtctgtagtcccagctactcgggaggctgaggcaggagaatggcatgaacccgggaggcagagcttgcagtgagccgagatcgcgccactgcactccagcctgggcgagagagtgagactcctctcaaaaaaaaaaaaaaaaaagccagaccctattctaggcaccataaacaaaacagttaagatatccttgatctttaaggagctgaaagatatcaagcaaacaagcaaaagatgtagtgtatcagatgatgagtatttccacggcaaagaagactcaagtggcaagagtagagagtgcaggggtgaggtcacagttctaagtgcaatagttagggatgggctcactgagaaagtataacatgaacaaaggcttgaggcacattagagagtgagtaatgctgacgtttgagagacattgcaggaggtggggagaggccctgggctgggacgctgcctgtcctatttgacataaggcaaggaggccagaacatctgaaaaaaaagaataaaagggaagcagacgaggtcacagaccataccaagcgccacgttatctagggcacgatagggccaagtgcctttttgttgaaggttttgagcagataagtgacataatttaatttatgtatgtatgtatgtatgtatttttgagatggagtctcgctctctggcccaggctgaggtacatggcatgatcacggctcactgcaacattcacctcttgggttcaagcaattctcctgcctcagcctcccgagtagctgggactacaggcgcccaccaccacgcctggttaatttttgtatttttagtagagacagggtttcaccatgttagccaggctggtcttgaactcctgacctcgtgatctgcccaccgcggcctcccaaagtgctgggattacaggcgtgagccacggcgcccggccgccataatttaattaacagtttaacaacatcacatgaggtacagcgttgagaataggttggtggaagcagggagatcagttaggagaagactgcaataatctcatgcaatgggccaataatctaatgagatggaccaagaaatggtcagattccttaaatatttgaatgttaaagccatcagaatgtccagcctgactgtgttatgggggaaaaaatggagtcaggggtgttttctagatatgaggcatgacctggcacctcctgagctggagaaaacagtgcgaggaatagtttagatatgaacatagggaattcagtttttggaacacattgagtctgagatgcctgttagagacaagcaggcaattagatgaagtccaaagttcaggagaaaagttcaaacattctgtagagagaaatcaggaaagtgctttccagatctggaatccttgattccaaggatattttgagctctgaactttgtgatgtgtcccatagttgctctgttttagcatctgtctccctctcctttttttcttttccactccttcctcctctcttccttcctgaagctcaaatatgtcttatttagttcttgaatatctgtacctttctgaaattcccaatgctcaaatgcactgaaaacagcctattttcataatatcacatcagagaaaccggttttcccctatccagatacagttaaagtttaaaaatggaactctcacaacttctgacaagaccactgggtttttagccctactttttccccaaaccaacaaaagctcagtcaagcacaagggaacttactgtgtgaataggtgtcttcggccatgctggaagagagtcctgaaggctgagccactgtctgggagacaagtcactctgcgcagagactgggttttatatgcgtagccaggtggtcccgcccacttttttaaaccatttacataaatctctagttccacccttagtaattgtatcactccttagaaacatgtatcctccatctaaaaaggactagataggacccctttccgtcaattgatatttaataatttacaccagtgtataaattattaccaacccctacacctaagccatcacaagaagaacatttcggcccatgccaactcacatacacagagtcatgctccttggctcccccaacccccttgtgggaaaaaaattcgtcccaaatcactggaacctgaacagggagacaagcttgcaatagttgccaattttttaaaaaagaatatttttgagtactattctgcttacacatatttttcaatgcttattatatacatatagtcttttgtaaatggggtttttatgctctccacctatcttttgacatagtggcctctccttataaattaaaagtgttatttctaattagtatcacataagagtgaggctagtgagacaggaacaaaatttaaggtggtgctaaaaattctgtgatcaagataaatagtatttgaaagcaatgtatattttaagtaatgtaaaaagtccatcttaacaaaacataaagattgtaaataaaaagaagatcccaccctgcacgtgcacgaccctgcaagttatgcaagtgagggtacctgcgcattgaaaaaagatgtctcaccattgaccagtcattgatcagtcattgatcagtcttgagggaagctggctggtggctgtcactttttatagctgtaatctacaatagtgcaggataaaagggaaaattttattacatgtctatatttgtgtaattttttaactgttattaagagcacataaagaagtgatatgaatttcatttattgatatatttgactatccataaataaaatttggccagatatcaagccattttggagaaacaatttcgaaccaggaaaatgacatgaaataacatttaacaggaaaattttacactttatttaattaaaacaatgataaattgtttttcttttctgtatatgacatttcatcacaatattttttcaccaaatttgtctggaaatctagagcagaattttctgctgtttgtttatattgatgtttatattttgatgtaaattatatgtacatctacttgaacattagtattacaattataaatgtgctttaaattaattgacacaatattggatattcattataattatattatcattaaatatattatattaatatataatattaataatataatcttgatataccatataacagatatattacatattatatttactccagttaaatattatatttactttttagctttattgaggtacagttgacaaaaatgatatatatttaaatatacaatttgaattttgatatacacatataattgaatcccagattcaattaccataatcaaatcaagctgattgatgtatttaccacctcaaaccacaccctttgtgtgtgtgtacatatatattacattatattatatttactccaattattgtatttactttttagctttattgaggtacagttaacaaaaatgatataaatgatatatattttaaatatacagtttgaattttgaaatacacaaaagatataattaccataatcaaatcaagctgattgatgtatttaccacctcaaaccacaccctttgtgtgtgtgtacatatatattacattatattatatttactccaattaaatattgtatttactttttagctttattgaggtacagttgacaaaaatgatataaatgatatatattttaaatatacagtttgaattttgaaatacacaaaagatataattaccataatcaaatcaagctgattgatgtatttaccacctcaaaccacaccctttgtgtgtgtgtacatatatattacattata

SEQ ID NO: 1560281 - DNA, 4001 bp, Homo sapiens
caagcaggggtcgatatgagccatcacagggaaaggaggacaggaagacaccaataattcagaggaggaaaagaaaaaagaaaccacagacagtatgcagaggagtaggcttcattcttttctcactactcgtggccctccccagggcccctaacacaagatgccactttctgtagtcttccctgaacatcaggatctcagcccgtagcacagccagggccaatactttaagatctatccttctcagtagattccctcaacccagagaactctaggattcccaaaccacatgagtcttcccctcccaaaccacagcagagtcctctgcagccctaaaaccacatcagcgtccttggggacctcccaaccacaccaaagttatctgagaacctctatagaacagagtcctatctctacagcattctcatccaccagggcacgattttcctaggggaccctctccatatcatgccaagaccgcttccctatttcaggtcctccatattaggaaccagccttccaggtagtctccctgtaccatatcccaattccccctaccacaacagggttcttccccatattactccaatatcccatcccaatcaaggcccactcctcctgatgggagaaggaggaggtgtctcttcccacagtttagagtgatcatccttttctcccctacactgcttccttgcccccctacacacacacacacaccctaatattcctaccacagacctttctccaggcacccctctttataccagggtcattccacaactgtgtccactcctagagggcctcaaagtcaaatccccaagttatcacatagggttctctcctcccagagttgtcagctacagcaaaaatcttctccccatgggccactctctcccccatgtcaaatccctttctcctattccatgccttgccactccacgactcctccacccttggagcttcccccaaaaaaccacctcttctccggggccctcccacaccaggatcatctctcccagcccccaccccctacccgggtcagggctggcgcggggcccacggggggctggggcgcggtggggcccccagtggggtgggcgagcggccagcatggcggcggtggcggcgctgaaaaggcgaccgcctgtctctggcccggccggccccgcggcggggagggcaagcgggacaggaggcccggtgggtgacaacagcagccgccactgccaccgggggcggggagaggaggggacaagggtcagcccagggcacgcgggggaagagtagagcaggtggacgggggaggggcgacacgccccaccctgagtgaccaccagcccctagggacccggcgtcccgccccccacccaggaggccctcctgggcctgctgagaccggaaggcggggcccgactgagcttggcaatcggcacctgccatggcaacaactgtaccattggtcgctggtgccaagagctcagccaatcacagcctagggcagctgttgctaggcgacgaagaagcggcccgcggagctgagcccaaacaaagggcgggagtggggcccggctaccccctcccagcctccctcctgcaactgcttcctcgggcttggccggttccaggaattcaactatgaatagccaggcagggcccgcacctgcctgccacccccctcctctcctcccttggcctcgtgctaagtctcacggcgacgggagcagggcggatcccgtcctgcccacctccctgcgaccgcttgccgccccacccgtccccgcgccgttacctgaaggagcgggcaaggggactcaaactgctcggggagcccgagctcagacctgcccactggctgagggtatccggcggacgcggcaagccagggccccgattacccagtaatgcaaccagcaaaatggcgaccacaacaaaccggcccccccacgccctggactccgcccccatccctccctctccgctcccctcacgtgacccacactgacactccgcctgcgcgagatggccgcttacctgcacgcatgcgcagcgagctaccaatcccacccaagaaccgaaatccaggctgccgctgcgcaaaggcagctagaaacggagcatgcgctctgtgaccgagtgagaatttacccaaccccgcaaaattgaccaagggtgcgtgctccctgtgtcagcaggtcaaggggaggaatgagcagcagacatgggagacggatgagtcttttaatagaaaaacacacgtgcaacagtatcaacacacatctctcgcaatcctgacagcgctgaacttcagttcttcaccttggggggtggcctgtgagaggaagataggtgatgaaggagggtccccaggatcatggcactcggggtgcaagggacagagatgtctgtcttggtgtattgctgggcccctgctcacctgtacactcccacgaccacggcatggtctctttcatatggctcaagggtcaactgctcctgcggcttcatgttctcctgttgcatctttttcacttcggaggcaaacacggcctcggctgaggctgtggagtcaatgcagttggcctaaagaggagaaaggactaatgtctacaacagggctttgggctgtttttctcttgtgtgctctttaaaccagatgttttcattattaattcaagtaaaactcagtgctatggttctagtgtgtcccccaaagttcatgtgttggaaacgtaacccttaaatgcaagagttgagaggtgggaccttcgagagatgattcaggtcatgaggcctctgccttcctgaatagagtaatgctattatcacaagagtgggttgctgattaaaaggatgattatgccccctttctatcttgctctcacccttctgccaatggatgacagcaagaaggccctcgccagattcagacctccaatcttggactttccagcctttggaactgggagccaaataaatttccattcattataaattacccagtctaaggctgggcgtggtggctcacgcctgtaatcccagcactttgggaggccgaggtggctcaatcacgaaatcaggagattgagaccatcctggccaacacggtgaaaccctatctctactaaaaatacaaaaattagtcgggtgtggtggcgcacacctgtagtcccacctactcgggaagctgacgcaggagaatcgcttgaacccaggaactggaggttgcagtgagccgagatcgtaccactgcactccaacctggtgacagagtaagactccatctcaaaaaaataaaaataaaaataaaaataaataaattacccagtctatagcattctgtgatagctgcataaaatgggctaagacactcgggtttaggaaatgtgataaaaggcttaatgaaagtttttggctgggtgcagtggctcgtgcctgtaatcctagcactttgggagcctgagacaggcagattgcctgagctcaggagctccagagcagcctgagcaacatggcaaaaccccgtctccactaaaaatataaaagttagccaggtgtggtggcacacgcctgtagtcccagctacttaggaggctgaggcagaagaattgcttgaacctgggaggcagaggttgcagtgagctgagattgcaccacttcacgccagccttggtgacagagcgagactctgtctcaaattaaaaaaaaaaaaagtttttagttttgttttggatttgaagcaggaagccttaaacagtcctatttatctaaaagccagtgcttaaattttatacccaggaattgtttggcttatttctacttcctcttctttaataatagtaataatgcagttgagaataataaaacaaatgtagcaaaaggctaacaaatggtgaaccttgtgaagggtgcatgggagagttctccattatttccaaataaaaatgctgtgaaagatgcacctagcttttatctagtatctattctatgccaggatcttttct

SEQ ID NO: 1560282 - DNA, 4001 bp, Homo sapiens
cccacctcggcctcccaaagcgctgggattacaggcatgcaccactgtgcctggcccagaaagtatatttctattggacggggccgccctagaattccataggcctggggttcaggatgtcggggtctccagttttcctgaccccagggctctcagggccagagttctgggctctccaggaagtccagtgtccctgaggcccccttccaggctctccgacctgtacgtggcaatgaaggacacggggctggtggagtttggagcaggcggcagggtccaggagcaatccacggcgatcgggtaccgagaggctcggcattgcacccggggcagtgtcagagctgctgggggccctggaggaagacagaaagagtgagcttctggtttacccccagattgtcatagccctcccgtgcgctgggctcctgccacgttgccagccagcaccaggtacatggtaggtgcctaataaaggctttcggaataaataggtacatggacaaaagtcatctgtcatcttttatccccactgcaatccatctaggtgaggactactagcccattttccagatagggaagctgaggtttaagcatctacagagaggaactcgggtaagagagagagattttaccgtgttctctcttttgtaattgttttttttttttaaagagggagtctccctctgtcgcctaggctggagtgcagtggcgagatctcggctcactgccacccccgcctcccgggttcaagcgattcttagcctcccgagtagctgggattacaggcatgtactgccacgcttggctaatttttgtatttttagtagagagggagtttcaccatgttggccaggctggtctcaaactcctgacctcaggtgatccacctgccttggcctcccaaagtgctggaattacaggcgtgagccaccaaacccagcctataaattattattattattattattttgagacaaggtatcccactctgtcacctaggctggaatgcagtggcacaatcatagctcactgcagcctccaattcctgggctcaaattatcctcccacctcagcctcccaagtagctgggactacaggcacgtgccaccacatctagctaattttttaattttttgtacagattggtggggtccggtttcactatgttgcccaggctggtctcgaattcctggcctcacgatcctcacgccctggcctcccaaagtgctggaattacaggcatgagccaccatgccctgctgtaaccattttgtcttcaaggacatggagatgttctctagtgcaaaatgaatgaatgtcggccgggcgcggtggctcacatctgtcatcccagcactttgggagcccgaggtgggtggatcacctgaggtcaggagttcaagaccaccctggccaacatggtaaaaccctatctctactaaaaatataaaaagtagccgggcatggtggcgggcacctgtaatcccaactactcgggaggctgagggaggagaatctcgcttgaacccaggagatggaggtttcagtgagctgagatggtgccactgtactccagcctgggcgacagagtgagactctgtctcaaaaaacaaaaccaaaaagaaaccaaaggaatgagtgtgactcaaattcgcatgtctgtgtagctatgtctgtgtagctctatggatacctctgagctgtgactgccagtccctatcacccacaaggtgacatccttccacccccaatgtggcactctgcctctctgtgcctcagttcctccatctgtacaatgggagggtaaccccatcccaccattgggcacgggaggatgtgatttcccaccccagacatgatccgaggccagtcctcgtgtcatgtccgtctgcctgggccccccagtcccccaggggccccacatacctttccttccactgcagggcgggcagctggcccagaggacaagggccaggagaagctgcggggtcatggctgcggccagctctgctctcaggagtgggtgggaacgtcgtgggagacttgagaggggaggtgaggacttgggacctgcccaggggaaagcccagcccagggtcaaggcccgccccctccccgacttccttcaggtctgactcactggtggggctcgtggggccgctagggagatgaattagggtgtggaggagccccagccccctggggagcacaggccacccctgctcggaaggccccgagggtgggggcgggggaggaggctgtgaaagggagaagtggagacctgctggcttttcccagcacagcatgtcctgctggccttccttccgctgccctgaagcgggggaaaccccaggcaggcaggcaggggctcagggacatggagggagacagaggcagagatgggggagagaggcagagagacagagaagacagaaggaagacacagagagacagggagatgacagagacagagacacagagagagacacagatgagagaggcagagagacagagacaagaagaggaggacacagagatagagggatacagagacagggagatgacagagacagagacagagagacacagatgaaagaggcagagagacagagacgagaggaggaggacacagagatagacagggagatgacagagagacacagagacacagatgaaagaggcagagagaaagagacgagaggaggaggacacagagagagagagacagagacagggagatgacagagacagagacagagagagacacagatgagagaggcagagagaaagacaagaggaagaggacaaagagatagagagacagggagacgacagagacagagagagatacagatgagagagacagagatgagaggaggaggacacagagatagatagagacagggagatgacagacagagaaaggggcatgacagagacagaaacacagagagagacacagagatgagaaaggcagagatgagaggaggaggacacggagatagacagggagatgacagagacagagacagagacaaagatgagagagtcagagagacagatgagaggaggacacagagatagagggatagagagacagggagatgacagagacagagagagctacagatgagagaggcagagagacagatgagaggaggacacagagatagagggatagagagacagggagatgacagagaaagtgacagagatacagatgagagaggcagagagacaaatgagaggaggacacagagatagagagagacagagacagggagatgacagagacagagagagatacagatgagagaggcagagagacagagacgagaggaggaggacacagagatagagagacagggagatgacagagacagagaaagggggatgacagagacagaaacacagagagagacagagatgagaggaggaggacacagagatagatagggagatgatagagacagagagagacaggggaatgagagagacagagacagagatgagaggaggaggacacagagacagagagagacagggagatgatggaaacagaaagagaaacacagagagcagacagacagaggaagagagacagagggacagagataagagaggaagacagagatagggaaatgagagagacacagagacagagataagggaggaagacagagaaagagagacacagatgggaagatgagagacagagacagagagacagagatgagagagtaggatagacagagatagagagatggtggggcacggtggctcacggctgtaatcccagcaccttgggaggccaaggcagatggatcacctgaggttgggagttcgagaccagcctgaccaaaatggtgaaaccctgtctctactaaaaatacaaaaattagctgggcgtggtggcaggcacctgtaatcccagctactctggaggctgaggaaggagaatcacttaaacctgggaggcagaggttgcagtgaaccaagat

SEQ ID NO: 1560283 - DNA, 4001 bp, Homo sapiens
aaatcagtgggtagtagctgggcacggtggctcacgcctatcatcctagcactttgggaggccctaggtgggtggatgacctgaggtcaggagtttaagaccagcctggccaacatggtaaaactccgtctctactagaaacacaaaaaattagccgggcgtggtggcgggcacttgtaaccccagctacttgggtggctgtggcaggagaatcacttgaacccaggaagcagaggttgcagtgagttgagattgcaccattgcaacaaaagcaaaactccgtctgaaacaaaataaaacaaaataaatcactggatgggctttacagaaggatagagatgactaaacagttagtaactgtgaccagtggaaattctccaatctgaagaaaaggtcagtgggtcaatccaaagatccaactgacctgtaactggaaatcaattagtgagttgaatagttgcacgaaagcatgttattatattatatgctgacacagctataggctgagaggttaagcatgttgttcatggccacagatccaggatggaaacctagacttcagagcctatgatcccatcgtgttctgtcagactaatacttatatttgaatgttttaaagtaggcctttttttaaaaaaatgatagggctggccatggtggcacctgcctgtaatcccagcattttggcaggctgaggtgggagaatcgcttgacctcaggtatttgaggttacagtgatttatgattaggcaactgtactccagcctgggtgacagagaaagatattgtctccaaaaaaaaaaaaaaaaacacacagataaaagtgtgagttaggggccaggagcaatggttcaggcctataatcccagcactttgggaggctgaggcaggcagatcataacgtcaggagatggagaccatcctggccaatatggtgaaaccccgtctctactaaaaatacaaaaattagctgggtgtggtggcccacgcctgtagtcccagacagaagaattgcttgaacccgggaggtggaggttgcagtgagctgagattgcgctactgcactccagcgtggcaacagagcaagaccccgtctcaaaaaaaaaaaaaaaaagtgtgtaagtcagaagctgcttaaaaccctaattcagaagcactgctccactgtctattgccaggagctaggaaggctggcagggtgtgtgaagagcgtctggtacctgcagtgaacatttttcctgcaccagagatcaccaccgcccgacagtcagcgtctctcgaaatcttgttgaagcactctaccatctctctgtgaagcaacgagtgaagggttacaaatggggcgggaataccctgccctcatgtccatcttcccacaacgttccactttcacccagtcccgcagccccgcctccccccgcaggcaggcctccaggatctgcaggtcagacctccagaagaccttgttcatggcattcctcttgttgggccggttgagctggacatgcagaacatgtttctgcgcagacgtcacacgaagggactcatagctgtggtctggggcttcaccgagggctactccggaagcctcctcttgtgcagaggagccagtgaggcgaaggctaatactgagtcccgggtagttggagcctgtcagtcctggggagaaaggaacagcctttgatgaccccagactgcaagacacaggcctatcgaattagggagtccttcaaaagggagcacacgcacccctgaatttaggggactcgggcccttcgtgaccccggatagccctccccgtcctacatctgctataacagcacgacagcgcgacgcacccccataaggcaagaggtgactcacgccgggtcagtaggtcgcggagtctgcgagaagccactatccccgccgccatcgccgccgccttcgtctactgcgttcggacggagtaacgtgcccgttagcggagggggcgggcacagaaggccgccatgttgagcgagggcaccgatgccgcaacctgacaggcaatgacgccgttctttccgccatctttactaagggcagtcgatttccggttgccttacatagagccaggctcagaaatggaccctttgccccagtgggaacctggccaaagaaaatagctcctgcaatggcgtgaacctgggaggcggagtttgcagtgagccgagatcgcgccattgctctccagcctggcgaccgagcgacactccgtcttaaaaaaaacaaaacaaacaaacaaaaaaaaaaacagaaaagcaaacagctcccgctaaagttcatcacacagctgtttcataatggtggaataataggcgacagctgaaatgtccaaggacataattgcagcagagcttgtaatcatgcatgtatatatcatgttaactaaaaataaaagaaaacttgcagtactgtgagtttactcaggtaaaggaatgagtacagacgggccaacattaagcgctgactgtataatatgaactcccaccaggaggtcgtactatttcctactatatgcagaggaaactggcccaggcacgggaagacactaggttcaaggtcggtgggcttcagaagggctaaagcaggattacctggcaccagagttcatgttcttagcctggcgcagtggctcacgcctgtaatacaagcactttgggaggccgaggcaggcggatcacctgaggtcaggagttcaacagcagcctggtcaacatggcgaaaccccgtctctactaaaaatacaaaaattagccgggtgcggtgtccggcacctgtaatcctagcgggaagagaatggcttgagcccaggaggcggaggttgcaatgagcagagatggcaccactgtaccccagcctgggcgacagagcaagatctcaaaaaaaaaaaaaagaagaaaaaaaagttcatgttcttaaaaaaaacaaacaaaacaaaaaaaccgaaattcccttgggaaaagccagctaccaaaaggcataaaaagtactgtaaaactgctggccgggcgcggtggctcacgcctgtaatcccagcactttgggaggccgtggcgggcagatcacgaggtcaggagatcgacctcctgacctagctaacacagtgaaaccccgtccctactaaaaaaatacaaaaacttagcgggcatggtggcgggcgtctgtagccccagctactggggaggctgaggctggagaatggcgtgaaccccggaggcggagctcgcagggagccgagatggcgccactgcactccagcctggggacagagcgaaactccatctcaaaaaaataaaaaaaaaaagtactgtaaaactgcttaagtatgctttttggggagacattgagcaaggcggtgaacagatgtctctgggccagtgagattgaaggaagtatctttccttaatgaacctgtctcctgtgtgttttcacagactagaaaagcaggctcttttgaaagacagaaccattaactacccatcaacagtagactgtttataccatagaaaactctgaaacctctatgcaaaaataaaaatgtgtgagaaaaaaatgtgaagatgtaatagaacatttagtatgatcctttgttcctttggtgtaagaaagtatagctgggctgggtgcggtggctcaggtctgtaatcccagcactttaggaggcccaggcaggcagatcacctcaggtcaggagtttgagaccagcatggccaacatggtgaaacccaatctctattaaaaatataaaaattagccaggcgtgttggctcatgcctctaatcccagcactttgggaggccaaggcgggtggatcacaaggtgagaagatcgagaccatcctggctaacacggtgaaaccccatctctactaaaaataccaaaaattagccgggcgtggtggcgggcgcctgtagtcccagctattcgggaggctgaggcaggagaatggcgtgaacccaggaggcggagcttgcact

SEQ ID NO: 1560284 - DNA, 4001 bp, Homo sapiens
ttagccaggtgtggtggcaggcacctgtaatcccagctattcgggagcctgaggcaggagaatcacttgaacctgggaggtggaggttgcaatgagccaagattgtgccactgcaccccagtctgggcgacagagcgagattccatcgctaaataaataaataaatcaactaaaattagtgatttctgcctaaaatcgctaacggcatatcacacttaaaatcagagactgggcacactggctcatgcctgtaatcccaacactttgggagaccaaggtaggaggatcacttgagcccagggattcaagaccagcctgggcaacatagagagaccccatctctacaaaaaaattaagaattatccaggcatggtggtgaatgcctgtcatctcaggtactcaggagactgaggctggaggatcctttaaggtcagtagttagaggttgcagtgaaccatgactgcacttgtgaatagccactgcactctagcctgggcaacatactgagatcctgtctctaaaaataaataaatagccagggagcagtggctcatgcctataatcctagtgctttggaagtccaagtggggaggatcgcttgagcccaggagttcaagaccagcctggacaacatagcaggacacgatctttacaaaaattattttaaaaaattagctggacctggtggtgtgcacctgtagttccagctactgggaaagctgaggcaggagaatcacttgagccatggagtttgaggctgcagtgagctatggagtgcactgcaccactgcactccaggcttgacgaacaagtgagatcctgtctctaaaaaataaaaataaataaataaaatcagatagggtctacccctctaaactcaactcctaccactggcagcttcagctacactgtttctgaaagaaactaagtttatcccatctcagaacctttgtacttgcttttctctctgtctagagctttcttcctccagatctgcccacagctgtctctggtcatttcaatgaaaggtcttctttgaccatctcccattccccacattctaaaagccctcatcaccctattaatttttgtttcggagacagggtcctgctctgttgcccaggctggggtgcagtggcacaatcacggctcactacagcctcaacctcctgggctcaagcaatcctcccacctcagcttcccgagtagctaggactacaggcgtgcaccactacgcccagataattttttgtagagaacagggtcttgctatgttgccaaggctggtctcgaaactcctgggctcaagcgaaattcccgacaccattaacgcatttttagtaacttatcagtatctgaaatcacctgtttcgtttatttctaatttgttcaaagtctggttcccccaggagatgagagatttttatctatcttcctcattgctgtgtctccagcaccaaggacagtgcctggtatatgacagatgcctaacgagtaacaactgaacggaaacaagcctcaatttcaaaaaaacacctataaatctgaaccccgaggtatggtgtacgtacaacagctttgaaaccggctgccaggattctgggtctcttgggggaaaaaggcagacgcggattccaaatcctgcccggttgccgacttgcggcgtgacctctcgcgaggtcatctgcaaaatgggagactgggggcgtgaggcggctggcacaagacaggcggcctttcccagcgcgtccccgcccccactacgaaaggtcatggcgccctggccctgcagctgggtccctccagggctgccctctcgcgctgccgggtcctgaagggcccgcctgcagcccagcagttcgcgttcgcctacccgcgcgcgacctacctactcacgcggccagccgcggactccaggccagctctgtcttgttgctgggcgctgccatattggcccagagagcgtccgggtcagggagctccagggaggtagcaaatcaagaaagctggtgtaataggtcccgcccacaacgcgaggtgggccaataggaaggcggaaggatctgggacccgcctcataacgagccaggcccagcctctaatgaggcaagacgcactccagacctgggaaccttgaaatggcccgggaggctggacttgggagtcatagtctatgaatccagtcgcaggccccagcggctgaaatgagaaaatgaattaaaaaaaaacaaaaagtgaaagggggccggtacggtggctcatgcctgtaatcccagcactttgggaggccagaagttcgagaccagcctgggcaacatagcgagacccccttatctacaaaaaatttaaaaattaactgggcatgatggcgcatgctcatagtcccagctattcgggaggctgaaacgggaggatcgcttgagccctggaggtcgaggctacagcgagccatgattgcacccctgcactccagcctgggcaacagagtgagaccctgtttctaaaaatagtaataataaataaatagggcagggcgcggtggctcacgcctgtaatcccaacactttgggaggccgaggcctgcggatcacctgaggtcaggagttcgagaccagcctggccaacatgatgaaaccccgtctctactaaaaatacaaagttagcagggcatggtggtgggtgcctgtaatcccagcttctcgggaggttgaggcaggagaatcgcttgaacccgggagacggaggttgcagtgagccaggataacaccactgcactccagcctcagcaacagagcgagactctgtctcaaaaaataaataaataaataaaaattagtggggcgtggtggcgtgctcctgtgatcccagctactcgggaggctgaggcacgagaattgcttgaacccaggaggtggaggttgcagcgagccgatatagcaccactgcactccagcctgggcgacagagtgagactccgtctcagtaaataaataaataggaaggcctcagtgaggtgtcctttgagtaaaggccggaggaagtgagtgagccatctggatatctggggaacgcttttggcactgggaacaacagcaaagactctgtgtggtcggagtggagtctttggaggaaatgggataaaacgaggtgagattgagtaatgggggctcctggtctcccccagaaagcaccagatttaggctgttaataactaaggtggataagcacataaaatgggctattggcaataacagtgtcccccgggaaggaaggctatctgccctcataagcccatttctgcagtccctcagcctctgtggcgcagtgagctggcatggagactaggatgcaagaacctacccttaggatgcctcaaggactctgcgcagccgcaggacatccacctcatcagaactcttgtgattgggcaatctgagaaaacctgtagccaatcagctgcttggctggagcactcctctctggcaagttgacaggcacgtgggcagcggctgggagcgctactgccctctgccaggctcccgcagctacaagcaagcagagtcagctctgcttagctggggagtgggtaagatgatggggtcgctgacctggctgtggccttcagagttattggtgtccttctcttgaggtggtcatggcttttgttttcttatttatccttccagaactagtcttttaatattttattttattttattttattttatttttggagacggagtctggctctgtcgcccaggttgcagtgcagtggtgcaatctcagctaattgcaacctccgcttcccacattcaagcaattctcctgcctcagcctcccgagtagctgggactacaggcgcatgccaccatacccggctaatttttgtatttttagtagagatggagtttcaccatgttgcctaggctggtctccaactcctgggctcaagcagtcctcccgcttcagcctcccaaagtgtcagaattacaggcattag

SEQ ID NO: 1560285 - DNA, 4001 bp, Homo sapiens
tgtgccaccacacccagctaattttttgtattttagtagagatggggtttcatcatgttgctcagggtggtctcgaactcctgagttcaagcaatccacccatcttggcctcccaaagtgctaggattacaggtgtgagccaccacacccagccagagggagcttttaaactaaaattaggccaggcgctgtggctcacgcctgtaatcccagcactttgggaggctgaagcaggtggatcacaaggtcagttcaagaccagcctggccgagatggtgaaagcccgtctgtactaaaaatacaaaaattagccaggtgtggtggcaggcacctgtaatcccagctattcgggagcctgaggcaggagaatcacttgaacctgggaggtggaggttgcaatgagccaagattgtgccactgcaccccagtctgggcgacagagcgagattccatcgctaaataaataaataaatcaactaaaattagtgatttctgcctaaaatcgctaacggcatatcacacttaaaatcagagactgggcacactggctcatgcctgtaatcccaacactttgggagaccaaggtaggaggatcacttgagcccagggattcaagaccagcctgggcaacatagagagaccccatctctacaaaaaaattaagaattatccaggcatggtggtgaatgcctgtcatctcaggtactcaggagactgaggctggaggatcctttaaggtcagtagttagaggttgcagtgaaccatgactgcacttgtgaatagccactgcactctagcctgggcaacatactgagatcctgtctctaaaaataaataaatagccagggagcagtggctcatgcctataatcctagtgctttggaagtccaagtggggaggatcgcttgagcccaggagttcaagaccagcctggacaacatagcaggacacgatctttacaaaaattattttaaaaaattagctggacctggtggtgtgcacctgtagttccagctactgggaaagctgaggcaggagaatcacttgagccatggagtttgaggctgcagtgagctatggagtgcactgcaccactgcactccaggcttgacgaacaagtgagatcctgtctctaaaaaataaaaataaataaataaaatcagatagggtctacccctctaaactcaactcctaccactggcagcttcagctacactgtttctgaaagaaactaagtttatcccatctcagaacctttgtacttgcttttctctctgtctagagctttcttcctccagatctgcccacagctgtctctggtcatttcaatgaaaggtcttctttgaccatctcccattccccacattctaaaagccctcatcaccctattaatttttgtttcggagacagggtcctgctctgttgcccaggctggggtgcagtggcacaatcacggctcactacagcctcaacctcctgggctcaagcaatcctcccacctcagcttcccgagtagctaggactacaggcgtgcaccactacgcccagataattttttgtagagaacagggtcttgctatgttgccaaggctggtctcgaaactcctgggctcaagcgaaattcccgacaccattaacgcatttttagtaacttatcagtatctgaaatcacctgtttcgtttatttctaatttgttcaaagtctggttcccccaggagatgagagatttttatctatcttcctcattgctgtgtctccagcaccaaggacagtgcctggtatatgacagatgcctaacgagtaacaactgaacggaaacaagcctcaatttcaaaaaaacacctataaatctgaaccccgaggtatggtgtacgtacaacagctttgaaaccggctgccaggattctgggtctcttgggggaaaaaggcagacgcggattccaaatcctgcccggttgccgacttgcggcgtgacctctcgcgaggtcatctgcaaaatgggagactgggggcgtgaggcggctggcacaagacaggcggcctttcccagcgcgtccccgcccccactacgaaaggtcatggcgccctggccctgcagctgggtccctccagggctgccctctcgcgctgccgggtcctgaagggcccgcctgcagcccagcagttcgcgttcgcctacccgcgcgcgacctacctactcacgcggccagccgcggactccaggccagctctgtcttgttgctgggcgctgccatattggcccagagagcgtccgggtcagggagctccagggaggtagcaaatcaagaaagctggtgtaataggtcccgcccacaacgcgaggtgggccaataggaaggcggaaggatctgggacccgcctcataacgagccaggcccagcctctaatgaggcaagacgcactccagacctgggaaccttgaaatggcccgggaggctggacttgggagtcatagtctatgaatccagtcgcaggccccagcggctgaaatgagaaaatgaattaaaaaaaaacaaaaagtgaaagggggccggtacggtggctcatgcctgtaatcccagcactttgggaggccagaagttcgagaccagcctgggcaacatagcgagacccccttatctacaaaaaatttaaaaattaactgggcatgatggcgcatgctcatagtcccagctattcgggaggctgaaacgggaggatcgcttgagccctggaggtcgaggctacagcgagccatgattgcacccctgcactccagcctgggcaacagagtgagaccctgtttctaaaaatagtaataataaataaatagggcagggcgcggtggctcacgcctgtaatcccaacactttgggaggccgaggcctgcggatcacctgaggtcaggagttcgagaccagcctggccaacatgatgaaaccccgtctctactaaaaatacaaagttagcagggcatggtggtgggtgcctgtaatcccagcttctcgggaggttgaggcaggagaatcgcttgaacccgggagacggaggttgcagtgagccaggataacaccactgcactccagcctcagcaacagagcgagactctgtctcaaaaaataaataaataaataaaaattagtggggcgtggtggcgtgctcctgtgatcccagctactcgggaggctgaggcacgagaattgcttgaacccaggaggtggaggttgcagcgagccgatatagcaccactgcactccagcctgggcgacagagtgagactccgtctcagtaaataaataaataggaaggcctcagtgaggtgtcctttgagtaaaggccggaggaagtgagtgagccatctggatatctggggaacgcttttggcactgggaacaacagcaaagactctgtgtggtcggagtggagtctttggaggaaatgggataaaacgaggtgagattgagtaatgggggctcctggtctcccccagaaagcaccagatttaggctgttaataactaaggtggataagcacataaaatgggctattggcaataacagtgtcccccgggaaggaaggctatctgccctcataagcccatttctgcagtccctcagcctctgtggcgcagtgagctggcatggagactaggatgcaagaacctacccttaggatgcctcaaggactctgcgcagccgcaggacatccacctcatcagaactcttgtgattgggcaatctgagaaaacctgtagccaatcagctgcttggctggagcactcctctctggcaagttgacaggcacgtgggcagcggctgggagcgctactgccctctgccaggctcccgcagctacaagcaagcagagtcagctctgcttagctggggagtgggtaagatgatggggtcgctgacctggctgtggccttcagagttattggtgtccttctcttgaggtggtcatggcttttgttttcttatttatccttccagaactagt

SEQ ID NO: 1560286 - DNA, 4001 bp, Homo sapiens
atgacagggaactcctggtaccagccccatagccagatcctcagagccctcctgaccagacatcctgccccaccgacttggtcccaagattcatcacacctgactcaaagtagcaactaaaagacccagcaggacggcaaaagcctccagagactccgaccctcccctcctcacttctgcccctgctccaggggaaatgaagagccttagccagagtccctcaccaatgtaccaacccaggacaaaaagcagttggggtcaccgtactctgcgctccccctactcatatcggggccagaaactgacatggaatgaacatcatccagtgcaacacaggagcttcccagcgtcccaagcactagaacaccctcccctcccaggtgtgacagccaaacctctccagatattgtaggagtgggggcaagtcccccagggagggagaaccacggagttaagccccctcctcaagaaaaccttccagctcgcagtaccccgaatccctgtgcctctccatcctgtctcgctggactgaacctcactcattctcccatgaattaagaaaccaggggaaagagacgttgccaagtctctccccgcgcaccctggcccagtggcctccagctgccaggccagcacctccctgcctgggtacagagggcacagggagctcacgttgacttgatggtgatgcaacgctcctgctcgtccttccgggtatcagtgaagcgtgtctccccggcccgggccgaggcgatgatgcccgccttgcacaccagggagtctgtcagcgtggacttgccatggtccacgtgggcgatgacagacatgttgcggatgttggccttcttgtccatgatggcgcggatctggtctaccgtgaagttcacctgggcaagacaaggaggctcagaccagctcgtgatttccaggaacacagcatggcacggagcgttcagtccaaacgaaccagcatgcccaaggccaggagggggttggtgctggggtgccccaagcccaccgaatcttgccagcctaacaccccttaagagccaccccgcaatctccaaggaaccaccgttaataggtgtcattcatgattgacaacccagaaataaaagtgctcaggaataaaactgagtgtcaacagatttccttgataccaggtacaaatactaaagtctcatttggggccaaacacgtaagggatgaatcctctcctaaagccccctccacgttgtcaccgggccacccaaacttccccgagcaagaagcttcatcataaaatgcaaggtcaccccttggcaaacgggatcagacaaggccacccaccccaggaaataacggggagccggaacggccctaactgccacaagcctacacctcgtgtctcaataagagtctttgtacatctgggagtcataggaaggacaagtgcctaaggtcgacgattaacagcatcaggagaaggtatttggaaggaaaaggggagcctttcaggtgtcgctttgctcgttctgccattccctgccgcccctagtcccccggcagaaaatcgatctcaaactcgcggcccgcgggttacataaggcgcctccctgtctccccgcttccaccgcggtgcccgccattactacgcctgccacatcatcattccccacccccatccccgctaacaacccagctccaaccaggtctgggcaaggttatggcgccctcggaaacggagaaagggctcggtgaacagcgcggcgcacagacatggcggcggccgcttccccagccccgggtcctccggccccgccgccgctacgtctcctcctggcacggggggccccagcgtcccaggctaggcagcgtaggccccgcggaggccccgccgccgctccggggcaccagcgaggcagggttactcaccatggtggcggatggcggtggattctcccaggtagaaccgaaagaagcgagtcgcgccgaggatggcggcgacgacggcggaagagaacgctgacgtcaacactcagctttttataggcggacgccggttgggcgggtcatgtgactgcgctgcgaaggcggggcgaagggacgccgcgcaagcgcacggaggcgtgtccccccgcccgttaacccattcggcgccggcgcggcgctctagaatagaagctgggcatctcgggggcggtggtcgccctcggtgtgcagtgttcaggtgcacaaagtaaagagcgccgttttagctgagaacgagaaccatagcaacgatattagcttacaagttgtccagtacttctattaaaaccaatttacaaggtgaatagagtctgtggattatacccaagtcaatttccctgtttggacattgttacgtaagacgatacccctgggagaagccgagggaaaaaggacactcgcgaccactatactgtttttgcaactccttacctgtaattatttctaaataaaaactttataagaagcaggcatcggaatcactgatcccacaaatgcatactgagcatctatacaccaggcattgttaggggttttgtagatatagcagtggaccaaacaccttgctagcttgaccacactgcgtgttcttctaccagctactaggatttctctgtgcctcaatttcacctgctcggaggtgatcaataccaccctattgtttgggggagagtgaaacgaactaaagacatctaaaagaattaggaccgtgcctgatacccaacgctcaataaacgctatctattttaattagctaagattgctattaataaaacagttatttatttcaggactggtttgccatgtcccaggcacccggctaagcggtttactggcacaatttcattttctatttcatttcctctccagggggaggcgcaggaagactgtttagcatttgtgtcctaatctgaccctaagaaacagttgaatgtatttcatatctcatgaattggcattcaattgtgtaactctatcccttatgaaaagcccaacccgctgtttagcacatagtaggtactcagcatttcttgcatgaatgatgttctcacagtgcaaatgaaccccctgcggtacatctttccttaaactcactttgtgaaacaggagagccactgcagtgcttttcctgggctgggagagggggaggtgtggatccacaaaaagcaatgcaaattccagcctggactctaaaataaacctgtacactcctccccctcacgaatgcttcgggcactttgctttacaaagcgctgtctcaaccttgggtttcatttaacggatgattgctcttcctatcaccatttaacccagtggaaaactgaaaagtatcttccgaaaggattgaggctctgaaaggcagagggcgcggcagggagcagatgggagcgcccggggtccctaaccacctacacctgtacctgtgacgcgtttagttaagttgcaagtcaagcgcatgcgccatttggggcatgagtttttagcagaggggtagtcagtttcgcattattaataataaaattcttcaaaatttttaaatgcactgagcacctgctacgtgttgcgtttcctattgggggcttcgcagccgttttttccgtgcaaagtgggagcatttcagagatgtaatggaaaggttttcattaaaagaggtgtcaggcgagaggcggaggttgcagttagccgagatcgcgccactgctctccagcctggcgacagagcgagattccgtctcaaaaaaatttttaaaaattttaaaaattaaagaggggttaggctgcttgcggtggatcacgcctgtaatcccagcactttgggaggccgaggcaggcaaatcacctgaagtcaggagttcgagaccagcctacccaatatggagaaaccccgtctttactaaaaataaaaaaattagcccggcgtggtagtgaacgcctgaaatcccagctactttggaggctgaggcaggagaaccgcttgaacccgagaggcag

SEQ ID NO: 1560287 - DNA, 4001 bp, Homo sapiens
cccagcaaccctggataccgcaggcaggagaggaaggaggaggcagcctcggtgctgcccaggtcggctctgcggaccagcaaggccgttccctcaggcagcggtttgagctgggcaaccaggtcagacccggagcaacaggaggtggctgggccaagccaggcactggggaggccacttccttcccctggccgggggtccggcccgcagcccacagccctgtggcaggtggggcagcaggacggccctggtgaccaccttcctcccccggttgccgggtcctcgtgtgtttggcgtttgctagaacaaaggacaggccacgctggggacgggagattccgcagctgaaaccaaaaacttgggccggggaagcgctgcccgctggactccccgcacggccagcgacagccttaatcaaacccacatgtgaccagcacagcgggcggctcggggacccgctctgaggtgggccagccgtcccccagcggcccggggtccctgccctcagcccccagggcccgacccgaggccgttgaccagggtggggggtgggcctgtgcgtgttccccacccccacggcggaacacgggccgcccttgtccccgagcccgcctcaaagagaccccttcatgcaactttcctcccggggaccgaggacagcaggagacagaggggacaaggaggggtggcgggctccagagggcggctcggtcggcacaggaagcggctggaaaacggagagaaagtgaccagtagcagaagagtgggggggggccgcctcagcccccgatgtgcagctccgtgtgccttaggaagacggtgacaccctgagtgctggggctgactccctcccgagccccaggacccccaaagccccggctcccacgggacccccagggaagctgcagcctgctcctgtcttggagaccctgggatggttcagagggttctacccacgtccaggccatggccaggccccggcaaactttttttgctctgaccaacgggggcttctcctgtcccccacgttgtgcctggcccggacctggttcaaaacaagggggcctgcagcaggcgggtgcggcatctcggccgggcgtggcaggcagggcactgggccacctgggtcctgcccccaagtcccccccttgcatgaccttgagccagctcctcatcccctctgcacctcagtttcctggtcagcgcccagaggacaagagaggactccatcccactgcccctcccggggctgacccccagctccccggcccctcagtctcctttcaaagctgggcccttggccccctggagtgaagcagatgctgggtcctgagggagggacactccaacttccccaagttcatctggggacctgcgggcaggacgaacccagagatccctcgagggccacagtcccccacctccggtgccaaggtccccggggatccccaccaaatgcgaaaccgagggggctccccagagaagcgggtggatcaggggtccccccaagtccaggcaggcaactcaggggctacccggcatcggagggtaccagaggggttccccaaactccaggagacgtcggcgctctgggggatgtggggcgcgagtccccacagtccgtagggcaatggggcgccccggggaaggcaggcgcgaaaagggcgagtcccccaaactccggggggccggagctccctggggggctcccgcgggaaccgggcgcccgcatcccggcggcggcgcgcgcgtggggggcgcccggagctccgggggcgcgaggccgggcgcggcttggggggcgttggggggtccccgggcgccccccgcgcgcggccgcgctcacctggggttgctgcggttccagtagacggcgtagcggtccgagttggcgcgggcggcgtcctcggcgcgcgcgaagggcggcggcggcagcggtaacagcaggagcagcagcgggagcagcgggcgctgcgcgggcgccatggccccggtccggccgccgcgctcgctctcccggccgccgcctgccagccttctccgcctcctccgccgccgccgccgccgccgagcgggcgggcggagggcgggcgggaggagggcgcggcggcgcttggagatcccgggccgcccccgcctccgcgcgcgcgacctcgggcgccgagaagtcaggcggcggcggggcggggcgccggggtcgccccgggcgcaggacccggccgcgcggactgtcggagcgcgggccgccgccgccgcacccgccggggaggggcccgggctccggcctttgtcccgcccgagcgtcgggagggccgcgggcgccccctcccgccgtgccccggccgcgcggggactgggcgggggtctccagcctgcgcccgccccctgccccggcccaccccgtctcaggctcgtcccccggggcctgcccccagcgaccccgattctgcgcgccccccgccggcatccgcgtggcccggcctggggtctccgaggggcgggggcgcaccctgcctcccgcgcccccacgcgctccacccggcccggccctgggtcccgggcctctcacctgcccggttccagcgctatccgcagcctcaccaaccccgacgcacgcgtcccaaatcgggctcggccaactccagtctccctgcgggggccggggcagagtttcagaggggcgctggccaaagtccaaagctgctcgggctgcgacctccctggggccctcctgggagtcgcctctccggacccacgctgttccctggggatggagtaagtccctacacctcagccctaagggtgccgggagcatagtaggtggaccgatgtggagtgtgagcagctggggatgggatccaagaagcccagagtgaagccccggccgacagcaaatcagtctccacgcacgaatcctgcaggcaggggagggccgctgcccgggggcacagcttgtgcaaagacccggggtctgatctgttcagggaacgccgagtgatttctcctcctggtaggctgacacaggtggggaactgggggcctggcctctgctttgtcttttttccaatctatagagacagtgtctggccatgttggccacgctggtcttgaactcctgggctcaggcgatcttcccacctgggcttcccaaagtgctaggattacaggcgtgagccactgcacctggcctgccctctgtttttgcccttattcatgccacagcctccctcaccagactctgagcttgtggagggtaggctgtcatcaaacgctggctggactttgctggcgatgcccagatcgtgttgtacgtctctgaattagtgtcattcaccaggcccagtgcaggagagggaactgcagggcaagcaccaacagcccttggacccgaaggtccctgtgtgaggcattacccaaactcctggcagggaccgtgaacccagagatgggcaagctaacctgtgccccagcaaggtggggtggggaccggacccaccaccgtcccacagctctgagacgtggtgggctctgtcctgtgtctcctgcgtgccctcctcccccgattccccagcgggccacgcgggccacaccacctgacctttgttcaggctgggtcctgctgggaagtccttccactttttcttcctgttaaaatcttgctcttccagaaaggtctgtcccacccagtgctctagcgtccctgccaggacaaggttctcagttctctctcctccagggagctcagcccgtctgttctgagctccaggtctcatcccctgaccccactacagacgtcccaggtcgaaggcccagggctggccgggtgtctcttcagtggagggcgtgaacctgtcccaggtggtggctgaggcaggccctctggacaggctctctcagcacccctggagtgagggccttgggttctagccacacaaggctctgtagcccagacaggctggagaagcttcccgggcggctccgtctggtggggggctctttta

SEQ ID NO: 1560288 - DNA, 4001 bp, Homo sapiens
ccacctagccttaccttggtgcgcccgttgatgacatagctgcccagccgccctgcgcagtggcggatgacggcgtccacatgggccatgagggcaccaatgcttcgacagcctggttcatggccttccacccaggcaatctggtccccacggatgctgcgcggcgggatcgccctctggctcactagctgcccgtctcgcaggcgcccaccccgtttgagggcctccacctcggccagcacgcgaccgcccagtgctgcccccaggaagctgtccttgacgcagatgccgtagtaccgcatgcagggcacgatatagtccagggccaggcgctcgggcgcagagggcagcgcctcctccatcagcccagcactggcctcaccactgccactgctgcagctgcagctcatgccaccctcccgctctgcctcctggttctcttgcctggcccagggccgtttgctgggtgaaggggcatccccaccatcctcggcccatttccgtttgggggcctcaggccgtgcgccctgggctgccaatcgctggcaccccttggtgaccagcgctgcagcgccttcactctgcagcggccgcagctcaccaccatcctgcccgccaaaaccgtcccgaagagggctggcagtggtagaggtggctgtggctctgggggtcccactccctgccgaggcctcactaggcactcctggacagtggtaggaggggagcaggggacagggcaggtaactctccactcccatcctggcccggccaggctcaggctccaagggctctgacgaagaccctggtaactgagggagagcctgacttaggggctgcggctggcacgggctgtccatggcagcagtgtcttcatcccccgggcatggagggcaccgcccgggcccatggtgccaccctcctccgcctcctcctccgcctccacttgatgcagctgggggccaccgggcctggcgtggggcagggtgaggcagggcagacagcaagagctcttctcgtgccctgggggttgcttgctggtccccaagtcctctgcggtccctaagggcttgggaagggacccttcagggtggctagagaaaggaaaaaaaaaaagggatgtgagagaaactagagacaggcaggcaggggaaagccgggatggtatgggcaggagtggggaagacgaccaggacagacttgactatagaggccccccaaaacctgaggccaagtcggggagaggaccctgagaatctggaggtgcgggagtccgctgacagataagaggcagtgatagggagaggctggaggccaggggctgggtagatgaccctaagacagaggactgtggtgcaggttgtgggacgcggtaaccaaagacagaagaaggagggctggagtagaaaagggtggtgtggaggagtgggaaaggagggggtttggaaaataggagggacctgcctcggcgttccagaaagacaacgagaaacgtgggggttccagggagagtcagggtgggggcgggggggtcaaaagacagaggaaactggggagtccaaaaacaaagagaacgaggggcccagagacagaaaaatagaccggagggaagctgggagggaggacccggggcggagcgggacggtggggtcgacccgagcccgacgggaggaagccggccgggggcggacacacgcccagacggaagggaggtcccgagactgaccgacgggaggggccctcggggagagggtccgcggcgacagaggaaaggacggaggagggtgcacgcacccggagacaggacgagagataaaggtgcccccatccagggcaccccaacgcccccaacccggggcaggccctgaggccccttctgagcgcagtaggcgacaggggcagggcctaagggccgctcggaccccctcccctccccctccactcggcctccgcccggcgcgcgctccccgcccccaccccaacccccacaacggccggcacccaacgtaaccggcgcgcgtcccctcccccgcgccgcacccacatcccccttcccggggtcgccccggcaggccccggcgcgcgcccccacaccccgcccggttcgcgccggcgccccggctccggcttagtctcctcccgctcccttctcgccccgcgacctcctcaccgagctttttcctccggccccggcgccgccgtttgtgccagccgccctgcgccgcacagcgcgccataccccgcccccaccgcgcgcgacgccccgccccgcctcgcccggtgggcacgtgaccgcgccccgcggaggggacggcgcctgcgcaggcccgagccgcgcggggcggggcggagcggggcgaggaagttcgggacaacccccctaccaaggagaaaggaaacagcggtccgtggcctacacgaggttcatttgcatcctccgccccgccccctttgcgcgggagggggaacgcagtgtgaggggccgggtctgggagggggcgtttcttgcatgttggaatcaagtggcgtcggcggggcggggcacgcaaatgatgtgatttacatggacaggcctacccgccccccgcccagcgcggggcaccgagttcggcagcgcggtgcgcgtgacttcatttacatggtcagctcctcctccttctcgccgtccaggaacggaggtgagagacggagaaatggctacgcagttagttgagaaatgtatgtaaattcgcacgtcagtaatttacataagtatcttttataacggaggcaaaaaagtgcgggttgcccttgagaaaagggaacgcggactagaagggatgtgcaaatgtgtattttcaagacccgctccggcctgccccctcgggacgattgtgggaatcagaataaagaaccagggaaagtctgggcaacggagtgagaccttatctttacacaaaattaaaaaatgaaacaaaaaaaaatccacggaacgctacacagagaagacatttgcatggccagctgggaacactttaggagactaaggagataaggtcattttgaatgccctgcccgctccaccattgctctggagagctgggactcaaggctcccgccgggtcggtgaaggccgacgtggagatgggagggcgacgagcaactgggagtgtcctcggggctgcaccagtcccctgcaggccacctgagggcgtagggcggttcgcgtgagcacaagggcatgcatactggtatccacacatgcgtgaggattgcacaaaagcccgcagtcctcagggcacacacagggttcatggccacacaagggtgtttctagtttagttttgtttttgagatggggtcttacccttttgcccaggctgaagtgctgtggcatgatcatagttcactgcaggcccaacctcccaactaaagtgatcctcacacctcagcctccggaatagctgggacttcaggtgtgtaccacgacacctggctaactttttctgttttttatttttgtagatagggtctctctgtgttgcccaggctatagtctccaactcctgggctcaagtgatccatctgccttggcctcccgaagtgctgggattacaggcatgagccaccacgcctggccacacatgggtgtttaaaaggagccaaattcacaccaaaacacacacagacctcggggtacacatgcacaggcacacacgcagtagtgagtcactgcctctgactctcaggcatcagacatgcacacaccggaggcccacctataggtccaaattcccatcccctggccttgatgtcccaaacaataccagcctcaccaatacaatgaccaaggccacagagcagttacggctgtcagcatcacacacaaccagcacacattatatcctatagacatcatcccatatgcaggtactggaaacatgtacacatgtcacaaacacagggacatcagcgtgtttacacacgtgagcttagaacacagattgtcacaaactgtccacaca

SEQ ID NO: 1560289 - DNA, 4001 bp, Homo sapiens
tgccgtagtaccgcatgcagggcacgatatagtccagggccaggcgctcgggcgcagagggcagcgcctcctccatcagcccagcactggcctcaccactgccactgctgcagctgcagctcatgccaccctcccgctctgcctcctggttctcttgcctggcccagggccgtttgctgggtgaaggggcatccccaccatcctcggcccatttccgtttgggggcctcaggccgtgcgccctgggctgccaatcgctggcaccccttggtgaccagcgctgcagcgccttcactctgcagcggccgcagctcaccaccatcctgcccgccaaaaccgtcccgaagagggctggcagtggtagaggtggctgtggctctgggggtcccactccctgccgaggcctcactaggcactcctggacagtggtaggaggggagcaggggacagggcaggtaactctccactcccatcctggcccggccaggctcaggctccaagggctctgacgaagaccctggtaactgagggagagcctgacttaggggctgcggctggcacgggctgtccatggcagcagtgtcttcatcccccgggcatggagggcaccgcccgggcccatggtgccaccctcctccgcctcctcctccgcctccacttgatgcagctgggggccaccgggcctggcgtggggcagggtgaggcagggcagacagcaagagctcttctcgtgccctgggggttgcttgctggtccccaagtcctctgcggtccctaagggcttgggaagggacccttcagggtggctagagaaaggaaaaaaaaaaagggatgtgagagaaactagagacaggcaggcaggggaaagccgggatggtatgggcaggagtggggaagacgaccaggacagacttgactatagaggccccccaaaacctgaggccaagtcggggagaggaccctgagaatctggaggtgcgggagtccgctgacagataagaggcagtgatagggagaggctggaggccaggggctgggtagatgaccctaagacagaggactgtggtgcaggttgtgggacgcggtaaccaaagacagaagaaggagggctggagtagaaaagggtggtgtggaggagtgggaaaggagggggtttggaaaataggagggacctgcctcggcgttccagaaagacaacgagaaacgtgggggttccagggagagtcagggtgggggcgggggggtcaaaagacagaggaaactggggagtccaaaaacaaagagaacgaggggcccagagacagaaaaatagaccggagggaagctgggagggaggacccggggcggagcgggacggtggggtcgacccgagcccgacgggaggaagccggccgggggcggacacacgcccagacggaagggaggtcccgagactgaccgacgggaggggccctcggggagagggtccgcggcgacagaggaaaggacggaggagggtgcacgcacccggagacaggacgagagataaaggtgcccccatccagggcaccccaacgcccccaacccggggcaggccctgaggccccttctgagcgcagtaggcgacaggggcagggcctaagggccgctcggaccccctcccctccccctccactcggcctccgcccggcgcgcgctccccgcccccaccccaacccccacaacggccggcacccaacgtaaccggcgcgcgtcccctcccccgcgccgcacccacatcccccttcccggggtcgccccggcaggccccggcgcgcgcccccacaccccgcccggttcgcgccggcgccccggctccggcttagtctcctcccgctcccttctcgccccgcgacctcctcaccgagctttttcctccggccccggcgccgccgtttgtgccagccgccctgcgccgcacagcgcgccataccccgcccccaccgcgcgcgacgccccgccccgcctcgcccggtgggcacgtgaccgcgccccgcggaggggacggcgcctgcgcaggcccgagccgcgcggggcggggcggagcggggcgaggaagttcgggacaacccccctaccaaggagaaaggaaacagcggtccgtggcctacacgaggttcatttgcatcctccgccccgccccctttgcgcgggagggggaacgcagtgtgaggggccgggtctgggagggggcgtttcttgcatgttggaatcaagtggcgtcggcggggcggggcacgcaaatgatgtgatttacatggacaggcctacccgccccccgcccagcgcggggcaccgagttcggcagcgcggtgcgcgtgacttcatttacatggtcagctcctcctccttctcgccgtccaggaacggaggtgagagacggagaaatggctacgcagttagttgagaaatgtatgtaaattcgcacgtcagtaatttacataagtatcttttataacggaggcaaaaaagtgcgggttgcccttgagaaaagggaacgcggactagaagggatgtgcaaatgtgtattttcaagacccgctccggcctgccccctcgggacgattgtgggaatcagaataaagaaccagggaaagtctgggcaacggagtgagaccttatctttacacaaaattaaaaaatgaaacaaaaaaaaatccacggaacgctacacagagaagacatttgcatggccagctgggaacactttaggagactaaggagataaggtcattttgaatgccctgcccgctccaccattgctctggagagctgggactcaaggctcccgccgggtcggtgaaggccgacgtggagatgggagggcgacgagcaactgggagtgtcctcggggctgcaccagtcccctgcaggccacctgagggcgtagggcggttcgcgtgagcacaagggcatgcatactggtatccacacatgcgtgaggattgcacaaaagcccgcagtcctcagggcacacacagggttcatggccacacaagggtgtttctagtttagttttgtttttgagatggggtcttacccttttgcccaggctgaagtgctgtggcatgatcatagttcactgcaggcccaacctcccaactaaagtgatcctcacacctcagcctccggaatagctgggacttcaggtgtgtaccacgacacctggctaactttttctgttttttatttttgtagatagggtctctctgtgttgcccaggctatagtctccaactcctgggctcaagtgatccatctgccttggcctcccgaagtgctgggattacaggcatgagccaccacgcctggccacacatgggtgtttaaaaggagccaaattcacaccaaaacacacacagacctcggggtacacatgcacaggcacacacgcagtagtgagtcactgcctctgactctcaggcatcagacatgcacacaccggaggcccacctataggtccaaattcccatcccctggccttgatgtcccaaacaataccagcctcaccaatacaatgaccaaggccacagagcagttacggctgtcagcatcacacacaaccagcacacattatatcctatagacatcatcccatatgcaggtactggaaacatgtacacatgtcacaaacacagggacatcagcgtgtttacacacgtgagcttagaacacagattgtcacaaactgtccacacagtaacaaattccctccctccgcaacaggcacctgagtcatcatgcttggtataccccacaccacgtccaatcaggaaacaaggcccccaaggccaggcccagtggctcacacctgtaattccagcactttgggaggccagcgcgggcgaatcacctgaggttgggagttcgagaccaaccttgaccaacatggagaaactccatctctactaaaaatacaaaattagccaagtgtggtggcacatgcctgtaatcccagctactcgggaggctgaggcaggagaat

SEQ ID NO: 1560290 - DNA, 4001 bp, Homo sapiens
atgtgaaaggtcctggtgtactgggagccatgaaacatctgggtaggtggccagacacaggggcacaaagaggaggggtgagaaatggagctgagaaggttgcctgggtgcacccaggtcatgagggctgttgggtgttaacaagaaaaataatgcaacatttatgatcactgcatgccaggtactgtactaactcacttaacatttataaccctgtaaagtaggtctattatcatccctgctttgctttgcttttctttctttttatttatttatttatttatttatttatttatttatttatttggagatggagtctcactctgtagcccaagctggagtgcagtgatacaatctcagctcactgcagccttcacctctggggctcaagggattctcctgcctcagcctcccaagtagttgggactagaggcatgcaccaccacacccagttaatttttttttgtatttttagtagagatgggtttcaccatgttgccctgggtggtctcgaactcctgagctcaggtgatccacccacctcagcctcccaaattgttgggattacaggtgtgtgccaccatgccggctcatctctgcttttttaacaaggcaaaggaggctcaggaagacagcaataaattacccaagatcacttagctggaaaatgctcaagctgggactcaaacacaggcagcctgacctcagaggttgcaatcctattataggtctaaagatctgagttagggaggttagccatgaccaacccaggagcaatgagcacctccagcacccagactgtgttctctatcttcccttactagccttttattcaccgtaggatctgtagtgatgtcccctctttcattcccgatatcagccacaggtgtgggtatttgctttttttaaaaaagaaaaacaaaaacgattgctccccgttgatgcttatgattttactgatcttttcaaagaatcaacttttggtgagatgggagtctctaaataccattccccactaaaagaacctgggactccttagagaaatggtggattccagggcgggggcagggaagaacaagtgagcctgggtcagaaggtgaggaagtgctcaaaggccgatagggcatgttacagggacagaggacccagcttgcaggggtgcccagtggccaaacatggggcaatttgagcatcaaaataactgcaaatcaaatatgctaaaatccataaaatcatgagacttaaaaggggtggccagggagtaggggagataaaagcaaaaggagttcgtaaaggagtggcaagaatggaaaagagaggcaggatctgggatgtgggcagagggagagggctctgggcggtgtcccaggcagggagggccctgagagagagctggggagaatgctatcagcggtggccgatggagctggtgaggcaggagaggggctcttgagtggctggagggaccaagttagctgatatggatgagggcgtggagggagaccctgcagagaggatctcttctagcccaggggatagggaggggtgttgggggaggatggaggagactgggggagtgtgagaggctgcgaaagactggaggaagagtgggaggaagagtgggaggagtgggaagagtgggggacatggttacagactggggggactggtgaagactgggggacacctggggagaccgttacagactggggacagggtggcagggagcaggggtcaggcatgaggaaccagggcaggcttgggcgggggtcgggaggcgacagctgcggtgctgggagcactcaccgacggggcgcgctggcggctgcagcgggctgggcaggctgggagagggtggggtcccgcgaggatccgaagcgcccgcggagcggcctgtgctcgcggtcccgtccggagccgtctgagccgggtggggcccggagcggggaggacgggagggaggacaggagggaggggcgggacgaggcgcccccctcaaaaccgggcgcccggcctctggcgcccccttgtggggagtggggaagacgccttagcacggcgggcgagagctccagcgtccagcctggggttcgaattccgcctccacctccagcgttgggctgctccccagtctgtctctcttcttaacacgggaatcacaacagcagcagcaataatagtaacaataacaggtcgggcgccctggctcacgcctgtaaccctaacactttggaaggccagggtgggaagattgcttgaggccaggagtccaagaccagcctggacaatatagcgagaccccatgtctattaaaaataataataaataataaaataatttagccaggcacaggggtgcacacctgtgatcccagcaacttggaaagctgaggtgggaggatagcttgaacccaggaggtcaaggctgcagtgagctatgattgtgccactgcactccagcctgggtgacagagcgagacctcacctctaaaaaaaataataggacggggcgcggtggctcacgcctgtaatcccagcactttgggaggccgaggcgggtggatcacttgaggtcaggagttcaagaccagcctggccaacatggtgcaaacccatctctactaaaaatacaaaaaaattagctgggcgtggtggcgggcgcctgtagtcccagctatttgggaagctgaggcaggagaatcacttaaacacaggggaggtggagcttgcagtgattgcgccactgcactccagcctggggacagagcaagactccatctcaaaaataaataaataaacaaaaattagctggatgcaggcacgcacctgtagtcctagctacttgggaggctgaggctcccaagttccagaatcactggaacccaggaggcagaggttgcagtgagccaagatcacgccactgcactccagcctgggtgacagagtgagaatccatcgcaaataaataagtaaatataatattaatattaaaacttaagggagttgatgaaacttctcagctgacaaccctccctggctctcctctctctcagagtaaaagccgaagtccacaccaaggcccacaaagcctagcatgatccacctacatctcccctgtcccccttcctcaggcggctccaaccgccgtggcctcctcaccattcctcagacacacccccaaccctccaagttcatggcctttgcacttgctgactcctctccatggagtactttccccatagggatctgaatgcctcactctctcccctccttcaggtccctgctcaaatgtcacctcctcagagaagtcctccaggatcaccctggctaaggtagaacccactctctacctcttatcactgccctatttttctccacagccctcccaaccactctgcatattccacatttctctgcctaagggactgtctttgccctgagaacatgagccccgtgagggctttgcacaatgcccaactccctgcaggggctcagtaaacatttgtagaaacaatccctaatgttgactgagccattcctatgtgcaggcaccgctctgagctctttgcatgcatgtattagctcatcgaaccctcatcatatctccaagaaacaggagttttggggttttggtttttgtttttgtttttgagacagtcttactctatcgcccaggctggagtgcagtggcacgatctcagctcactgcaacctccgcctcctgggttcaaactattctcctccctcaatctccccagtagctgggattacaggtgcatgccaccacacttggctaattttgttttgttttgtttttttgagtcagagtctcgctctgtcgcacaggctggagtgcagtggcacgatctcggctcactgcaagctccgcctcccgggttcacgccattctcctgccccagcctcccgagtagctgggattacggcgcccaccaccattcccggctaattttttgtatttttagtacagacagggtttcacca

SEQ ID NO: 1560291 - DNA, 4001 bp, Homo sapiens
gaaaaaatgatctattacagcatcaaatataagatgcacccacatttcagagatgttcaaatatgaagtgaattttgaattgaagcaatactatatttgtgcacatgccacatgatatacaagatgaactactctagcaattgtacaagatgaactactctagcaattttttattctgcccaaagaaagagatgggaaacaacctaaatgtccgtcaatatatccctggttaagtaaatttggacataacctcagaatggaataaaatgccactttaaaaaataatgaggaaatacagtggtttggaagggtcaacatatgttcttaatgagaaagcaatgtataaaccagtaaatataatatgccgacttctgtgaagaaataaaacaagtaaacccagatttatatgtgcctgtgtacacgtaaggaaactagaaggacggaaaggaaactgtggctattagaggtcatcgttggtactggatggaggaaaacaagaatggaaggcttttcgctgtatattttatatattttttggcttgtgaatagattttttaataccaaaaaaactttaaaaattaaaaattgaaagaaaaaagtccagaaatttgacgttcttgaaaacatgatttatcacataatatatacatttactttgcttgtcacttgaaatgcctaagaaaacacaaaatcaatcttaaactagaaacttctattgaatatgacatgaagagagcacatattccgacaatttcaagttcttttcatagccttccagtcctaataactcagcgttaacatcttattctgttcagcactatttgataatttctttcatcctcatgggctctagtattgatgtttcatcagtctcaattttataaaaccatcctttactttgtaataaagcaatgctgagagacattttccataatgcagggggaaaaatgtggatcaatcacaaactcaaagaacgttacagttataatgctttcgacatttttttctacttctgtgatgctttttcaagataagcttccccctccccctttttttcccctccacctgtgcactgtcttatcgcgatatactcttgacttctgaaaatcaagttgcaggattggtatgactggaatgcagaggttctcttgaagtagtgtcaccacataactattctctattgataaacttatcgcaaccaagttcttctatcagagggttgataacttcagaggcagtcagagctatcgtaaaggttaaaatatcgaggtccaccctgtgaggatttcgctgatattcggcatcaaacgctgcttcccttgctctgcaggcttccacgaatcgcctgcggcgttcttcaagctcttgtattctgccgggagcaatcgggtaattttccagatagtggcggagaaactgctggtaattgatgcctaaaacgctaagtgggtggcggagacggagatagggcaacgcagccaggcctccgttcccgtgtctggacctgggcctgccctcgggaccctcttcgtccactggctcccccagcaagcgggcgacctccgccatccgggcttccctggccgccgccgccgccgggctttccctgcccgccgcggctgccctggccaacgccgccgctgccaccggggctcccctggctgccgccgccggggctgccctggccgccgccatccgaccttccctggccgccggcaccgggcctcccctggccgccgccatcgcgccttccccggcctcctcaggctgtgccggggccggctcccgcctcccgcggcctacctccgcctgcgggacgtctctgtcaccattcgccgcgcctgtctgcgggacactgctgtctgcgggcagcttggacatctcagaccgtggggtcaactcggctgctcccagagaaactggaataactggacagagcgatgcccggcggacaccccagtgcgcgtgcgtgggcgctatgcgcgctgtaaatgcagtgtgcgtaaccgggcgcgagagcatagattcttaccgcaaaccctgggagcagtgcgcatgcgtactttcccggcgcccgccgttctccagatgccccctcgaggccgggaagcgccaacgcatctgaaacatcccaacgacgaagggcgggggacatttcaaccagtttgatgtttatgaggaacgcttacaagatcgcttcttgtaggcgttctcaaggttctgtcctagggtgtttctctttgttctccagtgattatgtgccacctctattatatatcaagatattttagattcatggtcttttctggatttttaaattgtttttcattcattcctttgcctgtcttcatccatacggatcgtcctagctaccaaagctttgtaattacagtcttttcgtgttatctttaacattgcattgactaccttggacatttgtttttcgaatcttatttgtgcaatataacatgcagaaaagtaaacaaaacataaatatacagctgaatgatttatcacaaagtgaacatccgtttaactaccacacagtccaagaagtggaatatttccagcatcccagaacccttcctcttcttcttatcactatcctttcctttctacgcagaagtaacaactatgctgatacttatggtaatcactttcttgtttttcttttcattttaccacctaagggtgcattcctaatgctgtagtttagtttggtttgtattctgaactttatctatgtgagaaacacactcacctgcgtaatttttgtatttttagtagagacgaggtttcaccatgttggccaggatggtctcgatctcttgacctcgtgatccgcctgcctcggcctcccaaagtgctgggattacaggcgtgagccactgcgccggccactttcttcccttttatgggctgaccccgcctctacattctgttcccttattgtgaccttctaggtggatgagccctgcagtttgttatatttgcaggctggctgccagtacttagatttatcatgcctcagaaatggaccatttaaaatgttttctcacatacacacttgtatctgtttttttgtgcattatttttatgagattcatccattcacattttctcttcctccctccctccctcactcccttccttccttccttccttcattccttctttctttcatctcattctgttacccagactggagtgcagtggcacaatcacagctcaacgtggcctcaaccttccgagctcaaataatcctcccacttcagtctcctgagtacctgggactacaggtgtacaccaccacacccagttaatttttaatttttttgtagagacagggtctccttatgttgcccaggctggtctcaaagtcctgggctcaaacgacccgcctgtctcagcctcccaaagtgctgggattatagggtgagccagagcactcggcctccagcctacattttcattatggtttataaatactttattttcttgatagttattatattcattaccattttttttatgaagtctcgctctgttgcccaagctgaagtacagtggtgtgatcttgggtcactgcaacctctgcctcccagttccagtgattctcctgcctcagcctcctgagtagctgggattacaggtgcgcgccaccatgcccggctaatttttgtatttttagtagagacagggttttattatattggccaggctggtctcgaactcctgacctcatgatccgccaggctttggcctcccaaagtgctgatattacaggcgtgaaccactgtgcccggcttattaccattcttttatggatcttgtaatattaaaacatgcatcttatatactgactctccaattaatttccctttgttctgattaatgtgaacaaacaaaataatttgatttgattttgctggtggtggtccccgtcatgatgccatgattcatgaccatcaacaaatgacttaagtgacttatcgttctct

SEQ ID NO: 1560292 - DNA, 4001 bp, Homo sapiens
ccatatataactgaaaaaacccaagatgctgatagaggtatacaatatgttaccttgattttatatttttaaaaatttatacctcgtgatgcaagttaactaccttgatattaaaagggaaaatgcacaatatttagattgatgtttatttgcatatgcattagaaaacctgaaaggcgtacagtgaaaaagcaaaaaacaagcaaaaccaagaaaacaacaacaaaactccaagccacaagcaatggcacctgcatggaatagttctgagtttggcaaaggacagcaacaagagagatttctcacagcatcttttgatactttttttcttttttttgagacggagtcccactctgttgaccaggctggagtgcagtggcgtgatctcggcttactgcaacctccgcctcccaggttcaagtgattctcctgcctcagcctcccgagtagctgggactacaagcgcgtgccaccacacccagttaattttttatttttcgtagagatggggtttcaccatgttggccagggtggtcttgaattcctgacctcaggtgatccacccgccgtggcctcccaaagtgctgggattacaggcgtaagccagtgcgcccggccgatacttttttttgttgagtcttgtgaatagaatacatattctagaataaaataaaaagcttaaaattaacaaaaaacaagtttattccacacctacccaatttcacatagacttgaaaacactgatcatataatacgtggttttttctattgaatatttactgttcatctaaagtacctcagaaaacacaaatatgaatcttacactaggatttgttgacatgaccacaaattgtgaaatttcaaagtcctctcaatagccttccaatcctagtaactcaggtacacctggattcctgacaactctatttctttgttttctttcatcacttaggttcatttctatgggttctgttattggcattttttttttctcatatctttgcaaaaccatcctttatggtgaaagtcatgaaggattcttcacaaatgcaggaaaatgcattgctaacaaagtgctaagtcagaagtgtcttgggacctgtttgaaaacaagattcggccgggcgcggtggctcacgcctgtaaagtaatcccagcactttgggaggccgaagcgggaggatcgctcgggtccaagcgttcgggaccagcctagggatgcgagactcccttctctatttaaataatactaaaaaagaagaaagaaaacaagattcaacagtcttgtctgtttccatttcggagtgtgcttcctccttcaattgcacattgccgtattcccttccagtttgcattccccctaatgactgagttaactaaactggcacagcctgcctgttcttttgatcccaaaagggtcacttggctattccttgccaccaatgtcatcatcacagccgactcagtcggccagaggactgagggcctcggaggcagtcagcgctaccgtaaacgcgacagcagcgaagtccatctgcgggggatccgcgtcaaaggctgcttccctcgccttgcagccttccacaaacagcctgcggcgttcctcgaaatcccgtagtaatctgaccggaatcatggagctaccatccagatactcgcggaacaacagctgccggttaatttctaagaaagcgagctgctgatgggggtctggcgcggaggccaggcccgggacgctgctggggatgggcccgggcacagggcccggcatccgcgccatggaccgcgcagcttcggccactgggccttcccgagcctcctgcacccgaaccccgccgccgactgccccccgcagtacgtcgctgacgccactcgcggtgcccacctgtgggacactgctatctccggggagctcggacatctccaacagcccagtcggctccgccatagtcccagcgtttctacggagactggaataacggcactgcactgctgtatgcgagacctgcgcatgcgcgagtctcagtgagcgcgtaaacgctgtgcgtgccagagtgtgcgcatgcgtaagcacggtggccaatcctctagcgttccctagcggtcctgagtagccattacgtctgtagccgcctctggtcctctgagcgcctgaggacctgcggactgcgcggtatcttaaattacaaccacttcagtattaatgtaaagttccttatacggtcattttccagctcctgtcttttttttttttttttcagactgggtctcgccctgtcgcctaggctggagtgcagtggtgcgatctcggttactgctgctttgacctcccagcctcaagccatcctcctgcctcagcctctggagtaactggaactacaggtgcacacaaccacacccagctgattttttattttttgtagaaattgggtctcactatgttgcccaggctggtctcgaactcctggactcaagtgatcatcctgccttggcctcccaaagtgctgggattaccggcctgagccactcggcctggcctgtaagtaatattttgacactggaagtttgggggtttcccaaaaccacctttaggtttgataattcccagagctcattgaaatctgttatattcacagtcatgcttattacaggcaaaggacacagattagaagagatgtataaggcacaatctgggatggggagggttccaaatgtgaagttcctgtgttcctagggatgtgttaccctttgtcgtccatgtgtggcaataagtgtgggggtagtgctaacataggactctcacccaggctttggtgtccagagtttttactggggttttactacctaggcatgcttgattaaaccatcgtccattttgttgaagtcaatctccagcctcctacctgatatcacatggctccaagccccaactctctaatgatatggttagcctttctgtgtggctagctctgatcctgatgataacccaaaacgtgaaagtctatgttccatttaaaatcagtcagctgtggctgggtgtagtggctcatgcctgtaatcccagcaagttgggaggcaaaggtgggaggatcgcttgagcccatgagtttgagaccagcctgggcaacatagtgagacccctgtccctacagaaaaaaaaaattaggcaggcatggtggcatgtgcacctgtagtctcagctattcaggaggctgaggtgggaggatgacttgagcttggtaggtggactgtgcagtgagctatgattgcaccactgcactccagccctgtatgacagagcaagaccctgtctcgaaaaaaaatcctttgaatttagctggaatccaaatatgagagttgctggcaattgaacttcaggaggatccatctaaaaattctgacctatcacaggtcgtgtctgggagctgattgggttggaaatcattctgactcacgtgtaccttactttgtttctacagttctcttggagagatggagttctcctacatgtgacatatatgcttcaaaaagcacatttgtgatattccacagaagacaaaagaaaggacttctctggaaggtaacttcaaggggacaacaacagagctatggactgcaggaagatggcctgcttctcttccagtgtgatttggatcatggccattttgaagcctttgaactgggattagttgctgggctgggtcatcaggaacttgcgtgtccatctcagggagacctggccttcagaaatgacagcattcggccccaggaggagcctgcaattcggcctcagtcttcccagcgtgtgctgcccatggggatacaggacagtaaggagctaagcagaacctgctgcctgaatgggggaacctgcattggggtccttttgtgcctgccccccgtccttctatggatggaactgtgagcacgatgtgtgcaaagagaactgtgggtctgtgctccatgacacctggctgcccaagaagtgttccctgtgtaaa

SEQ ID NO: 1560293 - DNA, 4001 bp, Homo sapiens
cacctgtaatctcagctactcaggagggtggggtgggaggatggcttgagcctgggagttcaaggctgcagtaagctatgatcgtgccactgtactccagcctgggcaacagaactggacactgtgtctttaaaaaaattaaaagaatctaatttttattcgatatttacaatcgatgttatttgatatttattaatataatttgatatctatcatcgaactttgattagatatttatcatcatttatttagttgctatttatcgactgctgtgccttggacttttcagggccccaagacagtgcaagcaccccaggcctcagttcagcttcaacaaaataggtacaaagaggtaagcctggccgggtgcgatggctcacacctgtaatcccaacactttgggaggcctaggtgcgcagatcatgtgaggtcaggagttcgagaccagcctggccaacatggcaaaaccccgtctctactaaaagtacaaaaattagctggcgtggtggcacatgcctgtaaccccagctactcgggaggctgaggcaggagaatcacttgaacccaggaggcggaggttgcagtgagtcgagatcgtgccactgcacttcagcctgggggacagagcaacactctgtctcaaaaaaaaaaaaaaaaaagagttaagccccatctctaaacacaaagtccgggagcacggttttccaattcctctaggttagccctggggaagaagagcctcaccttcctccttgcgacagcctttgaagccttccgggtctcaatcctgaaggtgcggacaatctgaggatgggaggggagaagggtcaggctcctgggaccaagggatctcctttatcaacctcctcaacacaccccaccccattccggtctatgggcccccaagcacaagggtccccactccctgcaccccccaccctcaccttgaacttcttgccatcctcatctatcttgtactctgtcactgtctttatgtttccgttgatgacctccttgggaggcggcagtggagctggcagaaggggaaaaacagagaaagactgagccctgggtcatggggatcaggagcggcagggctggagggagaggcagcccggacaccgagtggcagtcctcactcacctcccggcagtcctcactcacctcccggcagtagctctggctctgggctggtgtcacctgtggccagagggatccccttgaggagctcgctggtgacacatttgtctgcaaaaggcagcgtaggaaggaggagtcagctccaggggcaggagctccccagctgcgatggaagggcttttgggatgacgcctacagcaaaagcggagaaaggcaggccaagggcagagggctggccaggcaacgcactgggatggccctgtggggactcggagtggcaaggatgggagatccctcgtaggaaggtgggtgccaggccatgaagccaaccaggcgccagtagagaaacaggagacgggagattacaacttcctccctggaggggaacagctgggaggcagtggcatgggaggaagagggacccgccggggaacacctggagttggcaacaggcgggtcccaaggaggatggcgcggggcaggggcagaccgtgacggggtacacggtgccagactgggagatggaagcaggcggcagtcacacggcttgggcctggccgcgaataccccgggcgaccgtgtacacttaccgtcctccccctcctcctccacctggtcggcccaactgggcttcgaactgcggaaacaaatgtgtggggaacgaagattaagtcagccaggcccggctcccgcagcctcggcgtacccaggccccataatacttcccagagcaccccaaccgcttcccgtgcccctttccgcgatcgccgactcactcaaagtctccagtaggcatcgcaaaaagtattctccacgcagcccaagcccggccagagagcggaagcgggcgaaaacgagacttccggtgccgccgtcgccgcctagaggggcccagccgcggcacccacagcgacacctgcggacggaggtggaggcgcacgcggctgtgtatgctactgggcgctgctggtaccagagtagggccagcgggggcagaggctgatttcagggctggtcctattaacctttaaaattaaaataggccaggcgaggtggctcaagcctgtaatcctcgcactttgggaggtcgaggcgggcggatcacctgaggtaaggagttcgagaccagcttggccaacgtggcgaaaccccgtcactactaaaaacacaaaaattaactgggcgtggtagtgcgtgcctgcagttccagctactcgggaggctgaggcaggagaatcgcttgaacccgggaggcggaggttgcagtgagccgagatcgcgccactgcactccagcctggcgacagagcgagacaccgtctcaaaaaaaaaaaaaaaaaaaaaattagccaggcgtggtggtgggcacctgtaatcccagctactcgggaggctgaggcgggagaatcgcttgaacccaggaggcggaggctgcagtgagccgagatcgcaccactgcactccagcctggggctgcagagtgagactccgtctcagaaaaataagtaaaattaaaataaataataataatcataaagctcacttattgagtgcttattgtatatgaagcatggtgaggaggatattacttccattttacagctgaagaaactgaggctcagactgggtgcagtggcgcctgcctgtaatcccgcactttgggagaccaaggcgtggggatggcttgaggccaggagtttgagacaagcctgggcaacatagtgagacccctgtctctaaaaaagaaaaaaagaaaaagaaagaaaaaagaaaccaaagttcggggaaaacaatccttttgcttaaactgttccttgtcttctttcccgatcccaatgattcagatgccaagtggcctcccctcagccactccctcttcttttctttgtagcattcttggctttccggtataattttgtgcatttacttgtttattgctcagctccttgctctaagcacaaccgtcctcagtcgaagtgattcatgatgactccccaggggaaaaaactggtcctcagggaggaaaaaaatcttagatattgtggtcttccaaagccagctctatcagacagcatttatccctaagtatttagtttctgcctttagggagatattaaatgtaattaaattgaaattaatttagttgatgtaaattcaattttaggataattcgggttttctcctaagaagggtgataatgaacaaaaaacgtttgacaatgtcggacgcagtggctcacgcctgtaatcccagcactttgagaggccaagatgggcagatctcttgaagtcaggagttcgagaccagcctgggcaatatggcgaaaccccgtctttactaaaaatacaaaaattagctgggtgtggtggcccgcgcctgtaatcccagaactttgggagactgaggcagaaggatcacttcagccctggaattcgaccagcctgggcaacacatagtgagaccccccatctctaaaaaacaacttttttttttttttttgagatggagtctcactctgtcgcccaggctggagtgcagcggcgcaatcgcggctcactgcaacctctgccttccgggttctagtgattctcctgcctcagcctcccgagtagctgggattacagatgaccaccaccacgccgtgctaatttttgtgtttttagtagacggtttagtagagacgggggcccacctcggcctcccaaggtgctgggattacaggtgtgagccactgcgcccggcccttaaaaaaattttttttttttaatcagctgggcatagttctgtgtgcctgtagtcccagatactcaggaggctgaggtgggagaacagcttcagcccaggaggttgagccatgatcat

SEQ ID NO: 1560294 - DNA, 4001 bp, Homo sapiens
cagccacacaccgctacattaatttttaaattttttcgtagggttgggtctcgctatgttgccatggatggtctcgaactctttggctcaagtgagtctctcgcctcagcctcccaaagtgctgggattacaggcatgagcccctgcggccaccctaattgattttttattattatttttgagacggagtttcggtcttgttgcccaggctggagtgcaatggcgcgatcttggttcaccacaatctccgcctcctgggttcaagcaattctcctgcctcagcctcccgagtagctgggattacaggcatgtggcaccacgcctggctaatttggtattttttagtaaagatggggtttctccgtgttggccaggctggtctcaaactccctacctcaggtgatccgcctgcctcatcctcccaaagtgctgggataacaggcgtgagtcaccgcgcccggcaattgatttttcaaaaaccatccctcctcctgtcccaacttccttggcttcctagtcttgcacaccaagagatgctgcattgttcaggatactaccagccacccccttgccctgtactgggagtggcaccctgctagttgctgcaatgggagtgtagacagagagctagacacttacagcttcaggacagccaggttggcttccagatcataggcattttccttggcctgcgtctctacatagcgctccagggtggccaggttctcaggattgtacctaaaggagaatcaagataggtgagcacagaggagacagaagctgaggccagccaccttatggagcaaggggccactgtaacctgctcctcccgcccttcccctctaaatctggcactggccacttgctctatccaggtagtgaattatgtccagtataatctctagtaaaacttattcttatcccagacctctcgcctaagctctaaactccactggagccctggctcttccctaggatgcctcctcaacctctgagccagtcagtcactgcagcttgtacacctggcctcctgaatgtctctgctactcaccccttcctcccctgttcaggcctccaccctgatccagccccatcctctcctgcctacctcgctgcctacttcctccatgtccacctgaacactctggcctttgcttcccccatttcagttctaatctctcccggctatcgctgtctgctgtcaggtttgtctcccttatggaaagggaactcagaccgtgaaggcatgatctgccgctgtctgattcgcctgtggttcccagcattgcctagcactgacagtttatttcagtaaacgtgtggagaatgaatgacttatagagcagagaagggagagattaagaggcactcaaaggaggcggagcagagaaggaaaccttaaggcaatttacgaagagactgagtggtaccaagattctctcgcttctaggcctttgcagtgcttttgtttctttcttttagagacggggtttggctgttgcccaggctggtctctaactcctgggctcaggcgacccacctacctcggcctcccaaagtgctaggatcacaggcgtgagccactacccccagctcagtgccgtttctttaagcatctcctcctccaggaggatagagaaaccccaccccgcggcaagcccaggaccctgaacaccccttgctgtctccggaaaaccctctcctccgccccgcttggccagagcgcttcctccaaccgggctcagacctgtcgatacccttgagcaacttgcccacgttggctctcatctgctcaaacatcgccatgacttctgtcgccttccacaaccagggctggaggctaacactgacccggcacggcgtcctcaaggacgggaacaggaagaggtggtggaaacggaaacgacgtcgttgttgtcgctccagctccttgggtgcggtaaagggaaaggctctagcagcagccgccacgctttccggctgccacgtgacttcttcctcgcaggcgcaattggcgcgtgcgcattcgcgccactcaagctggacagacagcgtgagaaaaatcttactggatcccagtgcgcaggcgcctctcgtggcgagggggcggggctaagcttttcccgggcctcacagacccagttccagtgccggtagcgcgggagcgtgcgcgcgcgaactcaccgggaagcacccggagctctggcggcgtgcgcgcgcgttgtattgcgcgcggccatgaggccacggagctctgcgggaatgcacgcagcagccttacgtttaggccatggccaagttccgagggaggtgttctgaggtccctcttgccacaggcctgggcgcctggtgcaggatcctgagctctccagtttcaagtctcagcccttggtccccagctccaggaggagggtcccacaaagctactgtgctctgccgggcaggggctggggtgagggctcctggacttcgccggatcgcgccccgtctccattaggttccggtcttggagctgagggcgagcgtcccatttgtactgccatgaattatatattatgtataggttttgtacactgcaggcctacaaaatgcagttatgtgccatgcatgtggaggtatatgtcctgggtacatccacgtgtgtactgtgcacacaggtatccaggcagatgcacgtctacacgcctgcgcagtgcagaggaggtaacccaagtgcatgtatgtgacaggtgaacaggcatgtacactgcatagccatccctttgcagacctgccgccttcgggttgtggccaaaccttcaagcacccagcagaggtttagacactacctaggagacgggggcgggggttctaaggcacccccctccaacccagttacgattaagatcatttgcatcacatttacatccagccctgggccttggaggttgagggtggtcccttgggtcccaagacaagctgcccctcagaggctctcagagcccaggggacgggggggtggagcccgttgcacagtcgtgcagtgcagctggggcaggaagcgagagtgaggaggggggaggccacagcccgcggaggcaaggcgggtgcagggcttctggggacggagggaggtgccagaagttgagccctgaggccctgctggcccctgggcgcaggcccagctcaggcccccagggatggacgtcgtggaccctgacattttcaatagagacccccgggaccactatgacctgctacagcggctgggtggcggcacgtatggggaagtctttaaggtgaggaagcccctctgtccccaacaccctacaaccagtgacctttaaggcaagccctcggcagggaggaggctgcaagagggggtcccagttcttgaccttgactcagggatgctgtggagggactctggcaaatggagcctgcctgactgccaacttcccctttgcaaggctcgagacaaggtgtcaggggacctggtggcactgaagatggtgaagatggagcctggtgaggagggaacatggagctccttccccacatccccaccttcgcctcctgggacactgggatcacctcccctgtagctctctccccatgcgagctgccttttctctcccgccctcctcacagatgatgatgtctccacccttcagaaggaaatcctcatattgaaaacttgccggcacgccaacatcgtggcctaccatgggagttatctctggtgatgaacctcagacccaccctggcacccagcccagcccctaacccggagtccccatttcttgatgggggtaccctcagttctttttttttcttttctttttcttttttgagatggagtcttgttctgttgccaggctggagtgcagtggcatgatctcagctcactgcaacctctgcctcctgggttcaagcaattctctgcctcagactcccgagtagctgggattacaggcgctcaccaccctgcccggcaaatttttgtatttttagtagagatg

SEQ ID NO: 1560295 - DNA, 4001 bp, Homo sapiens
tttttgtattttagtagagacggggtttcactatgttgctcaggctggtctcgaacacctgacctcgtgatccacccgcctcagcctcccaaagtgctgggatgacaggcctgagccacggggcccggcgcccaggaaataaccagaactgcaagccgcggacaggggtggaaaggtggggacttttgccccttttcccaaagacagaggcggcccctgccctgggccacaggactggtgaatggagagacacaaagaatctcagtaagtttgttgattgacagcagatcggggcctcccttctcagtaagtttgttgattgacaacagatcggggcctcccttctcagtaagtttgttgattgacagcagatcggggcctcccttctcagtaagtttgttgattgacaacagatcggggcctcccttctcagtaagtttgttgattgacagcagatcggggcctcccttctcagtaagtttgttgattgacaacagatcggggcctcccttctcagtaagtttgttgattgacagcagatcggggcctcccttctcagtaagtttgttgattgacaacagatcggggcctcccttctcagtaagtttgttgattgacaacagatcggggcctcccttctcagtaagtttgttgattgacagcagatcggggcctccctgcaggatctcatttaacccctcaacggcccatggcgggtattttcccgtttcacagaggtgcagaccgaggcgcggagaggggaccacccagcccacgatgccaccccaggtccccacgagcggccccgacgcgcccctccgtcgcagcctccaccctccccaggcctctggcctccgcccctgcgccccccgccccgcccggcggcacctggagaatcacgatgtcgttgagcaagtttacggggtcgtagccgttttcgaagatgcgctgcacggcgaacacctgccgggtgggctcccgccgcgagaggttatgggctcccaggaccacccgcaccgcgcggacgtttctgccggggagggagaggcggggctcaggggcggccccgggggtcggggctcagccgcgccttgtcgtccccatccggcgacgggcctgagggcgaaggtgctcgaggggccccgcgggccctggacggacccccccccgccagcagccccggccccggcctccccccacccacctcacagaccgggacgcggggtccgagccgggcgcgcacactcccggctactcacacattcgccacgcagtgcgcggccgacatgacgaagttgggcgcaatcagggtggcgccgcagaagtggcctccgcgcagctgcagggacaccatgaagggccacgcgtggggccgcgctcgccggccccccacaatctccgaggccagcgcggtgcctggggacacaccgggtgcgggtgctgagtgcctgccaaggagcctgtcccctcccggccacggggcctctggatcccccaccaggaacccacgggatcccccaccgggaacccacgggatcccccaccgggaacccacgggatcggggccgttcgcacccctgttgttcagatgaggaaactgaggcacggagaggcaaagggacctccccacggtgcccctccaaggcacagacagacctggacttgaacccagagggcgacctgcgaccccccccccctccccggttttcaaaccccaactctgggctcctggtggtggcttcaccgctcagaacctcagtctcttctggtctccttgtcccagctggcacctcccctgtgaggatgagggacccacactggtggggccctctatggagaggtgggaacagaacccgggacagagggagcagcgggaggttggactcaaaaactcaccccccagcagcaaggccggcaggacacaggcgaggaaaagacacgcgagtcggcggccgagggtcatggtggggctggggctccggggtctctgcccctccgtgcccgcccggctcctcttatagccctgtgctgggaggccgttgcattgccccacggccggccagcgccctccacttcctctcccctggcacagggcgttgatgaaaagggggagaagggggacaagacgctggattggctcgggtggggcctccagacaaaattcaggatgcacaatcgcattcaaatgtcagataatcaatgtgggttttttaatttatttttttggagacagagtcttgctctatcgcccaggctggagtgcggtggcgtgatcccggctcacggcaacctccgcctcccaggttcaagtgattctcctgcctcagcctcctgaatagctgagattacaggcacctgccaccactcccggctaatttttgtatttgtagtagagacagtgtttcgccctgtcggccaggctggtcttgaacatctgacctcgggtgatccgcctgcctcagcctcccagagtgctgggatcacaggcgtgagccactgcgcctggctaattttttgtatttttagtagagacggggtttcaccgtgttggccgggctggtctcgacgttttttttttaatctaagtctcttccaaatgaggcccaggatatacttacccgaaattcagatttaaccgagcgttgctgtgtttttgccaaacctgccaaacctagacctgagggacttgatgggggtggcctcgcctgcctcagtttacccagggccccgtgataccggccacatgcagctgtgtcgcctgcctctgtttatccagggccccgtgataccggccacatgcagctgtgtcacctgcctcagtttacccagggccctgtgatacggccacatgcagctgtgtcgcctgcctcagtttacccagggccctgtgataccggccacatgcagctgtgtcgcctgcctcagtttacccagggccctgtgataccggccacatgcagctgtgtcgcctgcctcagtttacccagggccctgtgataccggccacatgcagctgtgtcgggcactcactgcgcaataggcacttctctggtccttcccagggttcctgtttgggaactgaggcacgtcaagggcctcccccaggagctgcgagtgtaacccaggcctctgggacccgcagctggacggagatctggggccggctcactccagccgctccctgaacctcagggctcattcttgggggccaggccttccatcctctcctcgtctgttgcctccaacggggaactcactttcacccaggctcacggtcagtccctggacaccagctggggctctgacaatctctcccgcccttctgccttggtgagcttccctgaagccctccccgcctgaggcaggggctgggcgggcatctggcagggctgctggagagagaattcctgtccaggccgggaggctggagtgaggaccaagcctgagggcttccgcctggaggaactggcaggggagctggagtcccagctgcgggaaagggattcccaggacccagccccgggctccgggccccgttcctcttcccatctcccccacgatgttccagctgcaacggccgggccaaggctgtcgcaagaaccaacgtcctcctggctccaggacaaggggaggggaagggaaccaacgggcctgtctccaggaataggcggggcgagggcacccggggacacgcagagcctgggccaggctggagtcctgacgtgaccacaggcaagtggacccccatggctctcgggttagggagacaatggccctgccctcccagagcctggcacacagcaggcgctcagtccatgtctgccctgtcctcagcttaatcagacacacactaccctgccttctcccctccccttttggcagggttcccaccttgctgccttaacatcaccacagtgcacttagtaagcgcctactgtctacacagccctgtttcaagtcgggggtggggggatttcaggggtgggggacgccgtatcttt

SEQ ID NO: 1560296 - DNA, 4001 bp, Homo sapiens
cgcaccactgcactccagcctgggcggcagagtgagactccgtctcaaaaaaaaaaaaaaaaaagaaatagcaccatgatctcagactcaacacatccagactgaaactctgtctgctcaaaaccaatgcatcaacataaacagtattatttccttccacatttgagacgttcgtgtatctcaacctctttgtgggcctcgaagttgcagaatttgataatagatcccagcacagaactttgcacacagaaaatattcgatgacaactggagtgccctggagccttgtgattataggagcagtacaatcgagtggttaagagtaagggttttgaatcagagggcccgagttcaaaccctggcgcagccactttagtgcatgagactggtcacatcaagtgacccatctaagcctcagtttcttcatctctaaaatggaaattaatggaaattataacatcacctgcctcaaggactgcagacaaacgtccacaaagtgtcaagcacatagtaaatcctcaataaatactggtggctatgtacaacatcatttattcagtgcctaccaggcacagaccacgcacaacgcaacgggatttccaccctcttcaatttgcaccacacttttgtccttcccattttatagataagaaaactaaggctcaacagagtcaagcttgttcgaggtcttgggagcatctcccagggcattagaacttttggaggaagagcatttagttcagtaatggttctcacctgtgcgtgtgagagtggaagagacccctcccccgcaacccgagccatctggcaatgtttggagatacttttgatcctcacgacttggagcatggggatactgctggcatctagtgggtagaggccaggaatacggctcaacttcctacattgcacagggaagcccccactaccaccacaaccaaaaactatctgaccccaaacatcagtagggccaacgtcgagaaaccctgctctagacagatcattctcctcatcttcccatttctggccatccggatcttagatgaacactttctagcaagggggctcagtcccaccacgggaagcccatgcagaagttgtgcagaagttcttctccacctgccctgcacacagtagggaccaaaacccattttaacaagccccgcagcccagagcaccggaaaaggaaggaagggcatccatcccccattgttcaactgtgtgcagcttgtgtttccaacaggcacacacacatattttacaaatcctaacgtcccacgccccacaaacagctttgttagagatggcgctcaaaaaaagatgcagtttagattttttttttcccccaggactcccgtgtatctactgaagggtttgcacacttctcaaaggacctcgcaccggccgcggtgctctgacaacgaccacaaaagaatctgtgggatttcccgggggagcaagcccgtgggccgtgacctctgcgcgctcaaagcgttcccggcgctcccccgtagctggccccactctcccgcccccggagcccgggcttccaaggcgaccggggcccccggccgtgcagcccggccccccggcgcatgcccacgccgtatccccctcgcccgtccctcgaggcgccagaggaatccggccccggggcctgtagccggcgcccacaccggcccgccccgacccgcccgccgcggccccagcgcgcgtcccctcccccggtccggcgcggcctgggcctcggccggtgcaggcccgcgggcgccccgcggccaggccaggcgagctcaggcctgccgcggcctaccccgtcgggcgccgccgaaggccccccaccgcctcacctggatgcgggcgggcgggcccggggctgctccggggcgggcgggaggcggcggcggcgcggcgctaacggctccgctcggcctcggtagcggtggcggcggtggcggcgacggcgacggcggcagcggctcctcctcagcgcgcacgacccgctccggcccgcggcccggacacgccccccccgcgcgcgagcccattggccgacgtccgccacggcgcgctgctcattggccggcgtagctgtcgcggcgctccggggcgcgcgggagaggcgggacttccggtcggcgccgcctgcgaagtgctccgcggccggcggagacgcgggcagccagcgatggccgcggagggggcgaactgggttccggccctcggaggctgacggaaggcggtggctgaggagcggcgcctctggttgagcgctcgccgtgtgtcccgcacctgtctgtcctgccgccgcccggtaaggtaggaaaggtcagcgcgccggggttacgggtacagaacctgggttcgaatcccggccccgacgtttccgcactacgtgccgttgggcaggagctgacgtcaccttgccgggcctcagtttccttctctggtgcgctgaggaggcggggcatggaacgtggtcagcgcttcatcggtgctggctctttgagcaagccagttcccgaaggctcagcatctcattcattcattaaaatgtcattgagcgcctactgtgtgtcaatcactgtatgggcagtgagcagaaaaaaaatacctggtcttattgggctaacattctaaaccagcgctggcctagaatgccctagtagaaatacatgcaagctacatgtttaatttttttttatgtaaagatgggctctggttctgttgcccaggctggtctcgaactcctggactcaagcgattctcctgcctccgcctcccaaagagctgggattacaggcatgcctgcactctgcctaattttttcttttttttttttatgatctgaaaataatagtctttttatttttatttatttatttatttatttgagacggagactcgctctgtcgccaggctggagtgcagtggcgtgatctccgctcactgcaacctccgcttcccaggttcaagcgattctcctgcctcagcctcctaagtagttgggcctacaggcgctgcgccaccacaaccagctaatttttgtatttttagtagagacggggtttcaccgtgttggccatgatgatctgtatctcttgacctcgtgatctgcccgcctcagcctcccaaagtgctgggattacaggcttgagccactgcgcctggcctacaattttgtttttctttttttttttttttttttgagacaggatctcactctgtcacccaatttggagtgcggtggtatgatcacagctaactgcagcctcaacttccccagctcaggcaatcaatcctccggcttcagattcctgagtagcttagactacaggatgtgccactatgcctggctaatgttttatttttttgtagcgatgaggtcttgctgtattgcctaggctggtctcaaacttctagacttaagtgatcctcctgctttggcctcccaaagtgttgggattacaggcgggagccacggtgcccagcctgtttctttttttaatcatattttcttagaagttttttttttttttttttttttttttggagacagggtctcactctgctgtgcaggctggaatgcagtggtgtgatctcagctcactgcaacctctgcctccctattcaagtgattctcgtgcctcagcctcccaagtagctgggatcacaggcgtgcaacatcacacccagctaattcttgtggttttagtagagatggggttttgccatgttggccaggctggtctcaaactcctggcctcaagtgatccacccacctcggcctcccaaagtgctgggattacaggcatgagccaccacccggcctaggaaagctttttagagattgggtctcactgtgttgcccaggctggagtgcagtggctgttcacaggtgcaatcatcccacaggtttaactcctgacctcaagcagtccttctgcctcaggctcccaagtagctgggattataggcacgtgccaccacacctagctcaat

SEQ ID NO: 1560297 - DNA, 4001 bp, Homo sapiens
tcctcccagcctgtccccatgatacatctctgccccagggctcgctcactggagaacctaggtcctcaaggcccttgtgtgacctctgaccacaccctctttccctttgtgcattagtttcctttttcaaatgagagaaccgatcagaggacgcttaggagatgctggactgttgcgggagttctgaggtcctcaggaggccacactccagttcccagacctgggtgaacagcacgaggcccagagagggaaaggaacggcctgaggtcacacagcaggtgagccaggcctccgggacctcatttctcagagccaggtgggcgggtcccagggtccaggaggggagaggcttaggcatggagggagcgccaatcatgcccccacccccagtgctagccacgactcgaaaaaggggcccggaaagagacacaatgcacagagacacacacgcagagacggagagataggaagagtggaagagggaggcccaggcgccgggaccagacaaaggacgcgcggcggcgcggggagcggagtcgcgcggcaggggcgggggtggagccggggtggggctataactggccagccccgcccccgggatacgcccgggctgccgagtgggaatccgagggctcgggcgaggccgggcccccggggccctgggggcggggcctagatgggcgtgcccgggcgtggccaggcagggcgtggcagggcgggaggggctgcgcgctcgggagctgaccagctccgtggctgctgaaagcaccgagcgcggggctagcggtgcgggcgagcaggcgggcgggccgcgctcaaggtcacctcgcggcccagagccttggcgaggtggggagcctggacctggcctaagggggctgtctcggcctcccaccccatctcccggggggcggagacccgggagcccagaggtgcccccccaacccgcgggccctcctctcccctccccctccccgcagcccgaggcgcccgcgcgaggctgcggcccgcgaagaagcgccgagaaacaaagggacgcggcagcagcggcggcgggcccgcggggcctccgggcgcgccccctcctctcccctccccgcttgccgcaaggtcgacgggctcgaggacgagacgcccgcctcccgggtgcggccgaggcccggggcgcgcgatccgacgccacccgctttcccagggctctcggggacgctttgtcgctttggcttggcccagcaccagtgatcgggccctgcgtttgcctgggcggcctgcggggtctgggcctggatggaggaagcatccttagccgccgcggcccctcccccatcaggcctgctggagagggggcaatcccgcctccagggcggcgtcggacgcctcccgaatcgcagtcagtctccctaaggccctctcagaccaagctctaagcgccctcagcactctgggcgcggccctgcccactctcaggccccgaggcttggtcctacccccccaacccgggcctagctaggcctggtcctaccccccccgccgcacccgcccaatctccgcggagcctgggcccaactcctccccgtcccgattccctttcggcgacaggggaatacctacagtgaccattcttgtgtgcccggcgggcgcggtccgtgttgaggggggctccgggggtggtgcactcctaggggggcgcccgatgctcacgctggggtcccgcccgggcggcctctggtgcggccgctgcagatgtggcgatgaaggcggcggctccctcgagggccagggacgggcccgaacccggggatgcgcgcgcggatggccgggccccggggtggcctgcgggcggcaggggatggaaagagggagcgggcgcggggttgaggacgccccctgcgcggccccgcggggcccggggaggttgcgcttcccgacagagatcgcggcgctctgcctttcgccgccgcccctcggtcggtcctgtccggtcccgtgtgttcaagtcctctcccctcgcccaccctccctccctccctccggcccgcgctgcgcgctccgcgctctggaccgcgccgccgccgcccccagccctttatagcagcagctgccagcgccggcgtcgctcattggctgcggcgaccgagctccgcctcctcgcggctcccgacggcgcggcaggtggaagtgagcgcgcactggtcgggactctgaatcccccaaaagcgcatcctaggtgctcgggttgccagatttgggccctccttccctcgaggcccttgcttcctaccctggcaccccttcttgggctggctttcgggccaggagacgggctcccctcctccgtccagctcctagagctggaggagccaacagagcgaggaggtattagtggcctgaatatgcgaccttccagaggtgttgtccactgagggaactggacaggggatcaggaaccaatattttagtaggcagaggcctgggtccccagatttggaggcaccagtgtagaccacctcaagaccacgggggagggtggctactgtggccctagtcttctgcagaaggagactgggacgctgttggttttgagtgagctggatccttctagggttcaaaaggtaaggactggcactccccagtgcaaggaaactccgcactgctccgaagggggtgaaaaggtttggggctcagtgttctggacaatcatcgctggagccatgcagctctgggaaaccacggatccttcttggaccccacagaactggggtgggtggatctgccacataaatgtcctggctttctaggctcgtgattggtcctcctgactgtggagtcatgctcgctctctgctagggggaacctggcctctctctaaggcgttgggggtggcgcagcctcctttggtgcgcgggcgccggtgcatgtttacgtcggggcgcgggaactagcacacactggggcggggtcgccagggcgtgaggcttcagcaccacagacagcaatccgacagtccggtcgagggcgctgccggcgaggtagcccagaccccctaactggagagcggcagtccccacccaatcctcgttcctgcacgccctttaggctccagactgtcagagagcgccaccagcgaggagagcctaatttgcccaatcaggggcggcccttgagataaccagttactggaagatgccctagagatcgagccaatgggagtgcgcgcaccaggggatgctgccacgcctggaaagggcaggccaatcgcagtggcccgcgcaataggggcggtggcggtgcagatccccgggtggcccctcttgggctcgccggggcgacctggctgcgggcgctaggggccccaagcgatggtctgttccccaccccgtgttcctcccggtttccgtcatcggaaactgagctaggaggggggctgctcctgggcgcgcggaccccgctgcggttcccatggaaacctgccggctccggcagtgcggggagagtggaggggacctgcctcgcggggggagggagctcgcgggggcggccccagcggccggactcgctcatccttgccgattcttctgtccccggctggggtagccccccggtccgcagcaggaactgaggcatagctggggccccgcctcatcccccgaactggtgaggaaccggcggggccaatctgcgcgtggcgccacagggctcccccgggcacgtgcctgagctcgcggctgcggtccccagggtcacgtggctgcggccaccagggcctacgcgcctcgcacgccacctagcggccgcgcctcgctccccgcccctctctctagcggcccgcaggaggcggcggcctcagcatcctcctccgggaaatggggccagggcagccgccgccaactccccttccccccgcggcttcctgttttaggaacacgccgagctagttctacctcggggttttggcactggttgttcctctggcctgagaatttcctcccccagctttcttc

SEQ ID NO: 1560298 - DNA, 4001 bp, Homo sapiens
ggacacacaggcggaccttctggactgaaaagcaagcgagggcagcatcagagagaaggcggagctcctggttcctaaagcacagaagacagtggtgaccaggtaccaagtccatcgtagttatatgactcacgagctctcccccagctgtttctaggaaagcctgccttcctgcaggacaagtcagaatcgctcagggaaaaagacccagggccagaattctaccaggaagagaggctctggctggtcatgggccagcagctgctgtcgctgccactgtctcctcctcacctgcaggggcgccttagcctcatcttggggagtctttttgacaaggtgcgaacttgctctttcaaaaaaaaatgaaatcctcattccatgaaggggaaaactgcgacaccgggacagggaggaaattgcccaaagacatgggaagaagcacggaaggggtgggcaccgggagagtggtggaaacgaaacagggggaagaaattctcggcttagctaatggagctgaacaagttcggggcaggaagaaagccacattccttcctagttagtctccctcctcccccgcccgcggcacccccccacccccaccatcaacagtatacacaaacacacacacacgcagggagcagggctctctgagcccgagactagacccacccccactccctttagggcaatgaagcccccaatttccagaaaaggagttacaaggttcctaaaccacttcccctcgggacctgaccactggtcatctgcaacttctgacccagcacagacggggggagggggggccatgacacaaacagaaatgaaaaaggcaggtttctgaccacggccccagatgcgccccaaagtcaggcccaagagaacatacacagcagcctcccctccccaccaccagccaggtggcagaaccgaaacgcctcaaacttcccccagatgggcccaaatcggcctctgagaagttccagagtcagcggccagatgtggtagccagagcttcctcctgggtggcagggatcccctacatgtgccctgaggataacatcacagccgcccccaacacttccactctccaaggaacctctctccggagagagagggtcacctgggggtaaggggagcagaaagctgggacaagctgtcagtttctgcccaaactccccgtcccaagaaccaaagtggcccaacctgagtggcttcatcggaacgcgtcaaagccagcccccagctgcaaagccttccacccagacagaacagacccccacaagtgcctcgctgaccaccccctgccgggcacccagacgatcgctgcttcccaggaggacagacacagtcacccccaccaacggcgctgccccggccccagatggaaaagcccccagcttccccctatcacggtgccgggaccgtgcggcccaccgcctcctcgccccgccgccaggtgcgcaaactggaccctgcccaggtgcccagcaggccagaaaggccccggacgccgccaggtgccgacaccgacgccccccgggcccggcgcgcgagtctgggcccctcagcagccccgggccacccgcctgtattgcctcctagtgctgagaaggaacgcggttctcagcgctccaggccggactggcgcccactccgcgccccgccggcccagggacccgcgagcagcaccacagacctagcgtctccgagcccggacgcctcagtgaggggagcgcgaggccggcccgcgtccggacgttccccactggcgcgccgggcgccatgccactcacctgtctggcgcggtagctctcgaaggccctcagggcactgtcggtgagcttcacgtggaacaccgacaccttgctgccgtcgctaacccgcccgcacgacagcccgtagctcctatcctccttcagcgccgccatcttgcgaccatctctcccccgcgcccccttcccggctccagcgccgccacgccggccacgccccgccccgccgcccgctgacgcgctgcattattcatgagacgcggctggccacgccccccgagtccgaccaaaccaacagtcgccgccacaccggcaggcagcgcactacattattcaggagacgcgcctggccacgccccatgagggccccacaaggcccacagtcaacgccccaagttgttgcatattcataaggcacttatggccccgcctcttcaggccctaggggtggccacttccgtgaacgaactccgcctcaacacgcgcacccctccaggccccgcctccatagtattatacataaccctgactcagccagccaggcgcgtcaaagccccgcccctacagccgctgacgtgatgcattatttatgagatctctacagtcttccgtctttggcttctgtggaaagccgcagagagggcgtggaggggcggagccggctcgaaacacgtgggtgggtaggccccgccgcgggccgggagggtgggcgtggctatgtaaacggagcgcgcgcgttggacgctgggttggacacataaggcatcccttaggcggggtggatgggacttccacccagggaaggtgctggaccggtaggtggaagaggagctggtaaactttttcttatgagatgagtacttttaataggataaaatcctacatccccacagtccctgagcgatggtgcagtccagcttcattttcctattttaatttttttttgaggggtcttgctgtgttgcccaggctggagtgcaatggcgccatcatggctcactgcaccctcgacctcctgaactcaaactgatcctccttgtctgggtctgctgaaatgctaggattacaggagtgagccaccaagcccagacttccattttcttttcttttctttttttttttttttgagacggagtcttgctcatcagcccagactggagaacagtggcgctatctcggctcaatgcaaccatcgtctcctgaattcaagcgattctcctgtctcagcctctcgagtagctgggattacaggcgcccgccatcatgcccagctaatttttgtattttagtagagatggggtttcaccatgttgaccaggctggtcttgaactcctgacctcaggtgatccgcgcgcctcgccctcccaaagtgctaggattacaggcgtgagccacctcccccagtttttgtttgtttgtttgtttttagacagagtttcgatttccttgcccaggctggagtgcagtggtgtgatctcggctcactgcaaccaccgcctcctggattcaagcaattctcctgcctcagcctcccgagtagtagctgggactgcaggcgcccatcacaacgcccagctaattttttgtatttttagtagagacgggatttcaccatgttagtcaggctggtctggaactcctgacctcaagtgatgcacccacctcggcctcccaaagtgctgggattacaagcatgagccactgtgcccggccagccttccattttctaaaaagcaacttcattgagtcacattttacatataaaatatattcccaatgctgtgtagctgtcaccactatctaatttccgagatttttttttctttttctttgagacagagtttcactcttgttgcccaacctggagtgcaacggtgccatctcagctcgttgcaacctccgcctcccaggttcaagcgattctcctgcctcagcctcccgagtagctgggattacagatgcccaccaccacgcccagctaatttttgtattttcagtagagacggggtttcaccatattgatcaggtctctaactcccaacctcaggtgatccgcctgcctagggctaccaaagtgctgggactacaggcgtgagccactgcgcctggccaagggaggagctggcttggagggccaaccagctcgctctgtgatcttgtgaaaggcacctcctgcttctgagcctctgtggattcacttcggaaacaggaaacagcaataagagcag

SEQ ID NO: 1560299 - DNA, 4001 bp, Homo sapiens
cactggtggctcctgctagtctcctatgctcctgcctctctgccaacttgctccaatgaagagagcacgtgagtttgggccaggcgctgtggctcacgtttataatcccagcactttgggaggccaaggtgggcagatcacttgaggttaggagttggagaccagcctggccaacatggtgaaaccccatttctactaaaaatacaaaaattagctgggcgtggtggcacatgcctgtaatcccagctaatagagaggctgaggcaggagaatcgcttgaacctgggagtcggaggtttcagtgagctgagattgtgccaccgcactccagcctgggcaacagagcaaaacttcatctaaaaaaaaaaaaaaaaaaggctgagtgcagtggttcacgcctgtaatcccagcactttgggaggccgaggtgggcagatcacgaggtcaggagttcgagaccagcctgaccaacatggtgaaaccccatctctactaaaaatacaaaaattagccaggcatggtggtgcacgcctgtaatcccagctactcgggaggctgaggcaggagaatcacttgaacctgggaggcggaggttgcagtgagccgaggcactccagcctgggcaacagagcaaaaagcccatgagtttaattgttggatcctctcctttctggctatactcaccacatgaagatttcacccagtcttagggcttcatgcctactctacactgaggccacctgcttctccagccttgagtctgaactgcagactctgatctatctgcctcagccacacctccacctgatgtctaacttccacctaagattaaacatatcatgtccaaaaccaagcccctgacattgcaacctgctcttccagtcttcctcatctcagctaacagcaattccatctttccggataatcaaatcagaaaccttggattcatcctcaatgtctttttccctcacacattccttatgcgatcctccccctgcccctctacctctgaaatataaattagccgcggcaccacgcccagctaatttttgtattttttgtagagacagggacccaccatgttgcccagcctggtctggaactcctgggctcaagagatactcccgcctcggcctcccaaagtgctggcgttacaagcatgagccaccgtgcccagcaataaccattactgaataaatcactcaatcagtttgcttgtaactctatcactttgggacgtcacgcccgtaatctcatcactttgggaggcccaggtgggaagatcgcttgaagccaggagttccagaccagcctgggaaacagagtgagacccttcatctctacaaaattacaaaaattagccttgagtctgtagtcccagctactcggcaagctgaagtgggaagcttgcgcccaggaggtcgaggctgcaatgagctatgatcgcgccactgcactccagcctcggcgacacagcaagactcactctcaaaaaaaaaaaaaaaagtccaaacaaaatctacggatgagccccagaagctcattttgcccagggactacagtctccccatcccatgaatggggtctggcttgcacaaggaatgcagaggcctcagcctgtcctgtgacaacgttaagtccaagagcgccaaaaggggatggcagaggagtcatcccccgaatctgctggtacccaagaggtggggggttggctgttcctccagactcactaaagcttcggcatcgcctcccgacggccgccgggaggagccaggcgtcccggtagtcgcgcttggaaggatggggtcggggggagtcagtctccccgaccggctttcccccaagctcgaggtcccaggagcctcctccaggaccccgtaaacgcacggagtagaggaacttccagtcctgcccacccccaacgcccactcgcacgagccgcaccagcactcaccttctccagctgcgaaagctccgttcacccgggagatagtgacttccgactcctgccggaagcggaaacccctctcctactttcaggtcccggccacccccatcccggacagcccagcaaataggccctgcctccttcgccgctcctctgagcgcacgcgtactcaaatagcagcgctccgacggagacgcagtgcgcctgcgcaagagccggtgcgtatttgcctgtacctacgcgcgatgccagtacttctggtcagtttccaggagcggcaagtgaggaatatgaaataaccttatggctgaatcagggtgaaggggaagcttgtaagcatggaagacgctctactcaaactaaaaagttcaagttctgatccagcagatgaagagggaggcctgagaggctgctgttctaactcgctcccaggtgacttccatgctgctgatccgcagaccacattttgagtgcccagattgtagtagatgaggttgagtggacaggctggggccagattccatggagcctcgtgggccgtgttaaggatttttattttttatttttgttttattttattttatttttttgagacggagtctcactttgtcgcccaggctggagtgcagtggctcgatttcggcccactgcaacctccgcctcccaggttcaagtgattctcctacctcagcctcccgagtagctgggattacaggcgccggtcaccgcgcccggctaatttttgtagttttttttttttttttttttttgagtagggatggggtctcaccatcttggccaggctggtcttgaactcctgacctcgtgatccacccgcctcggcctcccaaagtgctgggattacaggcgcgatccacccgcctcggtctcccaaagtgctgggattacaggcgtgagccaccgcgcccggccaaggacttttattggtttttatttttggttttgtttttttctgagacagggtttcgctccgtcgcccaggctggagtgcagtgacgccatatgggctcactgcaaccttagcctcccgggttcaagcgatcctcctgcctcagcctcttaagtagctgtgattacaggtgcgcactaccatgcctggctaatttttgtatttttagtagagatggggtttcaccatgttggtcaggctggtctcgaactcctgacctcaagtgatccatccacctcggcctctcaaattgttgggattacaggcatgagccaccacacctggcctgaaaaagatatttcaagatggagagagagaggggttagctgtgtcacgtgtccctgagttgaagaagatgaggaaagagaattgacagttgagtttggcaagggtctggtccctgcggaccttgataagagctgttgcattagagtgttcaggaagataatttgtaatgaaatgtatttcgaatacagatgctctttgatttacgatggggttacatcccgataaacctatcataatcaagtcaggggctgtctgtagagggatctctaggatatcccctagggggcagtgttaccctggtaaccgtcaagtgtaaccagtagaactgccctcttgtgagaccctttttcagtgctggagcaaactagaatacacacaggatggaatcatactatacagttaccgtgcaacttgctatttccacttaaccatctatacacgtatacctaacttttgtttttagtagctacatgattcatagtgcaactctgccatagtataatcaacggttatcctactgatggacaattcctggactttcctgagttttgccactgtgatgatgcagtaaatgtccctgaatcagtatccttaagactggatctttagtgaagcatagttttcaaaaaatgacatttgtgagtacagtgtctcaccccagtaaccccagcactttgggaggccgaggtgggaggactgcttgagcccaggagtttgaggctagcatgggcaacatagtgaaatcctgtctctaaaaataaaataaaataaaataaaaaacaataaatgatggcc

SEQ ID NO: 1560300 - DNA, 4001 bp, Homo sapiens
cccatccacccatgtatccttccacccattcttacatccattcctccatctatccatcttttcatctatcttcttccatcatccatacatccatccatcaattcatccacccattcatccttccacccattcttccatctgtctatcaattctcccatccttttgcccatctttcaccagccatctatctatccactcatctgtccattcatttatccttctattcatccattattcattgaatccatcctcttatcatccatccatcaatcattcatcaaataagtatttaagaaacccaccatccataagaaactgtgtcaagtaccaagaggaaccatacatgatttctgccttcaacaatcagagataaatcgtttcatccatccttcagtttattcatccacttctcatccatccttccatccatccattctttcactgttcatccattcttctatccacccatccttcctttcattctttaatcttccttcaatccaccacccatccaatgagtattcaagaaccctatcatctataaggaaatgtggtgggtaccaagaggaaccagatatgatagctgtcttcaaacagctatagataagacattggcaccaatatctaccacccaacatggaaaataatggcagatacaactggtagtattaaggccctgatagggtgcccaagaggcagcttagcccacagcctctgccctctcgttctcttaagccaaaataatttcacagtggagcggtgagaagataatagcacccaaccaaccagggttcaaatcctacctctcccatgtttcaactgggtggccttgggaaggtcatttcacctctctgaactccaagtcagtattcctatctgtttagtggagataaaacctaaactatagaagccattgtgaataattacaggcacacatggggctgtaaagtcactgaagtatagtgtaccttcaaaataatgagtccttctgcttctcagcagcaaatgaccccagatctgaaacaaaacttcagtgtaagccttccctccacctctaggcgcacacacacacctcttctattacatatttaggctgcctttggagggagaagcaacaggatctcagtaagctctttttgaatctcaactttctttttcctaaaatagggagagtaagccttaccttggagaaatggtccaaacattgacagaaccatgaagattttaatccactaccaagaatttaataagtaattcacccagtctcttaacaggtaacttgttcccttttcttcagtttcttccctaagcttgggattcaggcaaccttccttagcattacatcattcatagaatctggtttaacccatttctttgagtttattaacagagaaaggacctcacccacaagaccaccttccctactttctctggctgtccccttccagaaccaatatggcagccaccagctacttctggttcttgagcacttgaaatgggaaagttcaaattgttctatgttgtaagtgtaagatacctattgattctgaagacaaagtatagggaaaaaatgtaaagtatctcattaataattatttgtattcattatgtgttgaaatgataatcgtttagatatacatggattccacagaacatgttattaaaataaattgcactcttcttagttttttaaagtgcttctgctataaaacttacaatgatttatgtggctcgtattatatttctagtgcaccatgatgctctagaccttccttctttgctatgggggccctaagaccccacttgtcacaccctcccaagtttccgggtcaaaatgtacctttgagagagttcttctgggccctggctctctccacgatctctctttaaggttctgctcccaagagctctggattatctggggattggttgaatggctttggccccagcctgtctgtaggacacaaaggcagcttctcaaaggagggttcttcatcagtggttactgtcagaaggcagtctggatgagatcagctgtggttaatttatgatgtctggagataagcccatgcatatccacgaggcccataaaattcagtcaagtgtacacagaaggggccttgcgggggctggggtcagggacaagaatatcaatgaacagaggagggaacgttcccagaaattcagctatgaggagctggagaggtttcagctgaacaatgaaaaagccctactattttcttttcttttctttctttctttttttttttagatagaattttgctctgttgcccaggctggagtgcaatggtatgatcttggcttaccacaacctccacctcccgggttcaagcctttctcctgcctcagcctcccaagtagctgggaccacagacacatgccaccacacccagctaatttttgtattttttaggagagacagggtttcaccaggttggccaggctagtgtcaaattcctggcctcaggtgatctacccaccttggcctcctaaagtgctgggattacaggcatgagccactgcacccagtccacattaacctgctaagggatttttggatctcgtatggctaataataaagggaaactgattgaagaaatacttgcagaatgggaaactgatgacatgcaatgcagtgaagagtgacatgaaacaaagatgttaaaggggagaatgggtggctccgcaaatgtacaatgtcttagcacacttggtcttcataaagtatcaataataatagcaaaaaggcagtgtgccagagaccacccattatgttgtagaatataatcaagatctgtaaaagatgttcaaacaagaaggaaagaggtgccaggcacagtggctcatgcctgtaatcccagcactttgggaggccgaggccggtggatcacctgaggtcaggaattcaagaccagcctggccaacatggtgaaaccccatctctgctggggtctgctggcacaccccagcacaccccaaaaataaaatttttgtatttttgtaaaaatacaaaaattagctgggtctgctggcacacgcctctggtcccagctgcttgggaggctgaggcaggagaatcgcttgaactcaggaggtggaggtttcagtgagccaagatcacgctaccgcactccagcctgggaaacagagtgagactccatgtaaaaaaaaaaaaaaaagaaaagaaagaaaaaaaaagaaaagaaaaaagaaatgttagaaataagtgaaggcaacagtcatttccaaaaactaggattcctcaaaggtatttttaaagtcttggataggcttttatttcataagagtttctaatttgatagttgctgacatttttgacagtttagttggggggagggctttcttttgacacttttttccaaaggagattccatcttactgagaaaaaaaaatggagatgaaaagatagcccgttttccacaatttttttctgagacagggtctcactctgttgcccaggctagagtgcagtggtgcgatgatagctcctggcagcctcaaactcctgggctcaaacgatcctcctacctcaacctcccaaagtgctgggacaacaggcacatgccaccatgctcggctaattcgtcaattttttttttgtagagatggggggtctcattatgtttcccaggctggtctcaaactcctggttgcaaacgatcctcctacctcaacctcccaaagtgctgggacaacaggcacatgccaccatgctcggctaattcgtcaattttttttttgtagagatggggggtctcattatgtttcccaggctggtctcaaactcctggttgcaaacgatccccctaccttaacctcccaaagcactgggattgcagacgtgagccgctgtgcccagcccctcttctaagaatagtaactaagggccaggcgtggtggctcacgcctgtaatcccagcactttgggaggccaaggcaggtggatcaccttgtttgag

SEQ ID NO: 1560301 - DNA, 4001 bp, Homo sapiens
ggaacctggacacctgcatcatggcaatttaagtttgggtttgaagctggcccctgctctgccactcactcacgatgagaccttgtgtggtgcctactctgagcccgtttcctcttctggaaaaaggggctgacacgaatacctaccacctcacatggctgctgtgaggacatctgagttaatacttgcaaagcgtggaaccgctaatgctgggcacgtggcgactgatcaggaaagccgctctgaaattattactgctgtgatgaccttttaaaaactgaggtttgtctcacaggcaagggggcatttaaagagtgtttctcttctttcatgtcccactttcccctaacctgaggcaaatctgttagtaaatggttgttagtaaatgtcatacgacgggaggcacccagactccaagtcttgacttctcagggcaccaatgttaagtgtctaggagaggacgttgcctgactcaccgatctcaaatgagtgctccagcagcagccccaccgtgccacaggcctcgccctctcgaccttccgccccagcctgcagaggacacagaaggccccaggtgaggaccacccaagccctcagcatagtagtcacccacagaacccaggacagacagactggtgggctgagggaggagccttatcttcaagttaatcactgctgcttgcctttatttcactagaaaccacccatttcatgaatattcatactctgcactccctcacccccagaaaaccagaccctacaaacatgcctaacctcattgccaaagcaactatcccaaggtcacttccaagccttgcgccacaaatactcatgagttaaatgacactctccctctcccaagccttctttttcatgctaatattcaaatggcctccttatcacctgacagcccaatagccaagatgcagcctgagttcagtccctattaagcacattcaagattcatgctttccttttctccaacctccaaacttgcatactcacgcatatttaggagacaaaactcatctccacttcctcaagagccccctcccacgccttattttctttttctgagacagggtctcgctcagtcgcccaggctggagtgcagtagcgtgatctcagctccctgcaacctctgcctcctgggttcaagcgattctcctgcctcagcctcccgagtagttggaattacaggcacctgccaccacatccagctaatttttgtgtttttagtagagacggggtttcaccattttgagcaggctggtcttgaactcctgacttcaagtggtccgcccgcctcggcttcccgaagtgctgggattacaagcatgagccaccgcgaccggcctaattttttttttttttttagtattttttgtagagacagggctcgctatgttgcccaggctggtcttgaactcctggcctagagcaatcctcccgcctcggcctccctaagcgttgggatgacagatgagccaccgcgcccggcttcaccttgcctctttcatttcaaccgcccggacgtcggattctccaagattccacacccccagccccgccccctcatacatattcccgagccagagccttccgacaggtgcgcttgtcctcccacccagtccttgcaacccggtgcactggcgaggcccctcctgcgcgtgcgtgactgaggcctggctttccagggatctcccacctcttccctctcagccctgcgcagcctccttccgtctgtaactcacctaaagacccaagacctgcgacatccgtagaccgcgcccgctatgcacagctaaagagcactcacccctcgcgcaccagtcccggcccggcagccgctgccccgggctcgactgggcgctgctaccgccatcagcaagagcaggagcagccgggttgccccagcgctggctgccgccatctcggcttcttcccaccagcgaagggacggctgtgagccaagagccgcggagcacgccgggaggaacaggccgcatcctgacgcccgtgcgcctgcgctgggccccggcacctgcgcactggcacccgtccgcacctggggcctgacgtcagcaggatggggccgcccctttggcctgatctccaggagccgccccctccagggacgtcatcacaaatcaggagcccgctcttgtgtgacgtcataaagcccgctccgcatcatgacgtcacagtgcgcgtagtcccgccccctcgctttctccctctgctcctccgtccgctcccgtcggacggggacattgcaatgaggcgggatcgcggccctaagccggccctgggtggagctggcgaggtggaaccaggtgggatggcaggtgagagaggggagccaggcctagaggggttggacctggtgaaggaaccaagtaggatggggccggcaattcgggggcatctgataccccgtcctctccgcggggctgtgccgggccctctcagttgggaagccaggcacagcctcccaggatcgacccccagacttcgtcctggtaaaatgcctcctggttgcagcctctcccacgggccgtcccagacggctccaacgctacctccagagcggcgaattcgaccagtttcgggacttccccatctttgagagcaacttcgtacaggtagggagccccagaaccccctcatccccagcctcggcctgcccctcgacctcctcctgacttggaaagcccctgctcccccataacgtccatctcgtgggattcccgactcccaactcctatgtgatctctgacaccccatacttctagttctctagattctttgtgaaccctggcctgtaactcccttgcctcagtttccctgacttcacacccatatgattcttgaactttaatttcaagatatctggcccccagcctgattttcaactcacctggttcatgaccttttcccctaccaagattcctaacctctgatccctcctcagttctgccccgacatctatcctgccccgacctctgacctctggccccaggtgactcggttgggagaagttgccaacgaggtcaccatgggggtggcagcctccagtccagccctggagctcccggacctattgcttctggccggccctgccaaggagaacggacacctgcaactcttcgggtaactgcccccacctcagccgagaccccttcctccctcagctccaggcacctgagcccccagcagtacctcccctcgtccagaccacccccagggccaggagctggcagtgctaccggccctccctgagctgccatctacccgggagaacaaggacagagcagccctcaggggccagaaatcagagattagacagacctgaaggggacagtcctcagccatgccccagcagcggtcaggagaatgatcatttccgcagggcctgctcatgccagacgcccctaggccgcgcatacgatctcacctctgacctcatatcttcacatggtggggtcccttagccccatccgccaaagagctaaactgaggctcagagagccgggagccagttgcccagggtcccactgtggctccagagtgggccaggattggaatgccaagcttgtcatgattgtggatctcatggttcttgagccctcctgtgcctcactccacactgcccctttacgtcatattttttcattgaaaaagtaatgcagatcgggtgcggtggcccacacctgtaatcccagcactttgggaggccaaggcaggcagatcatttgaggccaggaatttgagaccggtctggccaacatagcaaaaccctgtctctaccagaaatacaaaaaattagccagggccgggtgcggtggctcacgcttgtaatcccagcactttgggaggctgaggtgggtggatcacgaggtcaagagaacgagaccatcctggctaacacagtgaaaccccgtctctactaaaaatacaaaaaattagtcgggcgtggtggtgagcgcctgtagtcccag

SEQ ID NO: 1560302 - DNA, 4001 bp, Homo sapiens
aagtgggaggggcggagaccgaagtggcccctctcccccttttcccgcagaatactcatacccagactcattgctgaccacaaccaaggaagccctggttcccagcctggtggaagtaaaggtggtagcttagacggggacagggcgtggagctcgcccctgccatcccgcgtccacaggccgcgcagctggccctctgggctccgcagtgcagccgccgctcctccctccttcccttcgtagcccaatcgcctgccgaggcttgcccgccctgccccccactcagcgcctcccaggtccggtgcctggacctgcagagggaggtgggagcctcctgaggtcagaaggagtgagccgtcaggacttagaactcgtaacagggggaaacctctaggggtcttgttggcatcacgttttgcagacgggaaactaaggaaggaggctagtaggagtgtgcagagacacgccaaagatcactcagcccgtaggtgggggctggggacccaatcacctcctgtgctcagcctggtcctacctaccattaattatacgaccagaaaaatggcatctgttactgtgagcttacatgtgccaggcactgctcacgcaaaacatttagcacgttcccggctcatgttgatgctcgataaatccagaataggattaactatttttatgatacctaatgcttttggcaactctagtagttgtagtagcataatccattttaggaggagaggaggaggaaggttactgaagcccagaaaggtgacgttacttgttacacggacacacagccgttcaatggaagaacccatactcaacaggaatggccaccctgtcattctggctcttagagggacagaggaggacaaaataagcattctgggtcccctgccaattccagtggtccctggcactagggtgtgtgcccagaggactgaacctccaaactgagttaatagaggtgctttcatcttgacccttctgccccacccagagaggccagctgcactgtcaggccttggccagcccatcctaccaacccccacacctccaccatccccatccctgtgactcaagccctccgctccctcctgaccatccccccatcctcagccttttcccagagaccaggcctcacttcccacttttccctcccaactcccctcttctcctatctcccctcacctgagcccgacacccacagtggtccttctggtatcacacccatttgtctagggagaagggatggtgctaatgcatgggagggccagggccagaggatttgggaggtatcctagaagcaaagtcctctggccgtccctttccagtcccacactctgccctcaactcaacaccaaatccacccccaccccctctgtctgtccccctgctatggagataggggagcattccagaagcttgaggggagagagaaagggcagagttccaggcccaatcgacccccaggccgttcccccttccaatcccaggttccttcgggttctgcccccttctctcctctccgtctagccacctcgggagtacagaaggatccaagtggatggggggctgggatctaggttttggggaccagggaccttgctcttgggtcagggtcctgctgagggagagaaaagggggatcttcagcaagggagggggttggggacttgcaaggaggaggctggggcaagaagagatgggtccagccttgggcggggccaaggtcggaactgaggaggggtctcaccgttgcagtatcgcagcagcgaggacgtgtcgtacaggccgcagaaggccgggccgcgctccgccatcgccccaccacagccaccgccggcccccccggtcccagcccgggcccggtccccccaaccaggccctgcctcccgttgccatagcaacgcccttcgttccagcatccccagctcagctcgcctggcatcaggcggccggcgccgggcccggcgctggggtcatccccaggatgcccagaaaggggggtcgggacaccgcctgccaagccccccaacacaatcctagggccaggattggctgcgcccggatccccctaggtaccgtctggtcccgcccacaaccggagtatagtctctctagacccccctcctcgcccgttcagaaccaatgagagcctgtcgcgcagggcccttcaccaatagggatgcagagggattggaaggggcagggtctttcctgctttcagcctgaagcgcagccccgagctccgggaggaggatggtgtggaggaagacactccactatccccaaaacctcttcagactttcattggattttccaaaagccccctccgtaaggccagggcccgaccttagagccccaaacccgcccagggagctcttgtttatgacatctaggcccacccccaggctcttagccccacccccagaatcttgcgggtgctaaagttttattcctacccacggaatcattagcaccgcccctgaaccgccaagggtttatagtatagtacttctccagagctctggacaggaccttcttataggattagctctggcctcggaatttaaatccctccccccgcggtctggtagtccctccctaactttccccaccgctctgtctgcggccccaggcccttagctccgcccttagagccctagcctcccacaaccgcattatccagtccgggctttggcacaggcccagttgtgaggcttggactagcccgcgtgtcaggcagagatggctcgaaagttgtgggggaaaaggggagggtacaaaacccgacaatggatttcaagaatattggaccgccttcctcaagtctccaacgacggtaaacacctagagtataggcaggagaagtgaagtccggagccgaaaaagaattccctctggacacagagatgaaaagtagaagttttggaagcagattgacctgggtttgaatcctgactcctccactttctggtttcgtgaccctaaagctccacttcctcatctggaaagtgggggctcataatcgcgcctgcctcattcattcattcaaaaatgtttactgagtgcctaacgggccaggctctgttctaggtgctgaagttttcggaatgaccaagtgaacctgtttcctctcatgtattgttcatttaatggaagaggtaaacaatcatacacaaaataaataacaatacctaacgtttaatcagcagtcactatgggcaaagcactcagttatcctcaccaaaagccctattttgttgttgttgttgttgttgtttgcttgtttgttttcgagacggagtctctctctgtcgcccaggatgtagtacagtggcacaatctcaactcactgcaacctccgcctcctgggttcaagcgattctcctgcctcagccttcagagtagctgggactacaggcgcacgccaccacgcccagctaatttttgtatttttagtagagatggggtttcaccatgttggccaggatggtctcgatctcttgacctcatgatcctcccgcctcgtcttcccaaagtgctgggattacaggcgtgagccaccgcgcccggcctatttttttatattttaaaaatattttgtggagaattgcttgagcctgggaggcggaggttgcagtgagccaagatcgtgccactgtactccagtctgggcaacagagctggagagcagaggcgcgatcttggctcactgcaatctccgcctcctgggttcaagcgattctcctgcctcagcctcccgagtacctaggactacaggtgcctgccaccacttccagctaatttttgtatttttagtagagacggggtttcaccatgttggccaggctggtttcaaacttctgaccttgtgatccgcccgcctcgacctctcaaagtgctgggatactttttccttttttttttttcttcttaagaaactgggtctcccactgttgctcaagctggagtgcagtaacatgattatagctctct

SEQ ID NO: 1560303 - DNA, 4001 bp, Homo sapiens
gacaagtagcggcggacactgctaaaagagagcacacaggtgggggcagagccttctaggccagcaggcgagtgccgtgagcaagcgagattctccctgcaccctctgctgctggagctcaggcaaacaaaccacctctgtctcccacgaggtcttggaagaggctgggggtcccggccttgtgccttacctgcgcccggaggtcgcctccttcttgggagaggatggggacgtggcatagccacccacgcgccgcgggggtcccgagccattaaggggcgtcctggtgggaaggcctttcaagagctgacacactggagggatggggttaggggacagaagagggtgagtataaggaccaggccccggtcctccccatcccacccctccagtctaacggggatacccgaggcagtggtgcctaagcgcggaggcgcccggcccttgggggtgccccgcgcgcgtagcgccgctccctgttcttcgcatgcccgcaggcgacgcagagcatccgccagcgccgcctttaggaccgccagctcgtcttcctgtaactgcagccgctgctccagcgccgacacgcggtcgtccacttccataccgctcgtgcccgacaaattgtcatctggaagacgggggagtgccggctgcagggccacccaggagctccagtgcccaaggggtccctcccgccttcctgggtctaagcggggggccagccacgcccctttcctgtcccgctacctggggctgggacacttggacatgagccaaggaagaggactctgaagggggaaggaaatccccacagctctccaacccatccgcacactcctctctgccacagcgcgctggccgtgtgaccttggggaagtcccttccctcttattttctaagagtctgtgaacccaggagcctctcgctctggctttaagatgctatgactaagacgtgaccaggcgcagtggctcacgcctgtaaccccagcactttgggaggccgaggcgggcgtatcacgaggtcaggagatcgagaccatcctggccaacatggtgaaaccccgtctctactaaaataaaattaaattaaaaataaaataaaatttaaaaaaaagccgggcgtggtggcgcgtgcctgtagtcccagctactccggaggctgagacgggaatcgcttgaacccggggggtcggaggttgccgtgagccaagatcgcgccactgcactccagcctggccacaaagcgagactccgtctcaaaaaaaaaaaaaagaaaaaagaaaaagaaaaaaaagattctttgattttatgactaagacgttaagtatctatgagtgataagagcatttgcaaaatgacaccaacctactcctaatgacactaaagttctagaattgatccccaacatcctccgacgaagattctgttatgaataccaacgtctcttcactgtttctaagactttccaagccaaaaggtcatgcctagcctccccgtttcccctcctctcctcaccctggggttcgaccctagagccagctgcaaggacagagcttcggcggcccctggcggcggacttgggggttgcaggcagcgcatggcagacccagaagacccaagggagatgcagaccggattgacaaccaaactcttccccagcaggcattcctcttttctgttccccttctttatttcgcctctgtaccccgcgccccagatttggctctccagcctatgggtgcagccaaaatgactccccgagtcgcccccccaaccccgctcattttcccaaagtgggaggggcggagaccgaagtggcccctctcccccttttcccgcagaatactcatacccagactcattgctgaccacaaccaaggaagccctggttcccagcctggtggaagtaaaggtggtagcttagacggggacagggcgtggagctcgcccctgccatcccgcgtccacaggccgcgcagctggccctctgggctccgcagtgcagccgccgctcctccctccttcccttcgtagcccaatcgcctgccgaggcttgcccgccctgccccccactcagcgcctcccaggtccggtgcctggacctgcagagggaggtgggagcctcctgaggtcagaaggagtgagccgtcaggacttagaactcgtaacagggggaaacctctaggggtcttgttggcatcacgttttgcagacgggaaactaaggaaggaggctagtaggagtgtgcagagacacgccaaagatcactcagcccgtaggtgggggctggggacccaatcacctcctgtgctcagcctggtcctacctaccattaattatacgaccagaaaaatggcatctgttactgtgagcttacatgtgccaggcactgctcacgcaaaacatttagcacgttcccggctcatgttgatgctcgataaatccagaataggattaactatttttatgatacctaatgcttttggcaactctagtagttgtagtagcataatccattttaggaggagaggaggaggaaggttactgaagcccagaaaggtgacgttacttgttacacggacacacagccgttcaatggaagaacccatactcaacaggaatggccaccctgtcattctggctcttagagggacagaggaggacaaaataagcattctgggtcccctgccaattccagtggtccctggcactagggtgtgtgcccagaggactgaacctccaaactgagttaatagaggtgctttcatcttgacccttctgccccacccagagaggccagctgcactgtcaggccttggccagcccatcctaccaacccccacacctccaccatccccatccctgtgactcaagccctccgctccctcctgaccatccccccatcctcagccttttcccagagaccaggcctcacttcccacttttccctcccaactcccctcttctcctatctcccctcacctgagcccgacacccacagtggtccttctggtatcacacccatttgtctagggagaagggatggtgctaatgcatgggagggccagggccagaggatttgggaggtatcctagaagcaaagtcctctggccgtccctttccagtcccacactctgccctcaactcaacaccaaatccacccccaccccctctgtctgtccccctgctatggagataggggagcattccagaagcttgaggggagagagaaagggcagagttccaggcccaatcgacccccaggccgttcccccttccaatcccaggttccttcgggttctgcccccttctctcctctccgtctagccacctcgggagtacagaaggatccaagtggatggggggctgggatctaggttttggggaccagggaccttgctcttgggtcagggtcctgctgagggagagaaaagggggatcttcagcaagggagggggttggggacttgcaaggaggaggctggggcaagaagagatgggtccagccttgggcggggccaaggtcggaactgaggaggggtctcaccgttgcagtatcgcagcagcgaggacgtgtcgtacaggccgcagaaggccgggccgcgctccgccatcgccccaccacagccaccgccggcccccccggtcccagcccgggcccggtccccccaaccaggccctgcctcccgttgccatagcaacgcccttcgttccagcatccccagctcagctcgcctggcatcaggcggccggcgccgggcccggcgctggggtcatccccaggatgcccagaaaggggggtcgggacaccgcctgccaagccccccaacacaatcctagggccaggattggctgcgcccggatccccctaggtaccgtctggtcccgcccacaaccggagtatagtctctctagacccccctcctcgcccgttcagaaccaatgagagcctgtcgcgcagggcccttcaccaatagggatgcagagggattggaaggggcag

SEQ ID NO: 1560304 - DNA, 4001 bp, Homo sapiens
ataacttacaacagtgtctgtcagatagtaagtgcttgagttattattttggatttttttttttttttttttttttttgagaaaggagtctcgctctgtcgcccaggctggagtgcaatagcacaatcatggctcactgcaacctcgacctcccaggctcaagtgatgctcccacctcagcctccagagtagctgggaaccacaggagcatgccaccatggctggctattttttttttctttttcttttcttttttttttttttttttttttttttgagacggagtttcactcttgtggcccaggccggaaagcagtggggcaatctcggctcactgcagcctctgcctcctgggttcaagcgattctcctgtctcagtctcccgagtagctaggtttacaggcacatgccaccacactcggctaatttttgtatttttagtagagacaggatttcatcatattggtcaggctggtctcaaactcctgacctcaggtgatctgcccacctcggcctcccaaagtgctcagattacaggcatgagccaccgcgcccggcctgctattttatttcctgtaaagacgaggtcttgctatgttgctcaggctggtttcaaactcctgggttcaagtgatccacccacctcggcctcccaatgtgctgagttagtgttttatcagtccctgtgcatggggcacatactatgagctcagtacctttacacattatttcacaggtctatggacctgagatcataaaattcatttttcagagtcaagacgacttttccagggtcacacggccaggtacgggctggactggggtttgaacccatctctgtcagactccagagcccgggcttccagccattcccaactctttttgctcaaatgcaccaatcccactctggccacatagcccttgaacgtgctgtgcttgttttgtgtgttgcccaggcaggtctcaaactcttggcctcaaacgatcctcccaaagtgctgagattacaggcctgagctgccttgaccgcctttctatttcctcctggggggatgggagcaccaaggagattccagcaaaaggatacacccactccagcttgagccggcaagaaggcagctccgagcgtgtgtccaggctgtaggtgggtgccagctcgtctgggatcatcatgggcacagggcggcccctcaggaacattttcacggagccatcctctgccaggacacccccagaggtcaggcactgacaccagccccatccctattccctctcctcttccagctttatttatttatttttttaaaggcagggaaactgaggccagagaggcaaagacccagtagccaagactcctgacctctggctccagcctgtcaccccaacaagcaagcttccaccgagcccttccccatctccccactcacccacactgaagataacttctttggttttgctgtcaggaaaggacaaagaaaaaaaaagggtcttagtattcagttcagaaaaggggagaaaccattcctccacccccaccgctccccggaggtctccgatgaaaacggggccgagtaaggggcagagcgctgcctctctgcaggccgtgtgctttgctcggttgatcttgcagagcctaagacacaggcccagagaggcagtgatcgccaaagatcacacagcacgaagtggcagggacgcgatcctggaagaagggagtcaccaaggacccttccctcctaatcagcaaggtgctccccagcgccccccacccgcagttcccccagcacaccaaacgtcaagcagagggagaaacggggagagtttaagggaaggggcgtgtccccacgccggtctgggtcccaggggttgggtgaaacctgagatctaagccccgggagcgcggagaggagatggggggtggtctgcgaaagggtctcacccagctccaaagctactcatggcggcgggtggcggagcttcggggccgggggtggagccgggaccggctctgccgcttccggccctgggaggcgcccgggccgccgcgcccctgccccgccctccacagccacccctggagccggagggtcccaccgggtcacacatcccgggctgtggactcccgatcccaggttctttcggggtgggtgggggagagtggttgagaacatggactcgggagcgcgcctgcttgagttaaaaccccagttctgctaattcctagcagtgtacacaggtcgtccaacctctgcctcggtttcctcatttaaaaaatggggataataagagtacccggccgggcgcggtggctcatgcctgtaatcccagcactttgggaggccgaggcgggcagatcacctgaggtcaggagttcaagaccagcctggccaacgtggtgaaaccccgtctctactaaaaatacaaaacttagcctggcgtggtggctggcgcctgtaatcccagctacttgggaggctgaggcaggaaaatcattcgaactcgggaggcagaggttacagtgagctgagattgtgtcattgcactccagcctgggcaacgagaacaagactccgtctcaaaataaataaataaataagagtactcacacctcccgggggtagttgcgagggtgaaattggttaattattgggaagtgcctggagtatacacaacgctgtatttgtgtttgctatgtttgagcagagttgaaatgtgcagcttttgaccttggtcttgcccttgcgtggcctcctagcgctgaccacgcccactgcaccataactccagccttagggtgatttttgttttgttttgtttttgatacagggtgtggctctgtcgaccaaactggagtgcaatggcgtgatcatggctcactgaaacctcgaatttcctaggcttaagtgagcctcctgccgcagcctcccaagtagctgggtctacaagcgaaggccagcacgcccggctattttctttctctctctttttttttttgttttttgttttttgttttttgtttgtttgtttaacggagtcttgctctgtcagcaggctggagtgcagtggcgcgatctcagctcactgcaacctccgcctcccgggttgaagtgattctcctgcctcagcctcccgagtagctgggactacaggcacgcgccaccacgcccatttttgtattattaatagacagggggtttcaccatgttggccaggatggtctcgatctcttgaccttgtgatccacccgcctaggcctcccgaagtgctgggattacaggcgtgagccaccgcgccaggcctaatttattttcatttttagtaaagacgagggctcgctattttgcccagcctggtctcgaactcctgagctcaagcgatgattcccgcctccgcctcccaaactgctagaattatatagccttagtttttgactctgtccagatcttcagtatggccccgcctctggagttgaccacgcctgtcattctgagcctcccttctaaccctgtccctgagttgactcagttgcttgagaattgactgctacctcccgccaacgctccttctccggcccgccaggcattctgattacgtccattttcacgtattccttatgtgaataccttcgaggcctccaagttggctgcacctcttggcatttgaccacgcccctacggccccgcccaacctttaagccacgcccttttcaacctggcagtgccccccgattttgatgtcaaagcttctggaatctggaatgcctccacctggtctcagcctctgttactccgtaccccagattttaatttcgcccaggcgaacactgtggctgcacccttaaattcctcagactccctctttccttgtagaaactctgtggctgctgccttgacttcatccctgaaactcaacggggcctctcctgtaccttaataaccacgcccataagccaagctcctccctgacttcctcacccagtagacctgaccgtccagcttcta

SEQ ID NO: 1560305 - DNA, 4001 bp, Homo sapiens
agggtcaggacagggaggaggcatcggaggtagagctaaaagggttaacctggtggttcatgcctgtaatcccagcactgtgggaggccgaggcaggtggatcacttgaggccaggggttcgagaccagcctgggcaacatggtgaaaccccgtctctaccaaaataaaaaaattagccgggcttggtggcaggtgcctctaatcccagctacttggggggctgagacaggagaatcgcttgaacccgggaggccgaggttgcagtgagccgagatcgcaccactgcactccagcctgggggacagagtgagacccttgtctcaaaataaatgaaataaaataaaaaagaaatactaggtaaagggggtggggccagaatgcctttagaggaggggcgtggcaagattccaaaggggaacagaagggccctgagctccaagtaggcttaccttgtccaaagtggccacgaaaagcagtataagaatgaggatgtgaagggctgagaccaccagcaagaggagtgacatggctgcagtggaagcctggggagggggagcaggggacggagtctcaagaggttggcacaggccaggcacactcacgcctataaccccagcactttgggaggccgaggcgggaggatcacctgaggtcaggagatcgagaccagcctggccaacatggtgaaaccccatctctactaaaaatacaaaattagctgggtgtggtggtgcacacctgtaatcccagctactcgggaggctgaggcaggagaatcactggaatccaggaggcaaaggttgcaatgagccaagatcatgccattgcactccagcctgggtgacagagaaagactccgtctcaaaaaaaaaaaaaaatttggcataaaggcaggtgagatgtctcctgatggaggaagggcatgggtgcagactcctgggtctctcagggaggagaccgctggggcctggattcctgagatccccattggctggaggggtggagagggccaaagatggactcttgggttccttgaatgaggaggactagcaatgtggctcctctctccccagaaccctgactctgggttacatacaggccagatagtgaaaattcaagttgagaccccaccctgcaccccgacatcaggattgaggagctgcccccagcaacaggcattcttgactcacaccactcctctcctgggttgaggggaggagggggacctggtgagtcatctggtgactcatccccacccccccccatctctaagcaccagggaaaccccagcccctggctatgtccacgaggtcctcaccccaccctgctgccagactggtgactgttggacatcttctggaggaaatggataggattcgcgctggggggaagagaggcccaagaaggagttagcctcccaggactctttggtgcccaggaacaggggacctagaggtctcccagatttggggtgttctcatgcaatgccctgatctcagggaccccagaggacagtggacaccgctgagggaaaaactgcaggaagttttccagtggagggctctgctgggaccccaaaactttgccgggccccaccccttcccatatccccacctcaagtgctaagagatcacttattaaattaaaaggatttccaagagtcagggacgtctctcccagcctgggggtgtccttcccaaactgctacattcccaagtaaattaagaagtcccagccctgaataacggactggaaacttaccgagagccgcgaaaaaagtcagagctggagtcggagtcttgtccctcgctcgggcctccgtgccccgcccttctcctccctcctttcaccctcccgaggcccccgcctctctcaccgccttcctccctcccttgctctcccctccaatccagaaccctttctctctcgctcgctctccttctgcgtctcttctctccctcctgccctcactgtctgggcctccttctctcttgctcccgtttctctttctctcctcctctcaatatatactgacccttttataaacccaccctcaccgcacccagctgaggtcggctgccagtgggagggcccaggcactccggttcctctttctttgggcccccacccaatccctccagacagacatcatctggggctccctcccagggttgagatgagaaactcttggaatggggttcttggggggggcaagcgtcaggggtgggagggcccgattctcaggacccttgagttttgaggtcttgccctggggccggatgtctgctttccctgatggagcttggagctggataggagtctgggaaaagaggccagatttctgtggcatggacttgagattgggctggtgaagttggccccgtggtggggggtcagaggatgggagatgaaatttgtgaaactcggcagggcgttgtggctcacgcctgtaatcccagcactttgggaggccgagacgggcagatcatctgaggtcaggagttcgagaccagcctggccaacatggtggaaacccgtctctatcaaaaatacaaaaattagccgggcgtggtggcgggcgactgtaatcccagctacttgggaggctgagccatgagaatcgcttgaacgcgagaggtggaggctgcagtgagttgagtttgcaccactgccttccaacctgggggacaaagtgagattctgtcgcaaaaaaaaaacaaaacaaaacaaaaaacaaacaaacaaaaaaaaaaaccttgtgaaactctggaagcggggaggaagcggaagctaagaatcccagcgccatcatttcctggttcagtgaccttgagccaattatttcacccacctgggctccagtatcttagtctatgttgagagtataataatgctgacaaaatactaatactgataataataattctgatacttatgctgaatgaataaggtaatactggcacactcacacacctaacctgttccttccttcatcaaacatttattgaacatgtactctgatctgggagttaataatgaaaacagacatgagccctgctggtattatggagcttgtattctagtagaggaagacagacaagagaaaacatcaatgatgaagataaatctcagataaggataagtgacttgaaaaataaatacaataggctggacgtggtggctcatgcctgtaatctcagcactttgggaggccaaggctggaggatcacctgaggtcgagagttcaagaccagcctggccaacatggtgaaaccctgtctctactaaaaatacaaaaattagccaggcatggtagtgggcgcctgtaacccagctactcaggaggctgagacaggagaattgcttgaacccgggaggcggaggttgcagtaagctgaaatcacgctactgcactccatcctgggtgacagagcaagactccatcttaaagaaaaaaaaaaataaaagaagaaaagaaaaataaatacaataataaatcaaacagagtgatggagataatgacagagtgcagggaagactacttgaaacaggaaaatcagggaaggcctcttggaggaggtaacatttgagctgaagacaggagtcatttgaacgctggggttggggagtggtgggggggcgtcggggggagaggaagtgcaaaagctcttaaagcttttgagaacaagctcaggttgtttagggagcagacagaagggccagtgtggctggagcacagggagacagagggagtggtgagaagggaaatcaaagggtgcccttgaagactaggggaggggcttggatttcattctaagtgcagtggaaagccattaggttttaacagagtgtagtaccaaagatttttattttttttttgagatggagtcttgctctgtcatccaggctggagtgcagtggcatgatctcagctcactgcaacctccacctcccggttcaagcgattctcctgcctcagcctcctgagtagctgggatta

SEQ ID NO: 1560306 - DNA, 4001 bp, Homo sapiens
gcccagctaatttttgcatttttagtagaaacggggtttctccatgttggccaggatggtctcgatctcctgacctcatgatctgcctgcctcagcctcctaaagtgctgggattacaagcgtgagccactgcgccctgcccattttttagtgtttaaaggcaatgcagccctgcagcatttaggtctcctgcaccatcatcattatcgccatcattatcactatcatcatcaccatcatcatcttcatcatcaccatcatcatcatcattattatcaccatcatcaccattatcatcatcaccatcaccattatcaccatcaccaccatcatcatcatcaccaccataatcaccaacatcaccatcttcatcgtcattatcacaccatcatcaccaccatcatcatcattatccctatcatcaccattatcatcatcaccatcatcaccatcttcatggtcattatcacaccatcatcatcaccatcatcttcattatcactatcatcaccattatcatcatcatcatcatcaccatcaccatcatcatcaccattttcatcatcactattataaccaccaccatcatgatcattatcatcactatcattatcacaactctttgctgattatcttcagggcagaatagggagtgttaatggttaataccattgccaacaccccaaaataacaactctgcatgcctacatttgatgtccacaggccacctatttcttctaatgtagcctgccagtcaacaagtcccacagatctaaactcccaaattctatctattattactaacaaaaattcttctactcattcattaattattttagaggtaattcagcatgctgtttaggcatacaaagtctgaagtcaaagtgcttaggtttaaaaatctggcttcaccaattaatgattgcgtggccttgaggaagttatttaatctctttgtgcctcagtttcctccttggtaaaatagggtattcagatccactcttcaacagcagaggaaacccatacttgctacttagaatatgtccccaatatcctccattcttaaatttgatccaatgaccaaaacacacaagacatagaagaaaaaccagaaacacagaagataaacaaggctgagacaaactgacacctgaagaaagagaaataagagcacaggaagggtctatctcatccttcaggactcagctcgaactgcccctcctcaaccccagacttctcccttcaacataactcccgaccacattctataacaacttctttcatagcacttatcactacctgaaattcctatgtttacttattttttggggcaacatagtatagtggaaaagcttacagactctgaagtcagactgtctggcttgaaatcctgcctctaccccttattgactaagtggccttgggaaaattattttatctcttttgcctcagttttctcatttgcaaaataggactaataatgacccaatgtcatagaaatgttgtgacaattggatacactctatgtttaaagaagttacagcagtgctaagtgggctatgatcatctgtgccttctttcctgtctgctcctacccactagaatatcagcctcaagagtgcaggaacttagtctttttttctcactgctatatcctctagtgcctagaacagcacctgacacacaggacttgctcaggtcaaatgaatgactatagagaaaaatctatcctaacagatggacttccctgagctatggaattttgtcaaaggttccctgaatgaaggtgtttgcagcatccagtctggacttatgatctcttggctggaccatccatggccctcccatttctcctgaagtctatttccaatccaggcctcccctagccccccattcagcctcacactcaccccagaagaggagcaggttgaagccacgcattatgctgtagttctgtcattcaaagaaaagaaacttttctactaacgctgggttttcagtaaccagaaggtgtgcgaagaggggaaggcggagtcagagttgctcaatgctgcctggtcatcatagccctttttgctgacttgctgcaactaaaagacagcctagaaaatcctaatttccccctttcttcacaataaagagaagttaatctgcctaatgtatatcattctctctctctctccttcccatggtctctccctttttctttcccatcaacatctatctcccatctctcaacaccttctttcattgcacccaataaaggagcttccgcttcctgcctccagtgaagcaaatctcagcctttagggtctcttcccagtctcccgtataaagacagccatcacaaccatcatgtaccaggcagtgtgctaggcacattggcaacaaagtgtaatttcattatcatgttaaccttgtaaagtaggaattcccctccctccctctattcaccaacaaaatggaaactgagacttgcagaggagttataacttgtccaagatctctcagacttgagatttgaacccaggaccctctgattccagagtcaagagctttaaccatcttattttccttcagatctcaactctgtctgacgattatacagcaacacttccaccccattcccagcttcctaactctctctggtaacatcttagggtctcacaagggcagaccctcagacaaggattctagcaaaagtagtttatcaagaaggtggccccagaaagcaccagctgggggaggagaaagtgaatcaggaaaggcaaagagccaatactgggtgtgtcttcaaataagttacatggtgagaaagtggaacttaacctccccagggatgactggggagcggcatggaacatactcttcagttattccaaccgaggggtgagggagctgaggtatttatatcccacctactgtcagtcatgggttgacttgaggcttgctcctagagggtgtcaaccccttgaatcttcaggcctggcctccaagcagatagaatgggctccagttgatgtaatcccactgataacaaagtgtagtgactggcagatattgaagcagtgtcatccatctggggtaatacccgaggttcattgcctcacaccaaggaaatagaaaatacagacatggccgggcaccgtggctcacacctgtaatctcagcactttgggagactgaggagggtggattacgaggtcaggagttcaagaccagcctggccaagatggggaaaccccgtctttactaaaaatacaaaaaatcagccagtgtggtatggtgttaggcacctgtaatcccagctactccggaggctgaggcagagaattgcttgaacccaggaggcggaggctgcagtgagccgagatcgtgccactgcactccagcctaggcaacagagtgggactctgtcttaaaataaaataaaataaaataaaataaaataaaataaaataaaataaaataaaatgcagacacacaaaaaattacttttagagcagaggtttaggccgagcacagtggctcatgcctgtaatcccagcactttgggaggctgagacgggtggatcacctaagatcaggagtttgagaccagcctgggcaacatagtgaaaccccatctctactaaaaatacaaaaattagccaggtgtggtggctcatgcctgtaattccagctactcaggaggctgaggcaagagaatcgcttgaacccgggaagcagaggttgcagtgagccgagattgtgccattgaactccagcctgggtgacagagcaagactccatctcaaaaaaaaaaaaaaaaagaaagaaagaaaagaaatttaataggcgagagaaagagaaaagctctctctcctgcaaagagagggggctcccaagtgggtcttccagtttcatggtgaaatgcacggggttttatagatgagctttaggtggtgatatctgatttacataagggcccaaagattagttggaccaggtgtgccgtttac

SEQ ID NO: 1560307 - DNA, 4001 bp, Homo sapiens
cctcccaaagtgctaggattacaggtgtgagccacggctcccagctcaaaaattttaaaatgatttatttatttttattatttatttttttttgagatggagtctccctttgttgcccaggctggaatgcagtggtgcaatcttggctcactgcaatctccacctcctgggttcaagcggttctcctgcctcagcctcttgagtggctgggactacaggcatgacccaccatgcccagctaatttttgtatttcttaagtagagatggggtttcaccatgttggccaggctggtcttgaactcctaacctcaggtgatctgcccgccttggcctctcaaagtgctgggattacaggcatgagccatcacgcctggccaaaaaaattaaaaataatttaaaaagttattttagagacagagtcttgctctgttgcccaggctgatcttgaactcctggcctcaagcgatcctcctgcctcagcctccctagcttggcttgggggtggggtttaaggaactgaggagtaggaaagggccatgagcctggtgggggtctcagctccagctgccgctcttctgacttgggggctgtctggtgtgcctgagcatttactgccatcttcatttctttagataaaaatgaaggcatggtcaggcacggtggctcgggactgtaatcccagcactttgggaggccaaggtgggcagatcatctgaggtcgggagttcgagaccagcctgcccaatatggtgaaaccccgtctctactaaaaatacaaaacattagctgggcgtggtggcagactcctgttacccaactacttgggagattgaggcaggagaatcgcttgaacccaggaggcggaggttgcagcaagctgagatcgtgccactgcactccagcctgggcgacagagcaaggctccgcctcagaaaaaaaaaaaaaaaaatgatggcgctggatcccccaggctctaagatgccctggaaccgcatgcttcctcagggacacaggtgcacacacaccacaaccgccgccagccctggcggcccatcctgaaacccagtggtgatatttcaccccgggcgcccctcccacaggaaaacgctgtggccgcctgttggggtgcatgtggcgctgcggttcccagcactcaggaagttcccctttccaaggcatgtcctgggggaccctcctcaggtcaccaggggctttagagatggggacctagggatctccttgttgttcaccagagagagagacaaagaggcagaggtagagagaaaacggagattagggagatagagagactgaaagagagacagaaggagaaagacagagagagagagagaaagaagggagaagctgggggtaccctgcagtggagaagtcctggcctctattttccccgccccccgcccatgtctttctatgcgctatattaagagcagtggctctggggtcctagcactcactttttgcccctttccttcccccgtgcctcagtttcccctcttatggagcagatgccaaactggctccagtagaaagcttgaggatccctccgggcagggtagcaggctccgagagcaccctggagttcctgccggggtgtgggggtgcccaagcaccaccagcccctctcgccgtgtgcccgtgagtgcctgcttgaccatgtggctttctccatcgccggccccacagacaccagcggcgcctcccgtttctcagacgcatccaaggggtcccgctggagcttcctcgctaccacccccagcggggccccaaagtacttaccgagaaagacgagaaagacgcggcctcccatggttccagctgagctgccggcaggagcagcaggggaaagagtgagtgggacagggctgtcccgtctccgcaggctgggcagctgtgcgggctgtcccgaggccaggactttataaaggagggggggcggacagccgctggcccagggccctccccggaactggcggtgcagctggaagccagcaggaaagcacaataaaaacacagaaccaggggcgctgcacacacacacacacacacacacacacacacacacacacgtgtactcgctcagcaagaatgaagtgcaacctgctttaaaaatccctctgctggagtttccaccatgtggctctgaccaaccctctggcctctgtgtgttccaggctggctgctgtgcaggggaaggtgtggcagccgggcggggcggtctcgcctggggccacttggctcttccctgggcaggcacgcaggggccttgtcagaaatagctctgggctcccactttggtagggctcaccctgtgcccagagctttggcatgccagagttggcagagcctgcgtcccagctggcagtatcttcccctgctgttttccagatgaggaaactgaggccaggtacagaggctcacgcctgtgatcccagcactctgggagggcgaggcaggaggatcgcttgagctcaggagtttgagaccagcctgggcaacatggcgaagctcggtttctttctttctttttaaattaattaattaattaattaattaaattttttagactttaagttctagggtacatgtgcacaacgagcaggtttgatacataggcatacatgtgccatgttggcttgctgcacctatcaactcgtcatttacattaggtatttctcctaatgcaatccctcccccaggcccccaccccccgacaggccccagtgtgtgatgtttcccgccctgtgtccaggtgttctcattgctcagttcccacctatgagtgagaacatgtggtgtttggttttctgtttctgtgttagtttgctgagaatgatggttttcagcttcatctgtgtccctgcaaaggacatgaactcatccttttttatagctgcatagtattccctggtgtatatgtgccacactttcttaatccagtctatcattgatggacatttgggttgattccaggtctttgctattgtgaatagtaccgcaataaacatacatgtgcatatgtctttatagtagcatgatttataatcctttgggtatatacccagcaatgggatcgctgagtcaaatggtatttctagttctggatccttgagaaatcaccacactatcttccacaatggttgaactaatttacattcccaccaacagtgtaaaagcgttcctatttctccacacctgtgatcccagcactctgggaggccgaggcaggaggatcgcttgagctcaggagtttgagaccagcctgggcaacatggcaaagctctgtttcttcaaaaagaaaaaaaattacctgggcttggtggcagacgtctgtggtcccagctgctactactcaggaggctgaggcaggaagaatcacccgagctggggagtttgaggctgcggtgagctaagatggtgccactgcactccagcttgggtgatagagtgagaccctgtgtcaaaaacaaaaagaaagaaagaaaactgaggcattacagtgtccacataaaagcccagggagggagaaggggccctcttccgatgccaggcaggtgccaagaagagaagcttcaccgcacagagcagaccccccggatctttctggtctttctaagccagtttcctcctgtgggaaacttatatttcagaggcccctgggcacttcgttaatcaacagagaatcatgtgataggagggttctttcctttctggataaatcatatgattagcttgtctcttgaggtacgtaatcattttttaaaacgctatatatatttttaagagatcttactctgtcacccaggctggagtgcagggtcaccatcacagctcactgcagcctcaaacttcagggctcaagggatcctcctgcctcagcctcctgaggagctgggactacagctgtgcaccatcacgtctggctagttttctccttaagtgttttttttttttgtagagacgagatctcgctatcctgcca

SEQ ID NO: 1560308 - DNA, 4001 bp, Homo sapiens
gtgggggtgcccaagcaccaccagcccctctcgccgtgtgcccgtgagtgcctgcttgaccatgtggctttctccatcgccggccccacagacaccagcggcgcctcccgtttctcagacgcatccaaggggtcccgctggagcttcctcgctaccacccccagcggggccccaaagtacttaccgagaaagacgagaaagacgcggcctcccatggttccagctgagctgccggcaggagcagcaggggaaagagtgagtgggacagggctgtcccgtctccgcaggctgggcagctgtgcgggctgtcccgaggccaggactttataaaggagggggggcggacagccgctggcccagggccctccccggaactggcggtgcagctggaagccagcaggaaagcacaataaaaacacagaaccaggggcgctgcacacacacacacacacacacacacacacacacacacacgtgtactcgctcagcaagaatgaagtgcaacctgctttaaaaatccctctgctggagtttccaccatgtggctctgaccaaccctctggcctctgtgtgttccaggctggctgctgtgcaggggaaggtgtggcagccgggcggggcggtctcgcctggggccacttggctcttccctgggcaggcacgcaggggccttgtcagaaatagctctgggctcccactttggtagggctcaccctgtgcccagagctttggcatgccagagttggcagagcctgcgtcccagctggcagtatcttcccctgctgttttccagatgaggaaactgaggccaggtacagaggctcacgcctgtgatcccagcactctgggagggcgaggcaggaggatcgcttgagctcaggagtttgagaccagcctgggcaacatggcgaagctcggtttctttctttctttttaaattaattaattaattaattaattaaattttttagactttaagttctagggtacatgtgcacaacgagcaggtttgatacataggcatacatgtgccatgttggcttgctgcacctatcaactcgtcatttacattaggtatttctcctaatgcaatccctcccccaggcccccaccccccgacaggccccagtgtgtgatgtttcccgccctgtgtccaggtgttctcattgctcagttcccacctatgagtgagaacatgtggtgtttggttttctgtttctgtgttagtttgctgagaatgatggttttcagcttcatctgtgtccctgcaaaggacatgaactcatccttttttatagctgcatagtattccctggtgtatatgtgccacactttcttaatccagtctatcattgatggacatttgggttgattccaggtctttgctattgtgaatagtaccgcaataaacatacatgtgcatatgtctttatagtagcatgatttataatcctttgggtatatacccagcaatgggatcgctgagtcaaatggtatttctagttctggatccttgagaaatcaccacactatcttccacaatggttgaactaatttacattcccaccaacagtgtaaaagcgttcctatttctccacacctgtgatcccagcactctgggaggccgaggcaggaggatcgcttgagctcaggagtttgagaccagcctgggcaacatggcaaagctctgtttcttcaaaaagaaaaaaaattacctgggcttggtggcagacgtctgtggtcccagctgctactactcaggaggctgaggcaggaagaatcacccgagctggggagtttgaggctgcggtgagctaagatggtgccactgcactccagcttgggtgatagagtgagaccctgtgtcaaaaacaaaaagaaagaaagaaaactgaggcattacagtgtccacataaaagcccagggagggagaaggggccctcttccgatgccaggcaggtgccaagaagagaagcttcaccgcacagagcagaccccccggatctttctggtctttctaagccagtttcctcctgtgggaaacttatatttcagaggcccctgggcacttcgttaatcaacagagaatcatgtgataggagggttctttcctttctggataaatcatatgattagcttgtctcttgaggtacgtaatcattttttaaaacgctatatatatttttaagagatcttactctgtcacccaggctggagtgcagggtcaccatcacagctcactgcagcctcaaacttcagggctcaagggatcctcctgcctcagcctcctgaggagctgggactacagctgtgcaccatcacgtctggctagttttctccttaagtgttttttttttttgtagagacgagatctcgctatcctgccaagaaaatgctattatttatggagcacttaatttgtaccaggtctggtcctaagtgctttttttttttaatctatattaactcatttactccttaaaacatctgcaatgatgttgtcattcccatttgacagaggaggaaactgaggcacaagtgactcacccagctgagactcagatccacaggccggcagcccagccctggagtccctgcgatgagcccaggggaaagtctccactgggcactaacatgtctttagcgcctccgtgaccctgaggcttagcaggtgtctgtatccagccagaattcaaggacttggttttgtgttcctcatatttatatttatttttaggtttccctactatctggggcaatgaggagggtttttcagtgaggatgccgaaatcaagtctccttgttacatgagtaaattcaagatgcagaagtgatgaatgctaaggaaaatatagttcagttgttcaaagggggagattgcagcgatggagaaaaaagtcactaatgactgaagtcagagaactattgtcctgggaataatcaaacatccacagtcctagaatttaccccttcctgtcccgggctcctgtgggggtggcctgggctgtgggggaggggagtgaacaccagcagaagctggaaggagagagggccagaccaggtctggagggattttgccttttttttctcagaaagccagaaactccagctagaaccccagggctcaacgtcccttctctgcagatcagacgggcaggtcagacagctggcgtctgcagaatctcagggaggtagtggcacttcctgatgccagggattgtccctacaccccttcatggtgatcatcgactcttcttaatttaattttattttactgtattttagagacagactctggtgttgcccaggttggagtacagtggcgccatctcgactcactgcaacctccgcctcccgggttcaagcgattctcctgcctcagcctccagagtagctcggactacaggtgcccaccaccacacctggctaatttttgtatttttattttattttatttatttgttcattcatttatttattttgagacagagtctcgctctgtcacccaggctggagtgtggtgatgtgatctcagctcacagcaacctctgcctcctgggttcaagagattctcctgcctcagcctcccaagtatctggaattacaggtgcaagccaccacgcctggctaatttttgtatttctagcagagatggagtttcgctatgttggtcaggctggtctcgaacttctggcctcaagtgatctgcctgccttggcatcccaaaagtgctgggattacaggcgtgaaccacaatgcccggcctgaaacattctttttaaatttttattttattattattattattatttattattacttttttctgagacgaagtcttgctctgtcacccaagccggagtgcagtggtgctatctcgtctcactgcaatctctgcctcccgggttcaagcaattctcctgcctcagcctcccgagtagctgggattataggcacctgccatcgcatctagataatttttgtatttttagtggagacag

SEQ ID NO: 1560309 - DNA, 4001 bp, Homo sapiens
tcctaattcttgacccaatgctcatatcatcacccttgcctgtaccatccagtgatatgggctaaaagttcctggataaccaaaattcactaataatccacctcagaagtgtggaggactctgtctccagttgcaaaaaggcaggcttctttcacatttgattccacatatactgaaacacctcttatatataagatgctatgctaggggttgcaaaggtgagggagacatggcattaggatttaagtgtagcttgtattattttgatagaatttacagcctatcagctgcctctgcagcagaatagctgtgaggctttgagaaattcacagaacctctctatgatgcaatttcttatctgtaatgtgcagatgctatgtgacaatgtaaagcaatttaagcctaatgccaggctaaagtagctgcttaataaatgtaagctttgattgatattgggactatcaatattgttaattcatctggagctggaaagatggatgggatttcatccgtacagagatggtggttgaagccatggaattaggagattcccatagggagagggagtagaaaaacagaagatcccagtaaggatcctgtgggaggagcattatagcaaagatctggagacagatggtttggattcaaatcccagctctcttatttactagctgtgtgatgttggacaaataacataacctgtgccccagttttcttatctgtaagatgaggataccccatgagcatactgatgatgcaacagattaatacatgtaaggtgcatagtgagttttcaaaaatgttggttatcattattttctttgtataaatttatgggatacaagtgtaattttgttacacgcatagatttcatagtggtgaagtcagggcttttagagtatccaccatccaaatgatgtacattgtaaccattaggtaacttcttattttccactgtccttctactccctcagccttcccagtcttcatcgtctatcattctactctctatgtccatgtgtccacattatttagctcccactgataaacaagaacatgaggcatttgtcttttggtgtttgagttatttcacttaatataatgacctctaaaattaataataaaattatcatttattttcttgtcacaggaaaatgataaaggagggagaagaaagaatagcaagagaaaaaggaaaaaagtcagggcagggctagtttgcagaagttatcaagaaggagaagacatcaattagaaaacaaaacttgccaagaggaagatgaacaacgtattagagaccgggtgcggtggctcatgcctgtaatcctagcactttggcaggctgaggcgggtggatcacctgaggtcaggagttcgagaccagccagggcaacatggtgaaaccccatctctactaaaaatacaaaaattagccaggtgtggtgatgtgtgcctgtaatcccagctactcaggaggctgaggcaggagaatcacttgaacccgggaggcagaggtttcagtgagtcaagattgcgccactgcactccaacctgggtgacagagtgagattctgtctcaaaaaacaaaacaaaacaaacaaacaaaacaaacaaaaaaccaagctactagattggataggaacattttagggatattcgagagcatactttgaatagggtagtcaggaaggaaaccacactccaaagggaaaaggtgagagtgttcagagcagaagaaagaggaggagaaaataaccaattgttgaaccaagtggtccctgactgggggataggttaagcctcagtcattgttacagtcacacatacctggaagaagcaatggtccctgcatttctgtggtacgggtatcccacgccagccagccctggaagctctctactgtgccgtaagccaaccacctttcctagctcaagaaatcccatgagaattgaagtatgtatcttaggtcagctgactcatgaaattgctatcagaaaagcaaactgcttcccctctttcgccatcagactcatggttctgcttttcgtttatttgctgtaccttttctgcctagctattgttgatcacctttgggatgattgagttggtaaaccctaacgaggaaatgccctgaaagttacatcacattgtctgaggattaggaagtgcctttggggccaaaataaatcttaaataagcctgtggctttgaggtgagtaaaccagattttagggtgtctgtgttggtatctgaagtttccagaggagtcattttaacatatctttctcttcccccagtagatgatacttactggttatgattgctgagccataagaagttaagagtcccaaagtctcatagaaggtaatacattatttggttatttggaccaaccctaaccagtcacaggacttgggagaaaaagtctgtaaatctacccttcctccagcaaatatttatttatttatttatgtgggtcttgctctgttacccaggctggagtgccgtggcacaatcatagctcactgcaacctcaaactcctgggctccagcgatcctcccacctcagtcctctgaatcgttaggactacaggtgcatgccaccacgcctggctaattttttttagtttttatttttttttttgaagagagacagggcctcgctttgtagcccaggcttgtcttgaatttctgggctcaagcaatccttctgcctcagtctcccagtgttgagattaccggtgtgagccactgcacccggctcccctgcttaaaactcttctgaagctcttcattagacttaaaacaccagacttcctactgaagcagtgttgttgtctggggttcatcctctcatgccaagtaaatcaaggatgcggatgcacaagaagtgaatttaaggccgagcactgtggctcacccttgtaatcccagcactttgggaggctgagacgggcggatcacctgaggtcaggagttcaagaccagccaagccaacatggtgaaaccctgtctgtactaaaaatacaaaaattagctgggcatggtggcgcatgcctgtaatcccagctactcggaaggctgaagcgggagaattgtttgaacccgggaggcagaggttgccgtgagcgaagattgcgccagttccttccagcctgggtgacagagtgagacttcatctaaaaaaaaaaaaaaaaaagtgagtttcagagcagaagtttaacaggcaagagaagagaaaaaagagaaaagctctatcctgcagagagagaggggctcccaagtgagtcttctggtctcgtggtgaaatacatggggttttatagccgagcttgaggaggagctgtctgatttacacaggaaccgagagattggtcggactgggtgtgctgtttgcatagcacgcaaagaagctggccgccccatcctcatcttttactatgcagatggggtctctacctggctggcactatgttgcctgcttttttactgcacacgtggtgataaagaaaagggaacatggtgaaaccccgtctctactaaaaatacaaaaaattagccgggcgcggtggcgggcgcctgtagtcccagctactcgggaggctgaggcaggagaatggcgtgaacccggaaggcggggcttgcagtgacccgagatagcgccactgcagtctggcctgggcgaaagagcgagactctgtctcaaaaaaaaaaaaaaaaaaaaaaaagggaagagggaacctccatgttgaacatgcctgcccccaggaagccttttcctattggcacagccgctgcatttacctttgcaaacttccagcttgcttatttatgtttgtagctcgattttgcagactgctctttgtcgtggtggtgatgatgatgatggtgataataacggttgtggtggtgatggtggtaatcatggtagtggcaggagtgatggtggagctataggtggtggtggtgacgatgaaggaagggatgatggtgatgatgac

SEQ ID NO: 1560310 - DNA, 4001 bp, Homo sapiens
agggcaccccagtcatgggccacaaggatgcacttcgagtaacctgtgggaattcaaggagctcgcataagtgaggtgcccagtaggactgaagcagggatgggggaagtaggttccagcaaggagaaagcgggggtatgcgtgtgtgcaggatgagggaggccacgcctaggatgggggtatgtctgcacccaggcctaggatgacatctttgatgtccaccagcagcaggtcgattgtgtagcagtccacatcccgaggtgcatccgaggggccatagcctcgcaagtccacagccacaacatggaagcggctctggaactcccggagctggtaacgccaggagaacctgccaggcgggcgagggagggaggctgagtcagggccctcaggttgcacctgcaccctacgcacatcagcaaccattggcaaaccctccttcctgctctaaacttcccctaaaaggaggatggggaatcccaggcagaggcagaggctgaggctgaagccagctacaccctgaatccagggaacttcaatcaacctcaatacccctttgtcctgtcccttcagggcctagggatcctgggtatgctggctcagtacccctatccccatctatgttcagcttgtcccgatctatacagccctcctccctgcctcttgggagcccaagctccacctgcccccgagtcccgtgggcctcaggcccctggccccagacgtaccagttctcagggaagccgtgcagaaacagcatgaggggtccgttacctcgtccagccgagacatagtgcagacgcaggcccgagctctagggggagggcacagcctgaagcctggggaaccctctctcccgaggcttgaaccgtctcgaccccacgcgaccccgcagccccgatagcgcccccgtgcgatcaccttgaggttcaggaaaccgtgctcacccagcgaggggtcgctcaggcaggcgggggacgcgctccgacggcgcccgcagcagccgcgccggggccggcacagcacgtgcgtgagcgctatgcagccgtagaccgccgcggccaccagcgccaccgagaacaccaggctccacatgaaggcgcgcagcagcttcagcgacaggcgcgacggcgccagcagcgcggtcaccaccagctccggcatgtcgccgcgctccgggaccacggcggcgctgccggccaggggcacctgcagcagcggcgaagcggtgtcagggctcaggggcccatcgcccttggcctggggcccctccgtgccgtcgggatttgtgggacgcgctgaaggaagaggcgggcggctccgacagaaaacagccagagcgcaccactcacctgagtgccaggtaaacacctgggcgcgacagggacaggaaacaagggtagggtgcggaggctggggaggaagaggttggaaaggggggaaataaatgggcggggcctagcaggtcctgtgcggggcttagggccggggcggggcccaggaagactcagcagcgggtgggtgagggtctaaaggcggcaattccgggccgggtgcggtggctcacgcctgtaatcccagcactttggtaggccgaggcgggcggatcacctgagatcaagagctcgagaccagcctgggcaacgtggtgaaaccccgtctctactaaaaatacaaaaattagctgggcgtggtggcgggcgcctgtagtcccagctacttgggaggctgaggcaggagaatcgcttgaacccgggacgtggaggttgcagtgagctgagatcgcgccactgtactccagcctgggtcacaacagggaaactccgtctcaaaaaagaaaaaaaaaaaaggcaattccgagcccagacaaaccttaaggaggggatcctggatcttcagttaagtgggcgacacctggagtgaggggcggggcatatgcagagtaggtgcggcctacaagccaaaaaggagaaagagttggaatggtgggcctggcttatgcgggtgggcggggagagggtggatcctagaggaggtgaggcctaacattgggcgaagaaggcgggagcctgggccaatgagctgacggtaggccggggagggggcggtggggtggggtgggcaatgggcaatgagacggagggcggggccgggacctaatatggcgggtcaggagggtctggaagacgaagaagagggacaggcaatgccaggtctaggactaggagggaggcgcgggcggtattagcggctggaggaggcttcgggaggcccggccgacggccgccgcctggtgctacccacccaggggcgcgcgaccctcccttcggtctggctccaaagacctagcagcactgacttcacccagctgtggttccaacggcgggtccagcggcctcggcccggcgccgtcctcctgctggcccaacaggcccgccagcccgcccctgtacgtctgtgattggacggcggcggccactgatgttcaagcgacaggtcctggcccgggagccaatctgcaggtgttgaggcccaggctccgagagcgggccgaggaggcgtggataccctgattcctagggggcaggcctggttcccccgaggaggacccggcctatgaatgactggagttctggggttctggccgaaagaggaagtgggacagggccgggtgtgatggggcctagagtcacagagccttgcggccctgctgtccctgcaagaagccagcttctggccaggcgcggtggctcacgcctgtaatcccagcactttgggaggccgaggcgggcggatcacgaggtcaggagatcgagaccatcctaacatggtgaaaccctgtctctactaaaaatacaaaaaattagccaggcgtggtggcgggcgcctgtagtcccagctactagggaggctgaggcaggagaacggcgtgaacccaggaggcggaggttgcagtgagctgagattgcgccactgcactccagccagggcgacagagcgagactccgtctcaaaaaaaaaaaaaaaagcagccagcttcttcctcctattttgcaaccttctcccgatatccttgaacattttagggacagccatcacttaaccatagagcaaccctattaagtctaagtagcataatcacattcctgtagtatagatcatgaacctgaaattcgaggatgaagtcatttgcctgaagacatacatcttgtaaaatagccatccgcaaagatgtagggaaaaaggcagcgatctgtggctacacctccccttcctcccggaagcagccactggaacgtttttagctttttctttttttttcagatggagtttcgatcatagctcactgcagcctcgaactcctgggctcaagcactacaacctgtagttgggactacaggcctgtgccaccacactcagctaatttttcaaaaacttttcagagagacgacttgctatattgtccaggctggtctcaaactcctggcctcaagcaatcctcaagcctccacctcccaaagtgggattacagatgcaagccaccgtgcctgacctttatttcttgacttaaccaatgtatgacatcagccactgacttgctcacatcactaccccggacgtgccgttttttgtttccctgttagtttcctttaaaaacactccacttgtcacctcttgcccctttccacctcccacttttatccatatacctttgtactgtcaaggctgctaaacattatactgtcctgggaccataactaagtccatgaagttgccacttaaaggtgaatagtggtttatgttctgcctcagtgaacaatgcatctcaagagccgaatagaccactatgattacattgcccatagtgtacaaacttttgttctccctggactacttaaccactacctttcttttgttgtgtgattagcctacatcaaagctttgggggtttttttgtttttgttttttttgagatgggagtctcaccatatcacccaagc

SEQ ID NO: 1560311 - DNA, 4001 bp, Homo sapiens
ttggcctcccaaagtgcagggattacaggcaggagccaccacgcctggccatactttattttatttatttattttttgagatggagttttgctcttgttgcctaggctggagtgcaatggcatgatctcagctcactgcaacctccacctcccaggttcaagagattctcctgcatcagcctcccgagtagctgggattacaggcatgcaccaccaatgcctggctaattacattttttttttttttttgtagagacagttggggtcttgctatgttgaccagactggtcttgaactcctggcctcaagtgatcctcccacctcagcctcccggagggctgggattacaggtgtgagccactgggtctggcgtgtcattaatttccgaatgaggagttccacaaccgaagggacctgggttgattgctgcaccctcagcccctgatgtgttgacaggtatacagagaattgaaaacacagacacatgtccctgcccccttgcacataagtacatcccagtgtcccggactcccacacacaccttggtacaccgacatgggggcaccactgaccacaaccatccgctcgaccagggatgggtagtagatggagaaatgccaggcaaggagggcaccccagtcatgggccacaaggatgcacttcgagtaacctgtgggaattcaaggagctcgcataagtgaggtgcccagtaggactgaagcagggatgggggaagtaggttccagcaaggagaaagcgggggtatgcgtgtgtgcaggatgagggaggccacgcctaggatgggggtatgtctgcacccaggcctaggatgacatctttgatgtccaccagcagcaggtcgattgtgtagcagtccacatcccgaggtgcatccgaggggccatagcctcgcaagtccacagccacaacatggaagcggctctggaactcccggagctggtaacgccaggagaacctgccaggcgggcgagggagggaggctgagtcagggccctcaggttgcacctgcaccctacgcacatcagcaaccattggcaaaccctccttcctgctctaaacttcccctaaaaggaggatggggaatcccaggcagaggcagaggctgaggctgaagccagctacaccctgaatccagggaacttcaatcaacctcaatacccctttgtcctgtcccttcagggcctagggatcctgggtatgctggctcagtacccctatccccatctatgttcagcttgtcccgatctatacagccctcctccctgcctcttgggagcccaagctccacctgcccccgagtcccgtgggcctcaggcccctggccccagacgtaccagttctcagggaagccgtgcagaaacagcatgaggggtccgttacctcgtccagccgagacatagtgcagacgcaggcccgagctctagggggagggcacagcctgaagcctggggaaccctctctcccgaggcttgaaccgtctcgaccccacgcgaccccgcagccccgatagcgcccccgtgcgatcaccttgaggttcaggaaaccgtgctcacccagcgaggggtcgctcaggcaggcgggggacgcgctccgacggcgcccgcagcagccgcgccggggccggcacagcacgtgcgtgagcgctatgcagccgtagaccgccgcggccaccagcgccaccgagaacaccaggctccacatgaaggcgcgcagcagcttcagcgacaggcgcgacggcgccagcagcgcggtcaccaccagctccggcatgtcgccgcgctccgggaccacggcggcgctgccggccaggggcacctgcagcagcggcgaagcggtgtcagggctcaggggcccatcgcccttggcctggggcccctccgtgccgtcgggatttgtgggacgcgctgaaggaagaggcgggcggctccgacagaaaacagccagagcgcaccactcacctgagtgccaggtaaacacctgggcgcgacagggacaggaaacaagggtagggtgcggaggctggggaggaagaggttggaaaggggggaaataaatgggcggggcctagcaggtcctgtgcggggcttagggccggggcggggcccaggaagactcagcagcgggtgggtgagggtctaaaggcggcaattccgggccgggtgcggtggctcacgcctgtaatcccagcactttggtaggccgaggcgggcggatcacctgagatcaagagctcgagaccagcctgggcaacgtggtgaaaccccgtctctactaaaaatacaaaaattagctgggcgtggtggcgggcgcctgtagtcccagctacttgggaggctgaggcaggagaatcgcttgaacccgggacgtggaggttgcagtgagctgagatcgcgccactgtactccagcctgggtcacaacagggaaactccgtctcaaaaaagaaaaaaaaaaaaggcaattccgagcccagacaaaccttaaggaggggatcctggatcttcagttaagtgggcgacacctggagtgaggggcggggcatatgcagagtaggtgcggcctacaagccaaaaaggagaaagagttggaatggtgggcctggcttatgcgggtgggcggggagagggtggatcctagaggaggtgaggcctaacattgggcgaagaaggcgggagcctgggccaatgagctgacggtaggccggggagggggcggtggggtggggtgggcaatgggcaatgagacggagggcggggccgggacctaatatggcgggtcaggagggtctggaagacgaagaagagggacaggcaatgccaggtctaggactaggagggaggcgcgggcggtattagcggctggaggaggcttcgggaggcccggccgacggccgccgcctggtgctacccacccaggggcgcgcgaccctcccttcggtctggctccaaagacctagcagcactgacttcacccagctgtggttccaacggcgggtccagcggcctcggcccggcgccgtcctcctgctggcccaacaggcccgccagcccgcccctgtacgtctgtgattggacggcggcggccactgatgttcaagcgacaggtcctggcccgggagccaatctgcaggtgttgaggcccaggctccgagagcgggccgaggaggcgtggataccctgattcctagggggcaggcctggttcccccgaggaggacccggcctatgaatgactggagttctggggttctggccgaaagaggaagtgggacagggccgggtgtgatggggcctagagtcacagagccttgcggccctgctgtccctgcaagaagccagcttctggccaggcgcggtggctcacgcctgtaatcccagcactttgggaggccgaggcgggcggatcacgaggtcaggagatcgagaccatcctaacatggtgaaaccctgtctctactaaaaatacaaaaaattagccaggcgtggtggcgggcgcctgtagtcccagctactagggaggctgaggcaggagaacggcgtgaacccaggaggcggaggttgcagtgagctgagattgcgccactgcactccagccagggcgacagagcgagactccgtctcaaaaaaaaaaaaaaaagcagccagcttcttcctcctattttgcaaccttctcccgatatccttgaacattttagggacagccatcacttaaccatagagcaaccctattaagtctaagtagcataatcacattcctgtagtatagatcatgaacctgaaattcgaggatgaagtcatttgcctgaagacatacatcttgtaaaatagccatccgcaaagatgtagggaaaaaggcagcgatctgtggctacacctccccttcctcccggaagcagccactggaacgtttttagctttttctttttttttcagatggagtttcgatcatagctcactgcagcctcgaactcctgggctcaagc

SEQ ID NO: 1560312 - DNA, 4001 bp, Homo sapiens
tgcccggctgcagcagcaaggggcacagggccccgatgcgtggagagatggggcgactcccggacgaaggctgcggcaggtgctggcaggtcaccgcatctgcgaggggaagaggacctctggaaacacaaatgggacatggcctgcccagagccctcagggtcaaagatgagttcctaactgtggcccagaaggctctgtcccttgttaacctctaggtctcaaagtaaccccatccatgtttcagttcctcaaacaggctgcctccttcctgctggggcccctgctcagtgaggcagagtatatgcagtggcagatcgcagccccacaacctggctcagcacttcctggcaaggccaccctgggcgggctggatcttttgcacctcagctttctcttctgtcaaatggggctccatgcggtcatctagagaactgacgccctgtaaacaccggcagcgcatcaggaggccctccgtcctgcccatgcgctcttccttcttcctcatccagggatatccactcaccccaagggctctgcttacacttcccaggtgcacacccaaacatcacagtcacctatccctggggcctcatcagtaaactcagtctccctcatgattttatattctcgtctgattctgtagctaaggtcaacccacaggccccatgggggcagagaacatgtctgtctgcatgtggcttttcccagcaaagaagctggcccagaaaaaccattcagtaaaccatgcaaggaggaagtggagagggagggcaggaaagacctctggaacaagggcagagggggcaggaatccacagcagaaacaaggacacatgggaaagaaggctgatgaagggattaaagacagaggcaggagcagggaaccaacccagggcggcaggaagaaccggggaagccagaagaccagacgtcccaaggatagcggaagcccaaggctcaggagagataaggaacctaacagccccactgcctgggtccctgctgtgtgccaggtgctcgctcagcacaagagggacattacctttttcaacactgcatgcaaagactgggctcctggaagttaaataattcaaccaaggtcacacaccaggaatggcagggcagactcaacccgaggcccacctgaactccaaaactcatacttttaaattaacctaaattaaattaacccatcccgagactggtgacgagaaacaagagagtcaagcaaatgatgatgacaccagcagacactcgcactgctcttatcccatgccaggcactgttttaagtgctttacatgtattaactcagttaatccttgaaacaaccccatgattcatagccacctcacagggtggaaactgagacacagaggttcagccccttgcccagggacacacaccttactcctggagcagcctggttccagagccagctctgatcacccatctatgcggctccaagaagccacagagggagattttcaaagccccgccatgatgtaagcccaggggagatagggatgacggagagaggctggcctctgcttccacctcaggccagaaagccaggcacctgaagacagatgtagctagttaaaaagtaactctctggagtcccaaaacagccccagcctaatacattaagatgaagagatgatgtaacaaatgcagagaaggggactgagaagaaatagaagacagttctgacagaaagagacacatagaaacctgggcagagggagctaggcagagacacaatgagaaaaacacaggcagcagcagatacaagaacatgggaagacagggaggcaggaggccaaggaagaaagaggcccagaaacaaaaagagacctggcgctgagaaataagagataagaaaaatggaatctaatggcaaagaatataaaatgtgggttcaaatcctggccacatcagctacctgcagcgcacacctccttgagacacagtttgctcaactctgaaatgaaagaattcctacctggtaggcctgttgattaaataagatgggtacatgcagtgcttggctctgtgccccacagatagtaggcgctcaataacactggctgctattattatcagagaaaaaacagagaacatttccaaaagggtggcggcagaaaaggcactatcttaatactctgtacttatttggcgtgcattagaaaaaattacccaactagcacatcaaagctgagatttctcagatactgcttagaatgagactgtatttcaaattaaattgattcaaagagaattcttacattaaaaagaatacaaaggatatggcaaagttctccaaggagtactccaataaccgaccgatatctaacacttactgtgtaaaaatctctaagcactgtaataataaaaaccagagctcccagtaattacacacttgctatgtgtcagataccgtcaggcactttacaagcatcacctcaacttacatgcacaaggaccctatgatgtaggaactacgaatgcctacgaactatggatttcctacgactaggaaactgaggttttgacacagagactatcacctggcaattacacagcttagcaggcagccgggcttctgaatccaaggctggggctcttcaccatcacaccagagactcagaaaactggggaaaaggggcagattctagatcaagttaacagactcctggaaagaaacttcaggattggaggtgataggtatgggggcaaaactcagatgcgaagacggggcgggggtaagatttgcaccataggcagaaaagcccgcagggaagggctagagacacctagggaaaagaagactcggaaactcaacgagacacgaacaaatcctgacagacacagacacgacagacagaggagagagagacccgggacagacacacaaacacactcctatctccaaacccttttctaagttcactgaaacaggcacaggcagaggcccacaggaaacagacgctgacagacacacagacacgagagagacagacacagacaaccgacacgggggcagtcaaggccgacacaggagcagagacacaaaggccgccagagacacccagaactggccagacgcgagcccgcgcgcgccgcggcccaggcccgaacacccggagcaggcgggccagcgtcccccgcgctccgccccgcgctcacctcggccccctcacgccgggctctggggggtcatggcggtcagccccctgccccgctcggcctcggtgtcgcgggacgtgcgccgggccacgggcgcacgcacgaacgcaaggagggccgcacgccgacggctccgccgccccgccgcccagaaggggcgcggagagccgggcgggggaggggagccgccgaggagacgggaagcaacagaaggaggcgacggaccggaagcggaaattgccgcgctccccgccctcccgtgccgcaccccgccctggcaggagtcgcttccgcagccaagccaacctggaaggcatcacttccggcgcgctgggccccgttgctaggcgcctctacgtcacttccgcccgctgcagcgggggatccgcgcggtgctcacggaacgccgagagtcagctccagctcgcttggcggcaaccgcggagctcctggcacacccacgccacgcccgccccggcccgctcggccaccatccctcctgtcggcggggtgggagagcactcgggaacctcacgtcccccggggctgtgcctgtgccgaccccgagaagggcaccgcgcaagcagggaaggcctcgaggctgccggcgccggcagcaggggcgtcccagccaggggcccgcagtttgccaagggaacccccacccgagcccagaaccgaggaagagggtcggacatactggacacacagccgctccataaagtaaaatacaacaaaatgtttaatgagcaaattcgtcttagcaaatatgaaactgccacagagagtaggagaggggcaggggccacgg

SEQ ID NO: 1560313 - DNA, 4001 bp, Homo sapiens
ccagagccagctctgatcacccatctatgcggctccaagaagccacagagggagattttcaaagccccgccatgatgtaagcccaggggagatagggatgacggagagaggctggcctctgcttccacctcaggccagaaagccaggcacctgaagacagatgtagctagttaaaaagtaactctctggagtcccaaaacagccccagcctaatacattaagatgaagagatgatgtaacaaatgcagagaaggggactgagaagaaatagaagacagttctgacagaaagagacacatagaaacctgggcagagggagctaggcagagacacaatgagaaaaacacaggcagcagcagatacaagaacatgggaagacagggaggcaggaggccaaggaagaaagaggcccagaaacaaaaagagacctggcgctgagaaataagagataagaaaaatggaatctaatggcaaagaatataaaatgtgggttcaaatcctggccacatcagctacctgcagcgcacacctccttgagacacagtttgctcaactctgaaatgaaagaattcctacctggtaggcctgttgattaaataagatgggtacatgcagtgcttggctctgtgccccacagatagtaggcgctcaataacactggctgctattattatcagagaaaaaacagagaacatttccaaaagggtggcggcagaaaaggcactatcttaatactctgtacttatttggcgtgcattagaaaaaattacccaactagcacatcaaagctgagatttctcagatactgcttagaatgagactgtatttcaaattaaattgattcaaagagaattcttacattaaaaagaatacaaaggatatggcaaagttctccaaggagtactccaataaccgaccgatatctaacacttactgtgtaaaaatctctaagcactgtaataataaaaaccagagctcccagtaattacacacttgctatgtgtcagataccgtcaggcactttacaagcatcacctcaacttacatgcacaaggaccctatgatgtaggaactacgaatgcctacgaactatggatttcctacgactaggaaactgaggttttgacacagagactatcacctggcaattacacagcttagcaggcagccgggcttctgaatccaaggctggggctcttcaccatcacaccagagactcagaaaactggggaaaaggggcagattctagatcaagttaacagactcctggaaagaaacttcaggattggaggtgataggtatgggggcaaaactcagatgcgaagacggggcgggggtaagatttgcaccataggcagaaaagcccgcagggaagggctagagacacctagggaaaagaagactcggaaactcaacgagacacgaacaaatcctgacagacacagacacgacagacagaggagagagagacccgggacagacacacaaacacactcctatctccaaacccttttctaagttcactgaaacaggcacaggcagaggcccacaggaaacagacgctgacagacacacagacacgagagagacagacacagacaaccgacacgggggcagtcaaggccgacacaggagcagagacacaaaggccgccagagacacccagaactggccagacgcgagcccgcgcgcgccgcggcccaggcccgaacacccggagcaggcgggccagcgtcccccgcgctccgccccgcgctcacctcggccccctcacgccgggctctggggggtcatggcggtcagccccctgccccgctcggcctcggtgtcgcgggacgtgcgccgggccacgggcgcacgcacgaacgcaaggagggccgcacgccgacggctccgccgccccgccgcccagaaggggcgcggagagccgggcgggggaggggagccgccgaggagacgggaagcaacagaaggaggcgacggaccggaagcggaaattgccgcgctccccgccctcccgtgccgcaccccgccctggcaggagtcgcttccgcagccaagccaacctggaaggcatcacttccggcgcgctgggccccgttgctaggcgcctctacgtcacttccgcccgctgcagcgggggatccgcgcggtgctcacggaacgccgagagtcagctccagctcgcttggcggcaaccgcggagctcctggcacacccacgccacgcccgccccggcccgctcggccaccatccctcctgtcggcggggtgggagagcactcgggaacctcacgtcccccggggctgtgcctgtgccgaccccgagaagggcaccgcgcaagcagggaaggcctcgaggctgccggcgccggcagcaggggcgtcccagccaggggcccgcagtttgccaagggaacccccacccgagcccagaaccgaggaagagggtcggacatactggacacacagccgctccataaagtaaaatacaacaaaatgtttaatgagcaaattcgtcttagcaaatatgaaactgccacagagagtaggagaggggcaggggccacggggctgggcgcaggtcgggggagactaaagaggaaaaatcaactacgtaagaaacccaggaggggaccagagaggaccagaggccgaaggaacagagctgtggtcctggtaagggagagggcagggcactgagggccggacaacaaaattcaaaatagtttggccataaaatataaacacgctatgttcctaccgtggggaaggggagaagaaaggggtctatgggagaaggagaggctgttttgggaggggctggggtcctaccccgccctgctgtgcaccctgtccccatcccaaccccttccctctgtgtctgtgtgggtgcgtgttgtctgtgtgggctgtgtgcgcacttccccagtcccctccctgccctaaccccccaaccccccaacccccgccccccacccttaattgctgccattccagttgctgccggctgtcgtgtgtctgcggctgtcactcctctgcccatcgtcttcagagggggataaggggggggcgggagtggggagaagcccccagccagccctgcccccaccctcccccagccgcctctaccagaagtcccggcggtgataagagtcggggtcacagtattttgtgacaaccactctgttggcgaacttgcggcccgtcaggccctgcatggctttctggcagtcaaacacagaggtgaactccacaaagatctgtggggaaaggagaggcaggtttgtgaacaaggctcacgcccaacagccagtcagcgtccacccaaccccagcactgaaggcaggaagggacagggaggagggggcttcgccacaggtgtcagaaagggacccttagtaagcaggtttggtggagttcacccaaatattctccaggatcaaaaaacaagagcataaacacaccataggcatggagagggagaaagaatagagacatgccagaaactcagcagagccatagagcgcaggcgggaggcctagacgagctcaccgcgggggaggggtccctcgtgctgagtgtctactccacacgagccaccatggtgggcgctcccagaaccaccccaacagccatgttctcccaacaataagtgaactaagggaagctcagaaattaggattcaaacccaggttgaataaaatttaaaaacttgaaccttgatctattcgagcttctaaccttgcttaaaccaatttacaggaaaatggagggagggaaggatacaatgagcctacacgaacactgaaaattctatatagcagatgaacttatttcttctacaaataaaagagcttgcaaaaaaaaaaaagagggagtgaggtacaaaggataaattacacaaactttgtaaccaaattcaaggcagggacctgatatggatccttactgaaacaaactataaaaaatatcctcggctgggcacagtggctcacgcct

SEQ ID NO: 1560314 - DNA, 4001 bp, Homo sapiens
ggcacgcgccacgcctggctttttttttttttttttttgagacggagtttcgctcttgttgcccaggctggagtgcaatggcgctacctcggctcaccgcaacctccgcctcccgggttcaagcgattctcctgcctcagcctcccgagtagctgggatcacaggcatgcgccaccacgcccggctaattttgtatttttagtagagatagagtttctccatgttggccaggctggtctcaaactcccgacctcaggtgatccgcccgcctcagcctcccaaagtgctgggattacaggcgtgagccaccgcgcccagtctaatttttttttaagagacggggatctcgctgtgttgcccaggctggtcttgaactcctgggctcaagcggttcttccgcctcgaccttccaaagagttgggattacaggcatgagccactgctggcctccttttggatactacctcgagaaggcgtcccagccccgacgtagtaacgccttaccctcgatttggaggcgttgttatcccagcctgatgtttggggtcgcgttccagcggtgatcgcgggagtgttcgcgccccggcccatagagggcgtgccagccctggacccgcaggtttccctccagtgaccacgactggaggcgccgtcgggcctcaaacagcaggggacatacgaggctacgacctccagggagctctgccccaccccctccctccgcccttggaggcacccgccggatcggactcactcgagctggtaggagaagctgtagttgcccgggcccaccccagcgctcgccgcttcctcccagaaacacaccaagtcctccaaccgctcggtgaagcacagaagctcttcgggcccccgggccgccagcaaggccgctggggaggggcgacaaaggaagggcatgggggtctgagctctatcctcgggagacagccccctcctcttccctcccgcagcctgggcggacccgataagaaaaaagccccgccctgccatcttcccaagcgggtcccttggaggggtccgcagaggtggtgcccccctaattcccaggggcaagtttctcgccttactgtcccccgccgtcaccactggcgcacacctgcccacccagcggccagctgagctgggcgcggcgttcaagacctcgagctcgggactgccagccccgccccagcctaggacacgcgcgcggctgggggtgtgtgcggagaggcgggccccctatcggccccggcaggctccccgccaaccgatagcgccaaccgtgccccccgcctccctccctccaccgggccgggcaagtgatctggcgccctcacacaaaccgtgtttacagtagcctgtggcttggcccctctaactcggacccgggctttaccctccctcccctagggagggtcggcttggtccccaccccccagggaccttagcaccaagtcagcccccttaggatttagcatgtcccagactccctgaaaaggtaaaacgggaatgttaagcccactctagctcttgcccgggacgcgatcaggagtcttggatcctaacataccccaccccgccccccacccatccaggacccagtctaagggttcagatgccagcttggcccccaggacccggtcaggaagtccagaaacaggcatggcccccaggacctaggctgggagttcaggccccagcatggtcctgcaggctccagcgtaggggtccacacgcagctcatccttacctttgctctcgaacttggggtccgggaggttaggcgggggcgcccaggcggccccagcgagcaggagacaaagggagccgacctggggccagagggacgccccgaggtggtccatgatacagcccccgccacggggagcccagggctcctgcccctccgtcccccgcccccggcacagtccacagctgggtcagcagctgcctccgccggacgcagctgaccaggcccttcccgaccaggcgcctctaagtggcagatccccgagggggcggggccagcactcagcctgggtagagataagtgcctggcgggaggaggcaggggcccttcccgagcccagaggccgcttgggggcaggggagggagttgggccgcaacagctcccgttctggcttcagacacacgttttttttttctttgtggccctggacaggtgacttaccttacctgagcttcagacttctcatctgtaaaatctagcctggcacatagcgaacattccaaaaaatgtacctactgattttatcgcagaaatcagcatctcttcccagcctggaaataaataaaaattattttctctctctctctctctctctctctctctctctctcctttccttccttccttccttccttccttccttccttccttccttccttccttccctccttccctccttccccctctctctctctgtctcagggtgttgctctgtcacccaggctggagtgcagtggcacaatcatagctcactgcagcctctggactgaagcaatcttcccactgcacctggctaatttttaaaattctttgtagagatgggatcccactatgttgtccaggctggtcttgaaatcccggacttaagcaatcctccagcctccatctcccaatgtgctgggaataccagcacgagccactgaagccggccaataataatccttgcaacgaccagcagttgagtgtttgcacagtgctaggccatgctcctgggcagtatgcataatatgtgagattttcatttacgaatttttgggaaaaaaatttttaccacccacatttttattctcttgggctgggcccggtggctcacgcctataatcccagcactttgggaggccgacgtgggcaaatcacttgaggtcaggagtttgagaccagcctggccaacatggtgaaatcccatctctactaaaaatacaaaaattagccaggtgtggtggcgtgtgcctgtaatcccagctactcaggaggctgaggcatgagaactgcttcagtctgggagatgaagattgcagtgagccaagatcatgccactgcaactccagcctgggcaacagagtgagactgcatctcaaaaaataataataattggctgggcgcggtggctcatacctgtaatcccaacactttgggaggccgagacaggcggatcatgaggtcaggagttcgagaccagcctgggcaacatggcgaaaccacgtctctactaaaaatacaaaaattagccaggcgtaggccgggcgcggtggctcacgcctgtaatcccagcactttgggaggccgaggtgggcagatcacgaggtcaagagatcaagaccatcctggccaacatggtaaaaccccatctctaccaaaaatacaaaaattagatgggcgtggtgctgcatgcctgtaatcccagctacttgggaggctgcaggagaatcgcttgaacccaggagccggaggtttcagtgagccgatattgtgccactgcactccagcctggtgacagagcgggactccgtctcaaaaaatatatatatatattcgagcgtggtggtgggtgcctgtaatcccagctactcaggaggctgaggcaggagaattgcttgaaaccagaaggcagaggttgcagtgagctgagatcacaccattgcactccaggctgtgcaacaagattgaaactctgtttcaaaaaaataaataaatagtccatgcacagtggctcatgcctgtaatcccagcactttgggaggccgaggtgggtggatcacaaggtcaggagatcgagaccatcctggctaacacagtgaaaccctgtctttactaaaaatagaaaaaattagccgggcgtggtggcgggtgcctgtagtcccagctactcgggaggctgaggcaggagaatggtgtgaacccagtgggtggagcttgcagtgagccaagattgtgccactgcactccagcctgggcaacagagcgagactcc

SEQ ID NO: 1560315 - DNA, 4001 bp, Homo sapiens
atttccaaacgaagaaaaccaggccacgccttcattcaacaaatgtatagggaaaggaacaggaagaggctaagaagtcagtgacctggccaggcgcagtggctaacgcctgtaatcccagcactttgggaggccaaggcgggtggatcactcgagttcaggagtttgacacgagcctcgccaaaatggtgaaaccccgtctccactaaaaaaaaaatacaaaaattagccgggtgtggtagcacgtgcctgtagtcccagctactcaggaggctgaggcaggagaatcacttgaactcgggaggcggaggttacagtgagctgagatcatgccactgcactccaccctgggtgacagagcaatactccatctcaaaaaaaaaaaaattggacaggaagttttagaaagatccacgcctcccaaactgggagtgcttagtgctttctcatgaaatgatcttaggtgattttcccccgactcccgccttccccgccccccaccccctgactacatactctaaactgtagcacttagctattaacacctattatcggtaggacacttaacagtttacagagcactttcatgtcagtaacaagaacttgctaattaataatcaccgggttttagcactgttaacttagtgacagtgttgcaaattggctagctgtgcacttctctctccttggatcagctaaccagtcatgcaagcatgcaaccggcctatcaactctctttgggtttggaattcttaattgctgcggtctctactcccaaacgtccaaatctggcagagattaaatgatgacagtaattataggatcactgagtgcctctcatatgctaggcactgttctaagcgctttttcacgtgcttaattttcacataatcccaacacatttttatatctccattttccaaaggaagcaactgatgggtggaatggctaagagcttcaaccaaaggcacagagaaatcggggctggagccaagatttgaacacatgatctgaccctgtgtcctcactcttaatcaccatgctgtgctagatcattctagcaaaatgcttatatggtgctttgcacaacacaggtattcagcaaataaaggcagctgtgattagcataacacaggtagtttctagttcccacgagtgtcacctccaggaaagcagcgaccttgtctgtctggaagaatgcagcgctcccagcacctgacccaacgcacatttgagggatggatagaaaatgaatgaatgaaagtctctcccaaataacagagctgcctacgcatggctctttttcgcatgtctgtgtcgcgctatcgatactgccccttcataagcgcatcaggcgaatttgaggacacagagaggcgcccggagacgtacgatctgcgcccggtgcaggggtggcggaagcagcttccaaggaggcaggggatcagtctgagatcgcactgctgctgacgggtccgggctccggcgggaccctgcccgcccgggcgccgggaccggagggagacaaagactcgctgggccgccgcgccgacagaaacgctcgcacccctcgcccacccctccgggatgcagcccagcgcctccgcgggtccccggcctgggagcttcagcggcggcagggtccgggccctgggcggagaggacacgcgctgcgcacctcctcgcctcgccggtgcccgcgagggtcgctcgggcacgggaggccgcgggtcccggcctgtcaccttcagggccgcctgcccacccgcccgccgcaagcccttcagcacgcgccgcccccgccgccgcctggctgagtctcccagcgcctcagcctcgccgcaccgctcgcctcgcgccccgcaccccggcgccgcccccaggcccgcccggcccgtacctgctgggagagggggatgagcggcgccgccatcttcccgcggactcgggctccgagcgccgggggaacgggggcggggctgcagccacgcgtgcgcactgggacgacgggagggcggtgcgcaggccgcctgtcccgggagagggcggggccgtagacagggccacgcatgtgcagtcaggccgggaggggcgggggcaggggcggggccgcccacacgcagcctggaggggctgggcctgaggcatctgcgtcttccgtgctctcttgcccgttcccctactcctccttccaacgttgttcggactctcatgccgctggccgctgtccgagtcgaccatgctgtgtcatccctccagcccatgccgaggcctggttctctgttagggatgccgtccccctgccagtgcgcctggggaggcggtcgcccaccccgcggagggtcgggaccctcaccctgccccgcaaagcgccctgttcctaggatcgcagtgtgtgtgtgtgtgtgtgtgtgtgtgtgtgcgcgctaatttgggggacccgcaccctgcccccctcaccctgccccgcaaggcgtcctcctggctgtggtggcgggcacctgaaatccaagctactcaggagactgaggcaggagaattgcttgagcccaggaagcagaggtttcagtgagccaagatcacaccattgcaatccagcctgggcaacagaagcgaaactctgtctcaaaaataaataaataaataagacaagaacccacttgttgccaggtacagtggcttacacctgtaatcccagcactttgggaggccgaggtgggagggtcatgaggtcaggagttggagaccagcctggccagtatggtgaaacatcaatatggtgaaaccccatctctactaaaaaaaatacaaaaattagcaggtgtggtggtgcatgcctgtagtcccagctactcaggaggctgaggccagagaatcacttgaacccgggaggtggaggttgcggtgagccaagattgcaccactgcactccagcctgggtgacagagtgagactctgtctcaaaacaaagtcaaaaacaaaaagaacccacttgtaactgttgctaatcaaagcatacattcagggcaacttgaatctgtgtctcctggactgcggtcctcaaccttggcccaaactctctacttatattaactttgcctcagcttcttttgttacatcaatagagtaatgaaggtttttaacagtcttgagtgctttatcagtacgtattccataaggaaaagagaagtccttctaggtacttcaaacagaggatattgaatacaggggattgagccaggctctgtggctcacacttgtaatcccagcaatccagttgagacaggtagattgataccagcctggccaacatggagaaaccccatctttactaaaaatacaaaaattaacccagtgcagtggcaggtgcctgtaatcccagctactcaggaggctgaggcaggagaattgcttgaacctgggaggggaaggttgcaataagctgagaactcaccattgcactccaacctaggtgacagagcgagactctgtctaaaaaataaataaataaaaataaatgaatacataaacgactacaggggactgagtataaaagtgttggaagtactggaagaacaaaagaggaaggtaagtttacctaaagattcataactatatgaggctgctagcctctctagagctgaaagattaaagcaggggaggtggctgggcatagtggctcacgcctgtaatcccagcactttgggaggccgaggtggatggatcacctgaggtcagaagtttgagaccagcctggccaacatgatgaaatcccgtgtctactaaaaatacaaaaattagccggttgtggtggtgggcacctgtaatcccagctactcgggaggctgaggcaggagaatcacttgaacctgggaggcggaggttgcagtgagctgagatcacgccactgcactccagtttgggcaacaagagcgaaactccgtctcaaaataaataaataaataaagcacaggaggacccataacccacaatcactgtgc

SEQ ID NO: 1560316 - DNA, 4001 bp, Homo sapiens
cctcccgctgcaggggggcccgagggcctggggcgggtctcaccatctgcagaggcccgaaaaggaagtgcaacagctccggagaggaggggtcggcgatgttgccgcgcagccgggcctggggcgtggggagggaggtggttggcgtgggtgcggggacgggacaggttcgtcgtgcccgcgccccggcccaggggcgggcgcgtcctcaccagcaggctgaaggcgtacttgatcttctgcagcacgtcggtgtactcggcctccgagggcggcttggcccgcagcgtcagcaagccctctgaggggagcagacgggcgcggcgatggggacgcggggccagcaccaggcaggcagagagaggtggacacccggttaagatggcggtgaggtcagccctggcaagtggcgggaggggagagcctggggagagcggggacatttggaagagatcgggagggggttcagatcccacgccagggtgccccttacccccagccgcccggcgccggctcctgcggccgcgttcccggtgctccagcaccctggccgcctccgccgacttctgcagcctcgatacaaagctctctacgtcgtcgaacacgtggttcaggatgtcctaggggacagaggagggggacgctcagggctcccgagttccaaaaccatccccgtcgaagccctgaacctgagcacctatacacttccccagatcaggccacgccccaaacacctggccacgccccacaaccaagccccgcccccgacccagcccctcttccataacgcagaagtctgaccagagaacgcccgtcccgcagccggccccgcccttccacgccctagccccgcctccagtcgcctggccctgcccccagaccccttccttagcggctcaccacttcccgctccgcctgcagaaccgccaggtcaggaccccggggacccaggtccggggaggccgagtcagcgttgctcgaggtccccaccggctcaggcctctgcgcctcctctgcctcgggaatgggcttcgcctggggtcgtccgcggcccgcgccccgctctacggtgctgatcactgcgcggactgacgggcggcgctgcaggggcggggtctcagcggcgggcgagcggtcgcgctgcaactcctcctgcgtggccctgcggagggcgacggggacaccaagactgggtccactgaggggtccagggagggggaaatccagggcgcagaacgagacacacaggctcaaaaggctcaaagggagtgaacaagttcaacgaggtagggagaaatccgatatacggagggatagcacctctctagagtgaaactgagggcctggacagggaacagagaaaagaagcagagttctggagaaggggtcagctcgtctgggaggtacagacaagactcgactagggtgtgcttgactccatgcaaaactcttgttctgttccaggctggtgttgtagactgaggcacaaggaggggaaaccggcttcccagagaccctgccaacttcttccctctcacctgagcgccgccgccctgcgctccccgcggcccgagcggtaattgtgcagagccccctggatgtcctctcggatcagctccgcctgccaatcacaccgtcaggccacgcctccccacgccgcacccacttcctacccgggcctcgcccctggccgatttttcagctcagtcccagcccacgtgcggctaccgttcacacctgtgaacccacgcacgtccacgccccgaactcacccctcgccctacacctgtccctgccctaagccacgaccccgcccatggagacccagtccgggtggttcctcgcccccacctcgtcctggctgctcccccagatccttcttggccatgttctgttcatgtcctcatcccaccttcatgttctatcttgaccctgggtccaatctcaaaccccactgccttccagaacttccttcccaggtcccctgcccttccttgctctgatcccgccttagccccaggccccgccccacctagaggccccacccatttccgccccggctccaggctccgcccagttccagctccacccccagagccagcccatctgctcaccccgaggcgcaggccctggaagaagtgcacgtcgggctgcgcgcgctcgggttcctggcacacgagcagcagcaacgagcggctcctgccgggtggcatcaccgcgtcacagcgcacgatggcgcccagtgggtacgactccagctcctcctgccgggtgggatggcggggtaaactgaggccccgaaatgatggtactactaaatggcgacgggagtgtgggccagcaggtcagggcaacctcaggcggttagggggttagggataacagccctgtttaatagatgaggctattaaggctcaagaagggggctggggtccctcgccagagttcccagaggaaggacgtgcaggagccaagattcacacccagaccccctgaagtccctgccccagacactcctcccacccacgtgccccccggcaccttggaggccgggtcgagcagcgtgacatggtcgggagacactcgcagcagcatctcctgtgcccagactcggccctggctatccatgacggccaacttcctggaggcatcctccacggtatgcacgccatcgtcctcacccaggcagaacgtcaccaggtgctggtacggaccatggagaaagcagtgaggcccaagatgatgccaggtgggctcagaatcccccagaataatcagactttcagcctgagactaaccacacctcctccaggaagccttccttgatcacctgttccacaaatcagctcctcctcccagtgccctttgtttccctttcatcagagtgactagcacctgagtctggcttctcacagactggaggctccttgcgggcagggaaggagtctggattatagctctctccttctaaatgcctcctcgggtctcctgccatgccccctgccacctccattagagcaccaggcgcctctgtggattcctctggaccttgtctaccccttcctcatgcagggctgtgtcttgatttgcctccgtggtcccactgtccagcacaacagctggcctggaggaaaggctggcagattaagtggacccgaggcccctggcttcatatccatgactgaggtgaggcaacggaggtccattttatggatgggcaaactgactttccacatgcttcctgcttgggggcctagctgctttcaaaagccctatctcctgaggccacctttgccccagaagatgtcctgggggaacacagaccccagactcacattgactgggtactgggatacatcagccataacaactgtggagtaacgcttcctctgctctgccaggggagaaagagaatgagcctgggagtccaggcccagcccctcctccatcagacccaggagtccaggcccccagcccctcctccctcaaacctaggagtccagccccccagcccctcttccctctgacccaggagtccaggcccccagcccctcctccctcaaacccaggagtccaggcccccagcccctcttccctctgacccaggagtccagccccccagcccctcctccctctgacccaggagtccagacccccagcccctcttccctctgacccaggagtccaggcccccagcccctcttccctctgacccaggagtccaggcccccagcccctcttccctctgacccaggagtccagccccccagcccctcttccctctgactcaggagtccagacccccagcccctcttccctctgacccaggagtccagccccccagcccctcttccctctgacccaggagtccagccccccagcccctcttccctctgacccaggagtccagccccccagcccctcttccctctgacccaggagtccagccccccagcccctcttccctctgacccaggagtccagccccccagcccctcttc

SEQ ID NO: 1560317 - DNA, 4001 bp, Homo sapiens
gcactttgggaggcagaggtgggcggatcacaaagtcaagagattgagaccatcttggccaacatggtgaaaccctgtctctactaaaaatacaaaaattagctgggtgtggtggtgggcgcctgtagtgccagctacgtgggaggctgaggcaggagaatcacttgaacctgggaggcggaggttgcagtgagtccagatcgtgccactgcactccagcctggcagcagagtgagactccatctcaaaaaaaaaaaaaaaaaaaaaaagacaggtcaggtcaggcggtggtgctgggtggtaggggagtgtgatctctaccatggcatagtccgggattcaaaccctctgtctactgcctccttgccataagaccttcagaagaggatttaatctctcctgcctcagtttttctttctgtaacgtagtaaccatctggtagggctgttgggcaaattcagtcagatgatgcaggtgaagtattttgaagcctcaataactgttattatcattcttaagatgctgccagggcttagcacacagaagttgctcaataaatgggaatggttataatagcattagtggtatctgaagtagacagggaattatctgcttcccctcccactcccatgggccaggtgcttcccaaccacatccttctctgtctcctcccgtcctcaatttcttcctaagattacctttcctaagaattcttgaatccccacttgcatgcacataacagaagctcagcgatcaggtggcgtcaggggaactgaaaaaccctttttcccaaactcctgttcctcatcctgctcctgccagtctgatgtcaccacaatttgattacctctgggccagagagctcactacctaccatgcaggtattttgactcatctctcattgtttttctccctgcttactctgggggacttgagtcttcattataaacagccctgattttctagcaaagggttaatatttactaacaacataacaatcgcaatagcgactcctatgagttgagcacctgctgtcagtgaggtggtcagctaagtcctgtaatgcactatccctccaatttttcaacattgtccctgtgtcacagaggaggggctgaggctccaggaggtgatgtcctctgaccagggttacatcagcactgagtgtgagggccgaactggagctcaggcctgtctgctctgcagtgggggcccctaaccccaggctgggcagggaggagagaggctctggcttcctcctgagtgtcggggcttgggccagagtctgggccgccgcaaacagtctgggctgccgcaagcgggtgtgggtgaggaggcgaggggaggcgggaggcgtgctggggctgggacctggggtccgggggcgcttaccctgtggcggtgctcatggtgctgagtggtagctcctgcccacctggaggtgccctgggagccagcaaacatgtgaaggcctggccagtaggagcctctaattcctaccccagcctcctccctcaatgcaggcatccaggccccagcccctcctccctcaggcccaggagtccaggcccccagcccctcctccctcagacccagaagtccaggccccagtccctcttccctagacccaggagtccagaccccagtcccctcctccctcagacccaggagtccagaccccagtccactcctccctcagacccaggagtccaggccccatctcctcctccctcagacccaggagtccaggccctcagcccctcctccctcagacctaggagtccaggaccccaggccctcctccctcagacccgggagttcagacccccagcccgtcctccctgagaccctggagtccagaccccagtccccccgtccctcagacccattggtcaagccccggcccccttctctcctgacccggatctccttacctgcctgctcaggctctgccctgctctccgctgtcctttcccttccaggctgccggcccctcctcctgctccctcccagggccgtcctgcctccgcctccgcctccgcatacctgagcattcacctggcacagcctggctggagtgaccccggggcggggctggcagacagatctaggaggggctggggggactgcaggggagctgggaaactaactgtctgccttgtagcaacagaataatagcaacgaacagtacatttgatgtcacacttgttcacaggtcagagttgaaagctctgtctttaaaactcccttgaaattctaacagcgggaggaagttcgaggtttgattcctgcttgacagatgaggaagctgaaggccagagaggttgagcaacttgtccatttcagcacttggttaaggagggatttgaacccggggctgaccttctgtctccagggccagtggcagcccgtcttctatggacacctcctgcccacgatcactgcctctgctcatgcccttacctccccacccatcccgttccaccttcctttggaaatttccctcaatgacccccctattctgacaaaagctaagatttagctcgataatgcctggcccagctccaaggacatcacaaaaatgaacaggctttccaggcataaacacctttctgaaatcacttttccagaactccctccatgctgtagaggttactagcaaagctttccacatcatttctccccagagccccgtgaggggagtgtgtctgggtgggaggctgtcttcgtctcacagatgagaaaatgaggaagagaagggttaagaaacttgcatgggtacagtggctcacatctctaatcccagcactttgggaggccgaggcaggcagatcacctgaggacaggagttcgagaccagcccagccaacatggtgaaaccccatctgtactaaaaacacaaaaattatccaggtgtggtggcgggtgcctgtaatcccagctactcaggaggctgaggcaggaaaatcacttgaacccgggaggcagaggttgcggcgagccgataattgcaccactgcactccagcctaggcaagagagcgaggctccatctcaaaaaacagaaaacaggccgggcgcagtggctcacacctgtaatcccagcactttgggaggccgaggcgggtggaacacgaggtcaggagatcgagaccatcctggctaacacggtgaaaccccgtctctactaaaaatacaaacaattagccgggcgtggtggtgggcacctgtagtcccagctactcgggaggctgaggcaggagaatggcgtgaacctggaaggcggagcttgcagtgagccgagattgcgccattgcactccagcctgggcgacagagcgagactctgtctcaaaaaagaagaaaaaaaaaaagctgacatcttgcaaggccttaagggacgtgattctgatctcatctcttccttctgtgtgtcagcacactggcctccttgctgctcttggaacatccagacccggtcctgcctcagggcctttgcacttgctgtttcctctgcctggaatgctcttctaccagataccctcatgcctcactttcttgcctcctttgatctttgcctgaatgtcaccttctcagaggactggctgaccaccctgtttcaaatggcggcatcccttactcgacttcttttgttttttttgagacagagtttcactcttgttgcccaggctggagtgcagtggcgcaatcttggctcaccgcaacctccgcccccccaggttcaagtgattctcctgcctcagcctcctgagtagctgggactacaggcgcgcgccaccacgcccggctaattttgtacttttagtagagacagcatttcaccatgttggccaggatggtctcgatctcttgacctcgtgatctgcccgcctcggcctcccaaagtgctgggattatgggtgtgagccaccgcccccggcaacccaacttctttgtagtctctttcctctctccctacttcatttttgtgtggagaactttt

SEQ ID NO: 1560318 - DNA, 4001 bp, Homo sapiens
acagcacttgacccctctcccctcttcagggctgcccatcctccttcctcctaatgtcccttccagaaggctgagagctcaaaatctgaattcagccacttctcccccactcctcagcctccactctggtcccagccaccagcgtttcacccttggaccactgaagtcacttcctcaccagctccttgcccacaccctcgccccctggaagtctgtcccctaactaagtcctcatgtccctcctctgctcagagctggtgggtggctcctgcctcagagtgaaagccaaagctgtcaccatcacccacaaggctctagatctgtccctgctccttgcctcagaaactacaccttctaccacttctccttgctttctctactccagccccaccagacttcgttctgcccttgaacacggcaggctctctctgacctcagggctttggcactggctgttccctctaccccagatgtcgccatggctcactccctcacctctttcacgtctctaccaagatgtcacctcctcagagaggccctcccttgaccttcctatctaaagtaggaaggggccaggcatggtggctcatgcctgtacatcccagcactttgggaggccgaggtgggcggatcacttgaggttcgagaccagcctgaccaacatggtgaaacccgtctctactaaaaatacaaaaattagccaggcgcgctcctgtaatcccagttactcgggaggctgaggcaggagaatcgcttgaacccaggaggcagaggttgcagtgagccgagatggtgccagtgcactccagcctgggcaaaagagcgagactctgtctcaaaaaaataaataaataaataaataaatagagtaggaaggtcctctcccccatcatgccctacatccttagcccactttccttttcttcatagccaatgctcatcacccgtcgattgttttcccttgggaaggagatttcaatattgccaggtccttccatttaccaaaatatgtctaaagtgtagatttttttaagattgcaaaacctggcgattcttaaacacgagcaataaattcatgtcttgaaaaatcagggtgctggcctcgtaaaacacatcaggggctacctgctgaatgccagtgtctggcctctgccttagccctctcttagaaccacccatccatttcacagatggggaaactgggacctggggaggaccaaggactgtttccccaagtcgtccgtggcccccaaatccactaacccacaccctggtcccacaggccccatcctatcctcttcgtcctaacagcccccagcctcccaggggccccgcatctccttgtcctaccactccaggagggacctcatcctcgtcgaggggtatcacaaatttcttccttgctggcggccctgagggctggggcaccccctctttgtccttcccagggtccatctggagcctgaaagggaaggtgccaggagcgagtgagccactggcgtctacgttctcatcccgcagcaggaaccccccactcacagccgtcccccacaaaactccgagagctccatagcgtcaggtccccaacacccagcgctagaggctctgtaacgccacgcccctttgacctccaccttcggctcgccccgccccttacaggtccacaagtcccatcgctccgcccctcgcccccaccggattctattggctccgtccccaccatcccccgccttccgttcgtccggcccccgaggctagcatctggacgccctccccacgcctggccttgtccatctctcagactcggcaatgattggcttccgcggcgccaatctccacccgcagtctccgcctcccgcacctgtggtccgggcctcacggtttcagcgccgcgaggcctcacctgctggtcttggagcctcaagggaaagactgcagagggatcgaggcggcccactgccagcacggccagcgtggcccagggctcgcagcacttccggcctctctggccccgctccccaggagagtagagcatagagcagggcgatctctgtacaactctctatggttctggaggaccgcggaggtcgtgggaggagagagatgtggcctgaggatctggctcccaaactgttaagtttcaaagcccttactgagcgcttctgtgtgcccagaatcctggcagggctcagtggagaacagatcgcaggagatccaacttggtccctcctctcagtaaggagagacttaagtttgaatccaactcagacattgacttggcttcagtttcctcattcattcatttattccacacctattccccccacgcgcttcctctcttcccggtcctgtgcgagtccgtgctggtgacacagcagtgaccaacgacagccccgtgttgtcctcccggagcttacggttcagtaagggacacagacacgttcccagtgctgacccagaatgggcaggtctgggatgggagatcccgggagagccgtgggatgggggtcagggggagcgcctgactcagccccggagtccggaagggcttcctggaggaagggacatctgagcaggggcctggctgatgagttagtattagtcacttcctgaaaggatagtatcacactgttctaacttgcagctctctgattactaaggaaatggaatgttttttgtgaaagtattggtcttgtaaattttgtcttctgtgaattgcttgctcatattccttgtccatttttaaaatgggttgtatggcttttttattactattaatttctaggggtactttatggattctgattctaatccttagttacccatattgcaaacatttcctcctagtttctactttgggctttaactttagttatttttggcacagaagttatttgtgtttatgcgcaactatttatcaatctgttccgttctgacttttgcttttggtgtgttaagagccctgccataacccagggtcataatgataaattcttttttttcttttttttttttttttcgagacggagtttcgctcttattacccaggctggagtgcaatggcgcgatctcagttcactgcacctccccctcccgggttcaagcgattctcctgcctccttagtagctgggattacaggcatgtgccaccatgcccggctaattttttttttttttttttttttttgtatttttagtagagacggggtttcaccatgttggccaggctggtctcaaactcctgacctcagctgatcctgaggtcactttgtgacctcccaaagtgctgggattacagtgcacggctataatgatatattctatcatttcttttatctacgtaaaagataaaagccccgtgttgtcctcccagagcttacagttcagtgagggacacagacacggtcccaaacagtaatgacctagaatgagcaggtcatctggctttaatctatgtaagatttatttatttatttattattttttgagatggagttttgctcttgttgcctaggctggagtgcaatggagcaatctaggctcactgcaacctccgccacccacattcaagcagttctcctgcctcagcctcccaagtagctgggattacaggctaacttttgtatttttagtagagacggagtttcaccatgttggccctgctggtctcgaactcttgacctcaagtgatctgcccacctcagcctcccaaagtgctgggattacaagcatgagccacggtgcctggccaagatttatttttgaaagtgcaccgaggtcgttgtttatgagtgatgtaaccaattgtctcaagttgaccaaaggtagatcttttctccactgttctgaaattctacctttatcacataccaaattcccatacacacacgtctatttctgacatttctgttatgttcattgatctttttatttattcttgcctgcatgtacatgacatccctctgtttctttgttcacatcagtctttcatctatgggtgt

SEQ ID NO: 1560319 - DNA, 4001 bp, Homo sapiens
gggttcaagcaattctgcctcagcttcccaagtagctgggattacaggtgcccaccaccacgcccagctaattttttttttttttttttgagatggagtcttgctctgtcacccaggctggagtgcagtggcgtgatctcggctcactgcaacctccgccccccaggttcaagcgattctcctgtctcagcctcccaaatagctgggactacaggcgtgtaccaccacgctggctaatttttgtatttttagtagagacagggtttcaacatgttgtccaggctgatctcgaactcctgacctcaggtgatccgcccgcctcggcctcccaaagtcctgggattacaggtgtgagccacagcacttgacccctctcccctcttcagggctgcccatcctccttcctcctaatgtcccttccagaaggctgagagctcaaaatctgaattcagccacttctcccccactcctcagcctccactctggtcccagccaccagcgtttcacccttggaccactgaagtcacttcctcaccagctccttgcccacaccctcgccccctggaagtctgtcccctaactaagtcctcatgtccctcctctgctcagagctggtgggtggctcctgcctcagagtgaaagccaaagctgtcaccatcacccacaaggctctagatctgtccctgctccttgcctcagaaactacaccttctaccacttctccttgctttctctactccagccccaccagacttcgttctgcccttgaacacggcaggctctctctgacctcagggctttggcactggctgttccctctaccccagatgtcgccatggctcactccctcacctctttcacgtctctaccaagatgtcacctcctcagagaggccctcccttgaccttcctatctaaagtaggaaggggccaggcatggtggctcatgcctgtacatcccagcactttgggaggccgaggtgggcggatcacttgaggttcgagaccagcctgaccaacatggtgaaacccgtctctactaaaaatacaaaaattagccaggcgcgctcctgtaatcccagttactcgggaggctgaggcaggagaatcgcttgaacccaggaggcagaggttgcagtgagccgagatggtgccagtgcactccagcctgggcaaaagagcgagactctgtctcaaaaaaataaataaataaataaataaatagagtaggaaggtcctctcccccatcatgccctacatccttagcccactttccttttcttcatagccaatgctcatcacccgtcgattgttttcccttgggaaggagatttcaatattgccaggtccttccatttaccaaaatatgtctaaagtgtagatttttttaagattgcaaaacctggcgattcttaaacacgagcaataaattcatgtcttgaaaaatcagggtgctggcctcgtaaaacacatcaggggctacctgctgaatgccagtgtctggcctctgccttagccctctcttagaaccacccatccatttcacagatggggaaactgggacctggggaggaccaaggactgtttccccaagtcgtccgtggcccccaaatccactaacccacaccctggtcccacaggccccatcctatcctcttcgtcctaacagcccccagcctcccaggggccccgcatctccttgtcctaccactccaggagggacctcatcctcgtcgaggggtatcacaaatttcttccttgctggcggccctgagggctggggcaccccctctttgtccttcccagggtccatctggagcctgaaagggaaggtgccaggagcgagtgagccactggcgtctacgttctcatcccgcagcaggaaccccccactcacagccgtcccccacaaaactccgagagctccatagcgtcaggtccccaacacccagcgctagaggctctgtaacgccacgcccctttgacctccaccttcggctcgccccgccccttacaggtccacaagtcccatcgctccgcccctcgcccccaccggattctattggctccgtccccaccatcccccgccttccgttcgtccggcccccgaggctagcatctggacgccctccccacgcctggccttgtccatctctcagactcggcaatgattggcttccgcggcgccaatctccacccgcagtctccgcctcccgcacctgtggtccgggcctcacggtttcagcgccgcgaggcctcacctgctggtcttggagcctcaagggaaagactgcagagggatcgaggcggcccactgccagcacggccagcgtggcccagggctcgcagcacttccggcctctctggccccgctccccaggagagtagagcatagagcagggcgatctctgtacaactctctatggttctggaggaccgcggaggtcgtgggaggagagagatgtggcctgaggatctggctcccaaactgttaagtttcaaagcccttactgagcgcttctgtgtgcccagaatcctggcagggctcagtggagaacagatcgcaggagatccaacttggtccctcctctcagtaaggagagacttaagtttgaatccaactcagacattgacttggcttcagtttcctcattcattcatttattccacacctattccccccacgcgcttcctctcttcccggtcctgtgcgagtccgtgctggtgacacagcagtgaccaacgacagccccgtgttgtcctcccggagcttacggttcagtaagggacacagacacgttcccagtgctgacccagaatgggcaggtctgggatgggagatcccgggagagccgtgggatgggggtcagggggagcgcctgactcagccccggagtccggaagggcttcctggaggaagggacatctgagcaggggcctggctgatgagttagtattagtcacttcctgaaaggatagtatcacactgttctaacttgcagctctctgattactaaggaaatggaatgttttttgtgaaagtattggtcttgtaaattttgtcttctgtgaattgcttgctcatattccttgtccatttttaaaatgggttgtatggcttttttattactattaatttctaggggtactttatggattctgattctaatccttagttacccatattgcaaacatttcctcctagtttctactttgggctttaactttagttatttttggcacagaagttatttgtgtttatgcgcaactatttatcaatctgttccgttctgacttttgcttttggtgtgttaagagccctgccataacccagggtcataatgataaattcttttttttcttttttttttttttttcgagacggagtttcgctcttattacccaggctggagtgcaatggcgcgatctcagttcactgcacctccccctcccgggttcaagcgattctcctgcctccttagtagctgggattacaggcatgtgccaccatgcccggctaattttttttttttttttttttttttgtatttttagtagagacggggtttcaccatgttggccaggctggtctcaaactcctgacctcagctgatcctgaggtcactttgtgacctcccaaagtgctgggattacagtgcacggctataatgatatattctatcatttcttttatctacgtaaaagataaaagccccgtgttgtcctcccagagcttacagttcagtgagggacacagacacggtcccaaacagtaatgacctagaatgagcaggtcatctggctttaatctatgtaagatttatttatttatttattattttttgagatggagttttgctcttgttgcctaggctggagtgcaatggagcaatctaggctcactgcaacctccgccacccacattcaagcagttctcctgcctcagcctcccaagtagctgggattacaggctaacttttgtatttttagtagagacggagt

SEQ ID NO: 1560320 - DNA, 4001 bp, Homo sapiens
ctacctctgggctaagggcaaggagaaggaacaggtgctcacctcagggtgaatacacaagtttttgcgggagctcagagccagtcccagaaacggcagcttctcgccctcctgcttctcatagaagttgagcaactttcgaagctcttcaatcacctactccaaagttggggggcagggggagcttgtgctcattggaggcacaaacccctgccctgccaggtcccagtctcttccccagcttcccaaacacccccgaaagctggtgacggccaccgccagggggaccaatagggcctagggaacagtggggctggagcaccaggatgagtcccagcttaccttctcaatctctggcacagttcttgagcagtagatgagtttggtcacctccagcggatatgcctgccgataacaagcggactcagtccctgtcccgccccttcctttgtctgcctttacgggttcagcgcatcactcactctctggtatgccatgatcagggccaacagggatactgtcttcccggtgcctgagggcatctccaggactccatgaccctgcatgttggggaccagaggggcaacacacagggtctcagaaccttgggcacacaaactctggggactctccccgacccccaatgccaccaactcagaacagcaggataacacagcagcagttaagattgggcagtgggtttgaacctcacttctgcctcctccttgttgagtggtcttaggcaagtaccttcacctccccagacctcagtatccctatctctaaaatgagcctaaagccaggcgtggtggctcacacctgtaatcccagcactttgggaggctgaggcaggtgaaccacctgaggtcagaagttcaagaccagctgggccaacaaggtgaaaccccgtctctactaaaaatacaaaaaattagccagatgtggtggcgcgcacctgtaattcaatctcaaaaataaataaataaaataaaatgggcctaataataaaaccttcctcataacatgactatgaggattgtgagaaattgcaggttaaatatttggcacagtagctgatatatagtgaacttttctcccttcttttttaagagacaagtgtcactattgcccaggctggaatgcagtggcacaatcatggctcactgcagcctccaactcctggcctcaagcgatcctcctgcctcagcctcccgagtaggtgggattacaggcgcccgccaccacacctggctaatttttgtatttttagtacagacggggtttcaccgtgttggccaggctggtctccaactcctgacctcaagtgatccgcccgcctcgtcctcccaaagctctgggattacaggcgcgagccaccgcgcccagcctattcaccattattgttttagataacggaagattatggggtcctggattcccagggacctcggacttctaaaatccagacgtcctgcaatctgtcttaggcccaggcgtggcagccccaccggtcgagtgggcgggtcgggcccaccggccacccaccttggcgtccagcgtgcgtttgagctcccgcatgtaggagaactgctcggggtagatgtagtcgtacgggaagtagaccaggagcccgtccacgttgagcctggcggcaggggctgctgggtcagttcccgtcccctcagcccctctcccgcctccacagtgcccggtcgtcgagcccagagaagggtgacgggcccggcgcccccggtaaccctcaggtcctcaggagcctcggggccccctcagtgtctcctcgctatcactgctgctccctgcggctgcccccgtcccaccccttcaccctcccctcgcccccttggggacccaggcgcgcccaccgatgaccccatcttcaagaccccccgcgcccgctagcgagcgcgacccccagcccccttctcacttcatggcgccggccggactgtgcagcggggtcgacccgcctccctcatgaatattcagcgagaggccgggtcgtggacatcctcgagggctcgctccacctatattacgagaccattggctaacctgcccgtcaatccgctagggcagagccaatcgggatactgcgcgtgcgcacggaaaagcgagggcggctgactctcgggtgaggcggtgcgggaggcgtcactgaggatcgtcgagggccaatcaaaaagaaaacatggaagggaaagagccgagagactcgatctcattcactagaatttggtcctcctgcgcctgccaagattgtctgagtattgatcgaacccaggagttcgagatcagcttgagcaagatagcgagaacccccgcccctccacctcgtctcaaaaaaaaaaaaaaatcgtctcagtagcgaatagtctaacggagaatgacagggaaattggtgatcctttctgggcccaagagttagaaatggctttgcaggccgggcgcggtggctcaagcctgtaatcccagcactttgggaggctgaggcaggtggatcacctgaggtcgggagttcaagaccagcctgaccaacatggagaaaacctgtctctactaaagatacaaaattagccgggcgtgctggcaaatgcttgtaatcccagctactcgggaggctgaagcaggagaattgcttgaacctgggaggcagaggttgcagtgagcagagatggcgccgtcgcactctagcctgggcaacaaaagcgaaactccatttcaaatattaataataataactaataaataaaacataaatgctagcttttgtttgtttcttcaacaaatagctatgtggcatctaccatgtgtctgatcctgtgctggcccctgggaacagaaaggtgaccatgacagcctcagcacctgccctcaaagaacagatttttttccttgagacagggtctttctctgtcgccaaggctggagtgcagtggcacagtcacagctcactgcagcctccacctcttgggctcaagcgatcctcccacctcagcttccagagtagctgggaccacaggtgtgcaccaccaagcccagctaagttttattttttaaatttttttagagacgaggtctcaccacgttgcccaggctggttaaactcgcaggttcaagtgatcctctcccctcagcctttcaaattgttgggattacaggggtgaggcaccaggcctggcctcaaagaacagatattaaatatacaaatgaatatatgattacagcctggagtggtggctcgtgcctgtggttccaacactttggaaggccaaggcgagtacattgcttgagctcaggagctagagaccagcctgggcaacatggtgaaaacccgtctctacaaaaaatgcaaaaattagctgggcgtggtggcgtgcacctgtagtcccagatactcaggaggctgaggtgggagaatcacctgggcctgggaggcagaggttgcaatgggcagtgattgtgccactgcactccagcctgggcaacaggagtgaaaacctatctcaaatgtgtgtgtgtgtgtgtgtgtgtgtgtgtgtgcgcacgtgtataatcacaagtacaaaagtgctgtgaaggaaaacttcaagtcaccataaagattgattatgggctgggtgcagtggctcatgcctgtaatcccagcactttgggaggccaaggcagatggatcacgaggtcaggagttcaagaccagcctggtcaacatggtgaaaccctatctctactaaaaaaaaaaaaaaaaaaaaaaaagccaggcatagtggcatgcatctgtaatcccatctactcgggaggctaaagcaggagaattgcttgaacccaggaggcagaagtgagccaagatcacgccactgcactccagcctgcgtgacagagcaagactccgtcccagaaaaagaaaaaaaaaaaagacttattatgacaggatgtctactgtcaactgtggggtgtgagtgttggccaagtgatcagagaag

SEQ ID NO: 1560321 - DNA, 4001 bp, Homo sapiens
ttctggcagggacccttccccactcccaagcccaccacaacggcggctttcctcatcggacacagcatacatgaaggcctgttcccggctttgggggggggagaatgaagagggggtgacgtcagggtgtctcaatggggctctgttccccaggccttggagccaggagccaggcacgggcaaggggagcatgtgtgagtgtgctgtgtatgcgtccacgtgcttaaaacagggaaacaccagacctgcacggaggaagcttgggggtgcgggacctcgggaacatgggggccagtgaggcagggagagagcaggcacatggagagaggggttcaggagactgcgagacagagtgcagaagtggcagcagtcagacagcaagggctgggatggcgaggtcccagaagcacacctgggtcccacagaggcggggtagggattctcccagacagactatgcaagcctggggggacaaaactcctgggcaccccccaacctcacgtgacggcccaaactttttttaagggactatgagggtcggaagggaggagtggtggcagaggaagaacacgccggcctcctggggggccccaccacctcccccactccaggcggccctctatggcgccagagccgggaagaaaacaggaagtgggaaacagccacggcagagagagggaccgggatggagaactggatggaggggtgcggagcggcaggccaggaggcagacgggaaagatgcaccgatcggaggccattccaggcctccttcccctcccctcccccagccggaaaacccacacactgtcccgccccccgacagggttggggaagcgacccgcggatcctatcaggccaaggccggtagcagggagagaagatgaagcgaggttgtctgggtgcctcggcctcctccttgggcgagggtaggctcctgctgcccccagggcccagccacccgggagcgagtggaagccgggggagtgtgtaggacgcacgtgactgaccctaccgcactccgcaccccggccccacccccagggcccctcctcggtccgggtcccaatcccctggcgccggatcccagctcggagccctttaagattaagccgcccccacccgccgagcagggggatggggatgggaatggggtgggaatggggtggggatggggtggggtgggtgggccggtcggggcacacacccgcacacaggagcccgagccgccgccgccgccgccgccgccgccgggggaaggaaacaagtttgaacagcggcgcccggcccccttccccctcccccgtccccgccccgggccggattccgacggggtagacgggcagggggcggctgggacccctccccctgcgcgctcgggcgcaaagtccagcccgcgcgagcccgggggcggcgggggaggggagggggaaaagtccgagtgggagggggagttaatcccgctgccccccgcccgccgaccgagggggaggggaaccttggccccttaaggaggagcaagttggcggggaagagaggggcggagggaagagacggcccgctgaaagagaagaggtggatccgggagggggggcgaggggggagcctctgcgtctccccccaccttccccaccctcctcaaccccgggccaccggtggcgcgggaggagggtacccaggtctccccggagccaccttaaagccgcgcgttctaaggtcggaaacaaaaagttcctttttcgaacgttcgggctgcgctttggaactttgcgactcggcgagggcgggggagcgaggagccgacagaggcgggcgggggaggggcggcgcagccaggaccccgagtcccgggctccccactcacgccctcctcctagaggccatcccgtatcccccgctaacctggtgcagggcacgcgccgccgtgaaggtcaccagcaggaccgcgcagcgcagaaccagggatagcgggcccggtggacgagcccccccgccccgcacacgtcccggcccccagagtgcaacgtgacaagagcggaggggaaggaccccgccacccccgtgatcccgggagtgggggagagcccggcctgcggggtcccggtagggatacaggaccaagacccgcagcacccacaccactccgcccggagccaggaatcgggggtcccaggcagcaaccccgctcgcgccacgagaagcaacaggtctccagtgcttgaggggtcccccagaactggggatcactcgggctcccccggaccccttcagcccccccaaagtttctccgttcggtttcccggggcaacaagtctcccccacacgtgctgcccccgcccccacctgtgtccgccggggtcttcatgctggggggcccggggcgaagcgccccgattccgggccgcggctcccggcgccctcgctgccccgtcccgtcccgcgcccgtcgggccgccctcgccgcctcacccggcctcgcctctcagagcctctcccctccccgccgccgcctcccgggttaatatcgcactccggggccgggacgcccacgccccccggccggcgacgtcaccgccgcgtcgccatggagacactgcgcccgccccctccccgcgcactcacacacacgctcgtcggcgcgcagccactgaggaccggccggctctgggcttaaaggggccgcgcggcgggggagggaggaaggagggggtgggggtgggatggggtcccgcgggtcatgaccctagtcagaggctccgagtctgcagctaacttaagtcttcggcactcgctacctgctgcccctcctcctctcctgcccactgcgggctccagagtttcttttgggagcctgtatgggaaaacggggggcccttccgaggaagcgggggtcagaaacttttgtggggagggggcagaatcttctctgcagaggggcggggtcaggaccttagaagatgatgaagaccacagcatttcccagcttggttttacccaaccccccaaccctgagcctgaatgggggcagctgtccaggggtggggtggaatgggtgggatgcatttcccagcatcggaaatggggaggcggctgtgccctccgctcctgtggggatggggtcttggcttccctgataacccccgtccagctggggaggaagtgaccagagagaatgcatttggaagcccccaccaccaccgtccccaggctgcagctgtcccggggatagggctggcgccggaggtccccccacgtccactactaggaccgggggttccggaggcggggccgggatacgagggggcgaccaaagtctgaacaaatgtgctcccaaggggcactgagggtcgccaggagagaggaagacagggcttaagatcgaaagccagagcgtagagaagtgttaagtctccgttctctgcctcagccgggagggaaggatgaagcctgaggctctgggaaacaggaaatcacagcgcagatctgatggagcccaggagccggcagcagggtagaggccaaatagaagcaatattcacaggcatagcctggaaacagagtctcaaaaaagactctgaggttccgaaggaggggcgtatgggtggcgggcgggagttgggggggctgggtgggggacgaatccagaagatgggcggggagacagaaaagtcacagatagggaaggcctgcggagctcaggctcccggtacccagggcttcaatcccagcctcctcgcttgcggggtacctagtccaccttagacaggctcctcaccagtgcctaaaaaaaaaagtctcaggcctcctccttggggagaccaagggctccagggaagctttcccccacaacccccgggaattatgtaaccttgcctacggacagtacagctcccccacggatattgtaaccctctgggagcggtgtggtccagcaataataatcatcttcattgttcgaataacagctcccgaattccgagtgttcatgatgtgccaggcacc

SEQ ID NO: 1560322 - DNA, 4001 bp, Homo sapiens
tatgagggtcggaagggaggagtggtggcagaggaagaacacgccggcctcctggggggccccaccacctcccccactccaggcggccctctatggcgccagagccgggaagaaaacaggaagtgggaaacagccacggcagagagagggaccgggatggagaactggatggaggggtgcggagcggcaggccaggaggcagacgggaaagatgcaccgatcggaggccattccaggcctccttcccctcccctcccccagccggaaaacccacacactgtcccgccccccgacagggttggggaagcgacccgcggatcctatcaggccaaggccggtagcagggagagaagatgaagcgaggttgtctgggtgcctcggcctcctccttgggcgagggtaggctcctgctgcccccagggcccagccacccgggagcgagtggaagccgggggagtgtgtaggacgcacgtgactgaccctaccgcactccgcaccccggccccacccccagggcccctcctcggtccgggtcccaatcccctggcgccggatcccagctcggagccctttaagattaagccgcccccacccgccgagcagggggatggggatgggaatggggtgggaatggggtggggatggggtggggtgggtgggccggtcggggcacacacccgcacacaggagcccgagccgccgccgccgccgccgccgccgccgggggaaggaaacaagtttgaacagcggcgcccggcccccttccccctcccccgtccccgccccgggccggattccgacggggtagacgggcagggggcggctgggacccctccccctgcgcgctcgggcgcaaagtccagcccgcgcgagcccgggggcggcgggggaggggagggggaaaagtccgagtgggagggggagttaatcccgctgccccccgcccgccgaccgagggggaggggaaccttggccccttaaggaggagcaagttggcggggaagagaggggcggagggaagagacggcccgctgaaagagaagaggtggatccgggagggggggcgaggggggagcctctgcgtctccccccaccttccccaccctcctcaaccccgggccaccggtggcgcgggaggagggtacccaggtctccccggagccaccttaaagccgcgcgttctaaggtcggaaacaaaaagttcctttttcgaacgttcgggctgcgctttggaactttgcgactcggcgagggcgggggagcgaggagccgacagaggcgggcgggggaggggcggcgcagccaggaccccgagtcccgggctccccactcacgccctcctcctagaggccatcccgtatcccccgctaacctggtgcagggcacgcgccgccgtgaaggtcaccagcaggaccgcgcagcgcagaaccagggatagcgggcccggtggacgagcccccccgccccgcacacgtcccggcccccagagtgcaacgtgacaagagcggaggggaaggaccccgccacccccgtgatcccgggagtgggggagagcccggcctgcggggtcccggtagggatacaggaccaagacccgcagcacccacaccactccgcccggagccaggaatcgggggtcccaggcagcaaccccgctcgcgccacgagaagcaacaggtctccagtgcttgaggggtcccccagaactggggatcactcgggctcccccggaccccttcagcccccccaaagtttctccgttcggtttcccggggcaacaagtctcccccacacgtgctgcccccgcccccacctgtgtccgccggggtcttcatgctggggggcccggggcgaagcgccccgattccgggccgcggctcccggcgccctcgctgccccgtcccgtcccgcgcccgtcgggccgccctcgccgcctcacccggcctcgcctctcagagcctctcccctccccgccgccgcctcccgggttaatatcgcactccggggccgggacgcccacgccccccggccggcgacgtcaccgccgcgtcgccatggagacactgcgcccgccccctccccgcgcactcacacacacgctcgtcggcgcgcagccactgaggaccggccggctctgggcttaaaggggccgcgcggcgggggagggaggaaggagggggtgggggtgggatggggtcccgcgggtcatgaccctagtcagaggctccgagtctgcagctaacttaagtcttcggcactcgctacctgctgcccctcctcctctcctgcccactgcgggctccagagtttcttttgggagcctgtatgggaaaacggggggcccttccgaggaagcgggggtcagaaacttttgtggggagggggcagaatcttctctgcagaggggcggggtcaggaccttagaagatgatgaagaccacagcatttcccagcttggttttacccaaccccccaaccctgagcctgaatgggggcagctgtccaggggtggggtggaatgggtgggatgcatttcccagcatcggaaatggggaggcggctgtgccctccgctcctgtggggatggggtcttggcttccctgataacccccgtccagctggggaggaagtgaccagagagaatgcatttggaagcccccaccaccaccgtccccaggctgcagctgtcccggggatagggctggcgccggaggtccccccacgtccactactaggaccgggggttccggaggcggggccgggatacgagggggcgaccaaagtctgaacaaatgtgctcccaaggggcactgagggtcgccaggagagaggaagacagggcttaagatcgaaagccagagcgtagagaagtgttaagtctccgttctctgcctcagccgggagggaaggatgaagcctgaggctctgggaaacaggaaatcacagcgcagatctgatggagcccaggagccggcagcagggtagaggccaaatagaagcaatattcacaggcatagcctggaaacagagtctcaaaaaagactctgaggttccgaaggaggggcgtatgggtggcgggcgggagttgggggggctgggtgggggacgaatccagaagatgggcggggagacagaaaagtcacagatagggaaggcctgcggagctcaggctcccggtacccagggcttcaatcccagcctcctcgcttgcggggtacctagtccaccttagacaggctcctcaccagtgcctaaaaaaaaaagtctcaggcctcctccttggggagaccaagggctccagggaagctttcccccacaacccccgggaattatgtaaccttgcctacggacagtacagctcccccacggatattgtaaccctctgggagcggtgtggtccagcaataataatcatcttcattgttcgaataacagctcccgaattccgagtgttcatgatgtgccaggcaccgggccaagcattgtcaggggcatcttctcatttaatcctcacaaaatcccaacgaggggaattactgctgttatccccatttacagataaagaaagtgatgctctctgagggaaaatcagtccactaaatcttacagccaggaagtattggaactaagattcgaacccagatctaaccaattccaaaccaccacatttaccctttaccattatgctttattacctcttttactaccccctccaaaaaaaaaaaaatgcagattttcaaagatactacatcagggcccggcgcagtggcgcacgcctgtaaacctagcactttgggagccgaggcgggagatcacttcaggtcagaagttccagaccagcctggccaacatggtgaaaccccatctctactaaaagtacagaaatttgccaggcgtggtggcgcacctgtaatcccggctactcaggaggctgaggcaggagaatcgcttgaacccaggaggatcgcttgaatccaggaggcggaggctgtagtgagccg

SEQ ID NO: 1560323 - DNA, 4001 bp, Homo sapiens
aacagaaagtgctttgtaacacaacaatgaggctgggcgaggtggctcatgcctgtaatcccagcactttgggaagctgaggcgagtggatcacgaggtcagaagttcgagaccagcctgaccaatatggtgaaaccccgtctctactaaaaatacaaaaattagttccgtgtggtggcgtgagcctgtaatcccagctactcaggaggctgaggcaggagaatggcttgaacccaggagatggaggttgcaatgagccgagatcacgccactgcactccagcctgggcaacagagtgagactccgtctcaaaaaaaaaaaaaaaagaatgagaacatatggacacagggaggggaacaatacacacaaacaaaatttagaaacaggtgaaaataattttagtaatatttttactaatactgatatgctcaaaatattattatttcaataagtaatctaaaaattattgagatgtcttatgttcttttcatcatactaagcctttaatatttggtgtgtattttacactcacagcacatctcaatttgcagtccccatgtttcaagcactaaataaccatgtgtgtccggtggctaccatactggacagcgttgatctgaaatcgcatctgtatgcatcaccagcatatttgcagagatccccatctcagcagcacacctgaggctcatctgcgaaagcacctgcaacttctctacaacctcccacatcacctccaaacacatcctcatgtcatctgcaaacacacccatagctcacaggccaatgcctaaatatcattgcaggcaccttcagagaaagcacttactaaaggggtatacttgattccacatctgctttgacctgcaaatctcccttctcctttacatacatttgcatctcatttgtatgtcaatctaaatccactggcagagcctcagatcatcatctcaaagtcaggtggatgtggggctgggcaggcctccaggtgttcctcctcctgcttcctctggggctcttgatcctcctcctcttccttgctgctctcctcctcctcctccaatatggtgaccagttcctcccgcagcgcccccatctccagccccaggctgcacagctgtcccagcagctggacatccactcggcgcaggttcccctgccagtaggaaggggacgtcacagggatgccaccccagagagcaaggggtctctccaggacctgggtgagagcaggtcccaactcatgtcctggccacagcgcctgggcagggtcctcactgtgcccatggaccctaactgccttcctgcttctcagagtgtctcttgatctctaactcttctctttgtctctccatttcattgtccctgacttctctctctctgtctcctccctctcttatctatatctgtccctgtttccctttgtctctgtccccatttattttttgtctttccatgcccctgtctctctgtctttatgtgttgccatttctctgcccctgcctttggctctctttctctcgcttgccctctctctgccctccccaactttctcaaattcagtctgtctctccatctctgttcctgctctccgtctctgcttcccacctctgtccctctcttttgggatctccctgtccccacctctgttcccgtccctcactctatgtctgtctctcggtgtctgtacatgcctctcatgtctctgcttctatctctcagattctgtttttcgatctctggccttctctatttttgttcatttccattcattctcatttcctctctttctctttcccttccaaacccctcactcaccagctcctccctgatccacagcagactatcgcaggcacctccagtgtctgcccctgcagtcctgagggtctgaccagggatttccactggggagacctccctcagggcctgggggggtgggcccagccccggaggcaccagtccagcctgattcagctgcctccacagttccatcgtctctgagctatggctgcaaggagcaggaagtagcaaggtccagggtggcctggtcccctggggagctgtgtgcgtggtggagagtaaagggcagagggagtgggatgggggttcctgggaaaggtatcccaaagtccactcttcagagagaatcagctggccttgtgcttttctttttccttctgaagtctaacctcaactctgctcacagggttcaaacatagcctcttgcagaggtctaactccacccttccctgcctgtctcaggcctgacccctcaggggcgctcagtgtctgtagatgcctggcaccctctgtccttccacctgccccccaccaccacttctccagcctctcctcagcctccatttgacctctggcttgcccatagcttggtccttgcttgtcctcttggcacgggtcatcctagggctttcccaccagtgtgcctttgggggcaggaatggctcccaggggcaccaagacagcaatcccttagctggagtgcctgtgtccaggctgctggcctagggccaagcagccaattctgctgaccctggacttgcctatgggtatattatccctgttgagggtgagggcttctgctgtggaaaagtctgggaagcactgcaggcctctctcggccttggacccttccttcagacccaaggtgcatatatatacatatatataatggtagatcacgaggtcaggagatcaagaccatcctggccacatggtgaaaccccgtctctagtaaaacacaaaaaattagccgggcatgctgccgcgtgcctgtagtcccagctactcgggaggctgaggcaggagaatggtgtgaacccaggaggtggaggttgcagtaagccaagatcacgccactgcattccagcctggcgacagagcaagactccatcttaaaataaacaaatgaacaatatatatatatatgtattttgttttttgagacagagtctcgctctgtcatccaggctggactgcagtggtgcaatcttggctcactgcaacctccgcctcccgggttcaagcgattcccctgcctcagcctcctgaacagctggggttacaggtgcacgccaccacacctggcgaatttttgtatgtttagtggagacggggtttcaccatgttagccaggctggtctcaaacccctgacctcaggtgatctgcccacctcggcctcccaaagtgctgggattacaggcgtgagccaacgcgcccagccccaagtcccttttaccatagaaagtaacatagtcacagtgcccagggattcacaggtatggggagagggttcgttattcagctgccacacccaccttcctaaacctgctgcccttccagtttcctcacgtgcacagccacgcccgtctgcttttagtttctcaatctgttggcttaaccttcaaaacaggcccaggatttgagcacttctcaccattccctctgccccatccccattcatctcttgcctagactgctacagcagcctcttttactggtcccctgcatccacccttgccctctaaggcaagggtccccagtccctgggccaaggaccagtaccagcccctcgcctgctaggaactgggccgcacagcaagagatgagcagcgggtaagtgagcattaccgcctgagctccgcctcctgtcacatcagcagtggcattagattctcataggaggcaaaccctattgtgaactgtgcgtgcgggggatctaggttgcctgctccttatgagaatctaatgcctgatgatctcaggtggaacagtttcatcccaaaaccatccccaccccacccccgacccccagtctatggaaaaattgtcctccacgaaaccagtccctggtaacaaaacggttagggaccgctgctctaaggtacattctccacctggcagaaataatctttacaaaatgtaaatccgattttgacactcccttcttcccactgtgaatagaataaaaccctaccaggcctgc

SEQ ID NO: 1560324 - DNA, 4001 bp, Homo sapiens
atattagggtgaattattagagaagtatacatgcttcttagtggggaatagctcctaccttggtaacctctggctgggccttgataagttcccttctggaacagaggaatgcagccacaaggccaggtgtagccagtgtagccacgctcctccttttgctgactcagcgtgcagcgtttccaaggaggccatcagcgggctgcatttctaaagattcctttcccaggggcttccttgcctgctcttgtctggctacctgcctaccctaacagtattccccctcaagagttggagaccctgaaaagctttgggcataaggacgtcgtgggtcttctgtaactacttcctgctgacgtgggacgaagaagtcatcagggtctccctctcttgctctctgtcagggaaggagcccctccgtagttgcagaatctttgcccactggcatccaagggagatatgtacttgtaggtgctgggacctccaaggaagattggatgatctctttccatttttaggggctctgtgtgaaattgccatatcctggaagagacatatttaattagtgaattatagagacaagggccaaagaggagaaagcaggctattaagtgcagctggtcccagtaaagggacaaaccatgtgagggaggggagggcagacttcacagcctcccaaatggaccctgctgaatcaccttttccaaagttatggagccacgtaacctcatcatagatcttttttatatcctcctctatcgccccactgttattgacataaatgcaacaggatttactgatcactgcacagactccaccctgctctgctaagaggtaatctaaggccaatctgttgttcatgactacatttgctagagaatctatggaggccttgagtttagagatgctatctctggtactcttagctatgttgtctatttgtctggagagatttctgagggtgacatcatgataagtgaaccctccccatggggcgatcattcctatggccgcacccatccctgccagtattagacccagagctcttttctgtctgggttgggtggtgttataaatggtcacacctatcccccgtggtcccaaaagtcccacagcacattctcccgtatgttggatgttattaatgcaagtgtagaggtttgccacagggggggttgaataagttatcttaggacttccatcaaagggcagtttatttttttgtggcccacataaaaatacatagccaggaggggtacaggcccaccgggggatgtggctgtcgaaccacttgtgtaactgcgatttccaccctgctggaatagtttgattgcatgcaggggatagaggccctcccaggggaacagtagattttggccatgtggggacagtgtgtgccttgggaagcaaatatagaaccctccatgtgattagctcttttccttcccaagctgcacagcggttttggggtgacttgtctcgataatcgttcatttgtttagctggacaccagtgagtcaagttagggtggcagcctgctggggagaagctcatgggatggatggtgggactggggaatccctcctcagaggtgttcttcctgtcacagtgtccttcagggcatggacaacaggtttggtttagagaagagcagttgtagaaatagaaagaagttttagagctttgattgaaaggtggagtgagatccaggcaggggacttggtgcgctgagttagcaagcgaaacctggagcggaacagatttatgttggccttcagggattcctgaaccaaatgttaggtttaaagaaaaatttcttaccaaaatatattggtaagatgaggacctggtgatgaagttgtggcagatccaacagttgcttagatggtttcccgaagcaattattttggaaaaactgacaagggaattttcattccactgtgcctgtgagagtaggggcatgggaaggagggaaagataaaggaaaaggaatttctctgtcatagctgattctcccttaagctttgtgaaagcaaaaggaaagtgctgaaaataggagagacaaataatgaaatggttcgatggagtgtttagtgagaaatcaggctgttatcgggacttcaggtggcatgccagtgtgggtcaaaataaggagaagaaccgatgccaccgcaaccaagattccccgtactgagagacctttttttgaggtgaaaggagagaaggctttacttatcttttcacttgaagaggaattggaagctctccagtggctggctcatgagactactcagatgctgattctgttgttggttcttcgggaccttctcacagttttactcaggagtgatgtatccaactagagattccagaaactttgatagctgtcggggtagaaagtaataaaggggcctttccataaaggagagacccaggctagttgagacctgggtgacccatctctccaggttttgatgaggacttgtgaccctggctagtataagggttgattactggaggggtcagtggcaggcagtaccttttgctcaaactcctggatggcttgttgaaattgggccagtgatgttatgtatttgattaattgggtaacttctggatctaacattaggtctgcatgtaggaaggcataagtaatattaggggtcatgctcagaacagtgctacggacaggagttctaaccatggtgaggaggtttcctggcacactttgttcagggtccttttaatagtttgattagtgctttctaccttgccagaggaatgtgttctccaggagtgctaggagtactttatttctagggcttttgtcactaattaaagggtgcgtgaaataaaaactgggccgttgtcactttgtaaacacaaactaaacccacactgaggggtgattttttttttctttttgtttttgagacggagtctcgctctgttgtccaggctggagtgcagtggcacaatctcagctcaccacaagctccacctcccgggttcacaccattcttctgcctcagcctcctgagtagctgggactataggcgcccgctaccacacccacctaattttttctcttttttagtagagacaggatttcactgtgttagccaggatggtctcaattctctgacctcgtgatccgcctgcctcggcctcccaaagtgctgagattacagaagtgagccaccacgcccggccgggatgattttttttttttttttaagaagtaccttggctacttcctgggccttttctgttcttgtaggaaaggctttaacccacccaataaaggtgtccacaaacaccagaaggcatttatagcctctacaggctggcaattgagtgaaatacatccatcagtctttccctgggtaagcttcccaatgctgaactggctcaactaagcaggacagggagctgcattggctctggccggttgtcctgggtcacaaggaggcaaggctacgcgtttgaggccaacctgggcaacattgaacaaaaaaaaaaatttggctgggcacggtggctcatgcctgtaatcccagcactttgggaggccgaggcaggcggattacctgaggttgggagttcaagaccagtctgaccagcatggagaaaccccatctctactaaaaataccaaaaaaaaaaaaaaattttttttggtctttttttggtggcacctgcctgtaatcccagctactcaggaggctgaggcaggagaatcgcttgaacttgggagggagagattgcgatgagctgagatcacgccgttgcactccagcctgggtactaagagtgaaactttgactcaaaaaaaaaaaaaaaaaaaaaaaaaagcagggcagcgtagggccctgggggctattacaggcacaggatgcacaggtgttaaagacctgacaaatagtctagtagagccctttcctggaaaagaggtttttgcacatgtgctggagatgatgtctcccaaagtgacatgactcatgg

SEQ ID NO: 1560325 - DNA, 4001 bp, Homo sapiens
taatactaatgattacaggaacggaaaagatgtgatatcttcccccactcttaaaaggttccttggggtttatacagaaaaaaatgcttgaaaagcatagaagaccccctggggctcagagttagtgaactgggctgttgattctggttttttagtccattatatgatcacataaacagcaaggggaatgtgagaagcattttctatcagcttattcaacaaaaagcaaaaaggacctgagtacttcacgggtctgttacaatggcctaatgaggtggagaaagcagtctcctgtggcccattggaaaccctggttgtacagagaaactagggagtaaggaagtggtcacaggtgaccctctggaagagccaggcagttccattgaggagtcacagaatgaggcattcttgaagagtaggcaggcggagaaggacccaataataagtgagggatttctttctttctttttttttttcagacagagtttcgctcttgttgcccaggctggagtgcaatggtgcgatctcggcccactgcaatggccagctcccgggttcaagcgattctcctgcctcagcctcccaagtagctgggattacaagcgtgtgccaccacgcccggctaatttttgtatatttagtagagatggggtttcaccatgttggccaggctggtcttgaactcctgccctcaggtgatccacccccctcaacctctcagagtgctgagattacaggcatgagccaccgtgcccggccaaaatgagggatttctttaagcaggcatcctcccagtgccggtccctccagtgaaacaggaggcaagggaaaggacaaagctgagtctcatttctgaggaaaaaagtataaacatcagcataggccctcaaaggactctggcgcctgagtgaagcaaacgcagcaggtcctggataaacaggccctgcaagaggcttgcacccgcaggaagaattcatgaaatccctgcggcgaggagagggacagcaaagagtaagcagagtgacctgggagattaatcaacggtgggggcatatggtgttcaggggagtgaacggccatgaatggcaagtataagagctgacttaacaccggattgtagttttaattaaaagatatgcgccggtcgcagtggctcacgcccgtaatcccagcagtttgggaggccgaggtgggcggatcacgaggtcaggagttcgagaccagcctggccaatatggtgaaactctgtctctactaaaaatacaaaaattagccgggcatggtggcacacgcctgtagtccctgctactcgggaggctgaggcagaagaatcgcttgaacccgggaggtggaggttgcagtgagccgagatcacaccactgcgctccagcctgggcgacagagtgagactctgtcctcccccccacaaaaaaaaatatgaagctccccagtcactgcacagccaggcgtattccctgccaccttcacaagcctcctgcaagaagggtcaccatgtgtctcagatctactcactgtggagtttaaatcctccctcctctgcttatcacccctcagggtgagctgagaaatcagccagagggagcagagtgacagtggctgaagggaaatggtactgggcagtcgttagtgaacagagcctgagaggaaaaacccctccccttaaagctgccagatctgcattagggcaggaggttcttcagtgcagaaagaagcagaggtcgtcaaccagagaatctggcaccagctttttggtacttacctggataaccaggcgaggtaaccaggtaaccaggtgaaaacaccagatgttacccagaggggtgtggaagtcctctggttcttggtcttcttggattcagtcaagagatgcgcagaaagagttaaagggtaaatgcccttcatttaaagagacaggagctcagaaagaagcgacaccctgaacgacagaaccgagtgggctcctgaaaagaaggagtctgtccttacttatgctggcctgacccttttaatgagaacctgacatgattattcatgaaggggccgtgcacagccattattagtaagcatgttctgggaagtcatttgggcaggaatgtgctgtgactgtccatgcacacatcacatatctccttagcatctcaaatctccacccaggggtgtggcttttttttttttttttttgagacggagtctcactctgtcgcccaggctggagtgcggtggcgctatctcggctcactgcaagctccgcctcccgggttcacgccattctcctgcctcagcctcctgagtagctgggaccacaggtgcctgccaccacgcccagctaattttttttttgtatttttagtagagacgggatttcaccgtgttagccaggatggtctggatctcctgacctcgtgatccacctgcctcggcctcccaaagtgctgggattacaggcatgagccaccgcacccagcccttatttatttttttctaaaatcatatttgaaaaaaggggatgtgtttcttagtattataatgagcaaaaggccattctaggatgaattattagaggagtgtgcacgctccttaatagggaaaatcccctagctgggttatttctggctagggccagataactcccttcctgggccagacaagtccagccacaaggacaggtgtaggcaatgtagccactgtcctgcttttgctgtcaaaaggggattgtcagtgggctgtgtttcttaagattcctttcccaggggctcctttaactgctcatgcctggctacctacctactccaagctggtttgtggacagaaatactttatttatttattttttgtaaaggtgtctcactctgtcacccaggctggagtgcagtggcgtgatctcggctcactgcaacctccagctccctggttcaagcgattctcctgcctcaccctcccgagtagctgggattatagccacatgccaccacgcccagctagtttttgtatttttagtagagatggggtttcaccactttggccaggatggccttgatctcctgacctcatgatctgcctgcctcagcctcctaaagtgatgggattacaggcatgagccactgagcctggcgctagaaagacttttaaagtagtatctagttcatccacatttgtatgtttcttctattcaatctgaatgcaaatttacctgaaggttttcccctgagatcacagagaacaactttcttcaccttaattttattttcagctgggcatggtggtgcacacctgtaatcccaacacactgggaggctgacacaggcggatcacttgagttcagaagtttgggaccagcctgggcaacgtgacaaaaccctatgtctacaaaaaatacaaaaaaattagctgggcatagtgtcgtgaccctctagtcccagctattgaggaggctgagctgggaggatggcttgagcccaggaggtggagggtacagtgagctgtgatcatgccactgcactccagcctaggggacagagtgagaccctgtctcaaaaacaaacaaaaaacaaaaaaacccaatcaacataagtttattctcattaggttatttctctgatcacaagagaaaatgtctctgaattaccttcctttgtcagggctcagctggtaccaaaaaggatgtcaagaaaatttagattgaggtcgggcgcatgcctgtaatcccagcactttgggaggccaatgtgggtggatcacgaggtcaggagatcgagaccatcctggctaacacggtgaaaccctgtctctactaaatatacaaaaaattagccgggcgaggtggcaggcgcctgtagtcccagctactcgggaggctgaggcaggagaatggcgtgaacctgggaggcggagcttgcagtgagccgagatcgcgccactgcactccagcctgggcaatgcagcaagactctgtctcaaaaaaaaaaaaaagaaaatttaga

SEQ ID NO: 1560326 - DNA, 4001 bp, Homo sapiens
atctcaaactctcgacctcaagtgatccactggcctcggcctcccaaagtgctgagattacaggcgtaaaccaccgtgcctggcccaagaggatctttctaacacccagagggactctgtcctccctgctcaaactctctgtcagaagggtcagcaaagtcccaagctgctcagcctggagtggtgaatgccctgggcctggccagctgctgtctcaccccgtatctccaccaccctcctcccgagcagggatgagcaagggggcacagggagggctgaccacagctacctgtttgcccagcagcaccaggtccaccttctccttctctgccagcttggccaggacccgagccacctgcaggggacccaagcgttctgcttctgctgggggcacctccacgtggatacctcggtctgcacccatggccagggcggtacgaatcgtctcctgccaaggacagaggggcttgacttggctgctatcctcagggggacctaggagtctggctcgcagcccctccttcctcagacccaggagtccagggccccatcccctccttcctcagacccaggagtccaggcccccatcccctccttcctcagacccaggagtccgggcccccatcccctccttcctcagacccaggagtccgggcccccatcccctccttcctcagacccaggagtccgggcccccatcccctccttcctcagacccaggagtccgggcccccatcccctccttcctcagacccaggagtccgggcccccatcccctccttcctcagacccaggagtccgggcccccatcccctccttcttcagacccaggagtccaggcccccatcccctccttcctcagacccaggaatccaggctatcagcccatcctccctcagacccaggggtccagacttccagcctcctcctccctcagacccaggagtccaggtcccagcccctccttcctcagacccaggagtccagggccccatcccctccttcctcagacccaggaatccaggcccccatccccttcttcctcagacccaggagtccagggccccatcccctccttcctcagacccaagagtccaggcccccagcccctccttcctcagacccaggagtccaggcccccatccccttcttcctcagacccaggaatccaggctatcagcccatcctccctcagacccaggggtccagacttccagcctcctcctccctcagacccaggagtccaggtcccagcccctcctccgtcagacccaggagtccagccccctccccaagaccttcatcacctggcactgtgcaggcccacagctgacggcgatgacctccttcaccagcttcttctccttgagccgcacagcctcctccaccgcgatctcacagaaggggttcatggagtgcttcacaccatccgtgaccacaccggtcctgtcaggcttcactcggatctgcccagcaggaggggaaggggtggggtcaggaggaaacaggcaagaaggtgggggcctcagcgccaaccctctcccaggctggatgaggacaacgacagcctggaaaggggcagggccttgtccggggtcacacagctccagggacagaactgggttagagtttgtaggcaggggcaggtcaccctgtctccttctctcatccagccattcctgggtaccagggacatctgacttgatcatccctactgttgtcactgctcctctcaggcctgaaagagtgtttctcaaatttacagtatttatggtaacccacagtgagaggtacattttactgtatctccaagtgtatataaatacataatacactgatacataaatacaaatgaggagaagaaaaggaaaaaccagttaggtagacagttaagggtggtcctcagaggagcagcctgcctgaaaaatcacagctacaggcaacaatagagcagcctggggaaaactcaagctgcccagcacagaagccttttgttctttgcgtgactgacaggctcccaggaaaagttccctccccttttcaggcacgtacatggtggtctctgtgggaacttgcacggggaggggcggagcttacctaaaacaaacccacggttacagaaacaagagaagcggagctttgtgcttgcctaaagacgtacccacaactacatagataacggagagttatgcagatagctttacagataagatactcaaacagctacagagatgaaaggagtttcttataaaagcttttggtgtcttttgctgtgcagaagctctttagtttaaccatcagagtgaacaggcaacctacagaatgggagaaaatttttgcagcctactcatctgacaaatggctaatatccagaatctacaatgaactcaaacaaatgtacaagaaaaaaacaaacaaccccatcaaaaagtgggcgaaggatatgaatagacacttctcaaaagaagacatttatgcagccaaaaaacacatgaaaaatgctcatcatcactggccatcagagaaatgcaaatcaaaatcacaatgagataccgtctcacaccagttagaacggcgatcattaaaaagtcaggaaagaacaggtgctggagaggatgtggagaaaaaggaacacttttacactgttggtgggactgtaaactagttcaaccattgtggaagtcggtgtggtgattcctcagggatctagaactagaaataccatttgacccagccatcctattactgggtatatacccaaaggattataaatcatgctgctataaagacacatgcacacatatgtttattgcggcactattcacaatagtaaagacttggaaccaacccaaatgtccaacaatgatagactggattaagaaaatgtggcacatatacaccatggaatactatgcagccataaacaatgatgagttcatgtcctttgtagggacatggatgaagctggaaaccatcattctcagcaaactatcgcaaggacagaaaaccaaacaacgcatgttctcactcataggtgggaattgaacaatgagaacacatggacacaggaaggggaacatcacacaccggggactgtcgtggggtggggggaggggggagggatagcattaggagatatacctaatgctaaaggacgagttactgggtgcagcacaccaacatggcacatataaacacatgtaacaaacctgtacgttgtgcacatgtatcctaaaacttaaagtataataataaaaaataaataaataaataattttttaaaaaaaaagcttttggaatcaactgtaaaaatggcaacccgcttgggcttccctctcctctgtggagagctttcttcttttgcttattaaactttcgctccaacctcaccttttgggtggtctatgctctttaattctcttggttgtgaaacgagctcggataacaccttagacaacgtgaccagtgaccctgacctatttcacaaatgccactgcagtgtaagggtcagtgaccaatactgaccctgcctacacacacaccatactctgacattttctaccctttttcggaaaaatgccagccctctgcctggatgtcatgatcacacatggtcacaacctaatttggaaaacaccagcatgaaagacctctttgctaaacagacaagggaggtaagggaggtgggtggcaaaccccacccatttgcttctgcacatcatttttgtctctcctgggccccactgtgtgcctggctctgagctggatcctggggacaccatcatgtgccagggagagaggcttccggtgtagaccagggtgtagcgtgaaccactaaccactctcctattagtttctctcggctgccgtaacaaatcaccatatatttggtggcttagaatcttacagctctggaggccagaagtccaaagtcagtgtcaccagggtgagaccaaggggtctgcaggccccgggaggaacacgtttcttgcctcctccag

SEQ ID NO: 1560327 - DNA, 4001 bp, Homo sapiens
caacgcggccttcacgcttcccctctgttctctccctgagcacaccagagacatccatgtgccaggctctgtgctgagtgatgctgggaccagagctgagtcaaacgtgggcctgcaccatgggggagacggatccaatcccagacatgccaggcgtggaaggccagggctgggatggagagaagaggcccagggagctgtaggactccaaagatgtgacagtaacgaacagtcagagcagggaggaaaccaagtgttgggtcccaggaccccaagaggaatgtgtctcaaaagggctacaggtgacatccctgtcatgtgctgccagaggcatcattaggacagggggcattgagggagatgggagagcagagtctagagccagacttgcccggggtttcgatcgtaactctgccacttactggctgggagatctgacaggcctcagtttcctcatctatccaatggaattaataatacaaagggtcggccaggcacggtggctcacacctgtaatcccagcactttggggggccgaggcaggcgggtggatcacctgaggtctggagtttgagaccagcctgaccaacatggtgaaaccccatctctactaaaaatacaaaaaattagccaggtgtggtggcacatgcctgtaatcccagctacctgggaggctgaggtaggagaattgcttgaactcgggaggctgaggttgcagtgagccaagactgcgccattgcactccagcctgggcaaaaagagcaaaactccgtctcaaaaaataaaaataaataataaataatacaaagggtactgaaaggactgaatgggttaatctctgcaaaggacttggaacgatgcctgccacgtaagtacccgctaaatgctggctgctatcatcactgacactttcatgctcaagtctggctcctgtaccctcttccccagcccactccctaagcaggcaggggcagtatcagtgtcaactttgtgaccctggttttgcccaccctgaggcctccagggtgccaggccctgcgctaggtaatgctggggacacggaggtaagtccccaggctgatgggaaggacagacatggacagacagtcaccatcttcagtccagttcaggccaagcattgagagaaacgggcctgagagaccgtgtctgattcacctctgtccacaccagcttccctctggggacaacaagccaggcgctgagagcaccctcccccacctctttcatggagaatgtgagctacccccagctcagtcaggttggctccttgaactttcatctctagcaaacacacttctctctccctagctagagcctcctggctcaccctgtggctatggagggtggaaagcagcttctggggccccacaggaccctgtctgactccctctatagcacatttcgggtaatataagagtacaatggtaagtaatgcagcctagtgggtgaaagcagtcagaggaacctggatagaactctcggctctgcccttctctagctgggtgacctctctgtgcctcagtttctccgtgcattaaacagggaccgtgacttcttccagtgggtaagaaatagagaaagcaactcactctgaacagttatcaagagagtgaatccagaacgagggaaaagagaacatggccgtgaccccggagggatcggatgttagaacttcactcttggatttttgccctcaggtgactttgacgtttgggggttaaagcggcagaggtcgggggttacgagaagacccccacccagtgtgcgctcgtggccccggaagcacacggctgcgggactcagggatgtgggagaggggggcccgatcaccttcacggcgtagtcgatgaccctcttgacagctacgagcacgcgcagctccgccatcttcccgccgcagccacttacagggtcagcccgcaccctcagcggctcagtccagaagccccaccacccccgccccccgcgcccctctctgcgcctgcgcgcagcacggtcagccagtcaaccgctgcagagcccgcctccccgacagaggaccaatcgagaggccggaaggaagggaggtgtggcaagcaatgcaaaccaatgggaagcggatctcggggagcgagcgggacctggagagagaaggaaaggcctggcggagagggcagggcagagaactaggggaaaggtcgtgcactggagggaagcgcgcccggagtttatagatcctcccggtcctataaacacttcccggtatccccggatctgctctccctctccagatcccccacttcttcccggcctctccaagtcgcggtactcgtattcccacgcctctgaatcctcgcgcgtcggtctctccactctctccatccccgtgttccctgtcccttccatatccgtatcctcccctgtccgtgtctctacttcacctccatgtcgtccccacagcctctccacaccctctccaaaggcccacgtcccctcctggccccgcccctcccacatgtccctgttcccatcccaatccatggagacttgtgtctccatgtctgtgtctccctgtctccacgttccctatgagttcatgtccttatgtcttccctgagcctctatgcaaccccgtgcctgcgtccccacgacccgcagaaaagcacgcggagccgcagcgctaaaaaaagccgttcctttattctgccccaggcaggctgcagtcacagacacacggggaatccactgatggcgtcggtgctctgcatgatcatgtctgccagcagaaagcagaagcctggggggacgggggtgcggagcagggagaggaaggtgggccctggggcggatggccgggagggccccggggactggggtttggggctccaagggggtctctgccgggtctgcgggagtcgttagtgtgttggggagtccccgagaggtccccggggtttcctgggagggcagctggggagcctctggggtgagggtcttctgggcagtctcctccaccctcttcccgctgtccagtttacccgcgagaattgagaagggtaaggccagccacccagaaaaataggaccaagagaagaagacgttgttcttccacgcattcttcacggtgtagcctatcaaggcggtcagcagcagcagtcctgggccccgcccagccgcaagatgagctagctgggcctggtgggggctgcacccaggccacgccccttcagacccgcccccttctatcagaccacgcctatcgcctctcagcccgcccctggcccaggccccttcctgctcctcccgctctgaactctgtctcgagccccgcccacctctctcggcttcttccagccctgcccctcggatcctggccgagtacctcaagcccctcccctggcgaccaggcccctccatcacccagggcccgcccctgcctgcccgcctggggcggtctgcagtctcaccgccgaggaagaggaaggcgctcgtggtctggccccgcagcgactcgccctcgtcgcaccgaatccgcagtcccatcaccatgcccaccacgccgacacccaccgccagcaccatgcacgccacagtcaccgccagcgtggctggggagagcgggcgcatcagcccccgcgggcgccgccccagtcactacgggttcggccgcaaccggaagctctcccgtctcctgcccccaacccggtgtgtggccaggagccgagctccaccgaccgggagtcaggcgtttggattgagacttggaggtcacatcaggacctgcggttactgccgctaccaggacggggagggggtcggggacaagcccacaagtcgaggggcggggttcgtggcggcctcggccgacaagggacagctgcaactgagcccggggtggaaggggtgggcgtctcgccatgggcccagctgtgtgtcccgagccctgggggtctgaaatgccctctgacatctgggcgggcggagcctcactctggcagggg

SEQ ID NO: 1560328 - DNA, 4001 bp, Homo sapiens
acatacatgtacaatgcatttttgcctgcttccagagaaaggcttgaaataaagcttctgtaaccattgtagctgaactctcttcccacacacagccctcatttcctctaaacactctgactcaaatgaactgtccctatttggcaaaactctctaacctggaggctgtcttctgtcacctgacattctgtccccaaagtcagccaaactttattatacatctttagcaattgatcagaagaatgccctgccagctgtttccctctctctgagggcaactcccctggccctccctccttcggcctggttgcaattctggccggaaacccgctggtgcctgtggcaaataaagtgaggaaggcaggaacctttagacttcccagtgtgaggcaacggcagggctaggactagggtgaggctgttggtgcaagatttaaggaggcgctcactcacaggtgcggaccctgcacttacaggaccctgagagcgagtgcctccttaaatgttgcactccagggtcctcaccgtccttttcctagtcctgggctccgggttctaagcacccagatgctccttcctcaaacggaggtttccgcaagacaggactgggtctctttccttctcagccctgccctcagaattccagcccctaatcaacttttatggagatgcatgccaggccaaagggctgcccctaagctttaggaaggaaactccttaaatgctgttgacttaggagttccgccagtgccccacctgcccagagcctcttgccccagtgccccacctgggtttatggtgcccccctcccagaaatatgagctcaggggtcagaaacccaggtcctgaggtccctcctccccaaggactcaggatcccaggcccccagtcccctcttcccttaagtttaagaagtccaggccaccaccctcttggggacccagcacccaactcacgaagcgcccgaagcggatggagtctccatcctcaatgtgtaagtcagcctgggccccactaaggcgggagatgacagactggcagccagggaggagggaacggagcagccccgagcctgtaatgtggtccgcgtggcagtgggtattcactgggagagagaggagggacaggtccggagggtacagaaaggacctgggagtcccagcccagatccttctccctcagactcaggagttctgggccccagcttcccattccactgacgctgcagcccagccccgctgggatccatgagtttggtccccggactgaccagcatagagcagccgcagccccagctccttgatcagctgggcatcccgaggcgctgtttccaggactgggtcgatcagaacggcctcccgggactctctgtcacccagcaggtacgtgaaggtgcagctcacaggctcgaacatctgggaacgggggacccaggtgagggcgcagaaccggacttccacccactggaggccaagtagtccagactgaccctatcctcttcctaagatccagaagcagaaaccccagcccactctttccccgggagtcgggagtccggagccccactaccttcccctatcagaacaaaagagttccaacttcctaacatcccaaaatcagggtccccagcacgttctttcatagaggacccaggggtctggccccaagcccagaggcccccagaccactcacctttaaaggacccaagagtccagccctaaacctccaccccgctttccgcaagatgcaggcgtgggtccccccggatctctccctattaagagaccccggagttccgtccttgctgccgcctagtgcccagcagtcccctcctaggtccagccacccgcacctgccgcaggaggatgggggctccagacccgccgcgctggctcagctgccgccgggcgaccctcagtacagcctccgccatcgcgcccactgcggggtcaggaatgagcggaggccgagcgcctgcaggagccgggcgctacggcactgaccccgggaagggcggggcgggggcggagcacgccttaaaggggccacggacgcctggggcagagggcgggggaccgccgagcgggactggggcgagggcgagaccgaggaaagccagagtgcaatgcctggacgctttgagacccagaaaaaacagagaacagggagacactcaaagtgcgagggacagacgctcagagacacacagacatactcatgtaggaacagagatagggagagaagtagaaacccagggagaggccccagtacactcatagcctcggggccgttttttttcctttttcttttgttttattttgagacagagtctcgctctgtcacgcaggcttgagtgcagtgactcgatctcagcttactacagccttaaactcccgggttcaagcgatcctccaacctcagcctcccgagtagctgggactatggcacgttgccaccacacccgacattttatatatatatatttatatctatatatatatttatatacatatatatatatacacacacacacacacatacatgtatataaaatttgttttttgcagagacggagttctcactatgttgcccaggctgatctcgaactcctgagctcaagcgttcctcccaccttgtcctcccaaagtgctgggattacagacgtgagccaccgcgtcccgtggggccgttttctagcaggtggtaggatagtcatggttagaaaaagatgttcggttccgggaggcagaggttgcagtgagtagagatgacgccactgcactccagcctgggcgacagagggagactctgtctcaaaaaaaaaagatattcgttcggttccaggtcattaatatcttgagggacttttgagtgggtgcctggttaccagaacaacacttgatcccattaaagttcatccagaaattgcataagcattttatcaggaatgtttctctctttccaggaagaaatcttaaaaaaaaaaaaaaagataattttgcattatctcttgaataatcagattggggattattcatcttctgttggggtgtgaacctctgaaaagagcttgtgttcatttacaccaaggacctggggctgaaaaactgtagtctcaagtcatgagctgtcagaaagtctgctctttgtaatcgtagcagtagtgagaataggacatcccactctcatctggaggatctatgtcactttgtgacatcagagcagccttgatttccagcctaggggcagagcttttttttttttttttaattgttagaattttttttgtagaaacaggggtcttgctatgttgcctaggctggtctccagctcctggcctcaaatggtcctcccacctgggcctcccaaaatgctgggattacaggtatgaaccactgagttatcctgtcccacagcttctgaggaggggtttcctgcaacaacatttatcttaattctggagtttccagggaatggtccctggagctattttcagagcagcccctgtgtgaatgcctttacacagagaaggcctgcttttccttaagcctatcaaattgcttcattaaaattttatgtggccggctgggcgcggtggctcatgcctgtaatcccagcactttgggaggctgaggcgggcggatcacgaggtcaggagttcaagaccagcctgaccaacatggtgaaacaccatctctactaaaaatataaaaattagctgggtgtggtggtgcacacctgttatcccagctactcaggaggctgaggcaggagaattgcctgaactcgggaggtggaggttgcagtgagctgagatcgtgccactgcattccagcctgggtgatggagactccatctcaaaaaaaaaaaaaaaaaaaaaaaaaaagcatatggctgagctcatgcacaggcactttgagcactttgggaggcctaggtgggcagatcacttgaggtcaagagtttgagacagcctggccaacatggtaaaaccccatctc

SEQ ID NO: 1560329 - DNA, 4001 bp, Homo sapiens
ggggcatcgagccaaactggcacggtccgactgcgggctcggttcggagcaaacggtgagagctgagctctggtaccgcttcaaagaggtggtgccacccgcatgcagccccgggttccaggaggtggtacagtccgggcccgcgggcccgccccacgaaatggtacagtccgtgcgcggctccccgcccaggccactgccccagtaggtatcgccgtcgggccccacagaacagtcccagctggtgttgctcccggcggcctgggcgcgcgaccacgaggtggcctctcccgccacggggacgcagttctggcccgcggcgccttcggagccggcggcggggatggggcccgggccgagaggggcggggcccagggtctgcgaggcgccgctccaagagtcccaggctgtgcacgccatgtctgtccagtccccggaccacggaagagcctgagagtcgggctctgtgaggagtaacggatcccgagtgaggggagcccaggtgccccctcaaaaactctagggtctaagctctcaaccctggcacttggggcccggctgacccggatccaggtcatgccaccttgagggcgcaggtgttctcagtcctcaaagatcagggagtctacacctctagccccggtgcctcgggaccccagtccccacctcccaccgcctctccccacactcacccgccccccatggaacttctgggtgcagtaacgcggagccccagtccagctgtgggaagcttgccagggatgagcttgtacctgagtttagggaggactgtgagcaatgaaagagacccctcaactacccactctctagtctctacttgtcagggactgggagttatggccccccagcccgtatttcagcaccccgcgcccccttttccttcaccctcaggggtcaagcacgcggcccctccccacccagtcccaggaacctaggcacgcccccctcctccctttgccctaggatcccagcctccccgcttcttctccagcacttaggggtcccagcccgcagccacctttccagcatgtctctgctgtcgctgtcggcgtgtccccttggagtgccagatcagggaaacagaagcctaatttggctccttctgcaggcgataaggggttagggtcagcagaggccccacctggacaccctccccacacacgttgtggcagcctcggcagcctaccaagccctgccagcttgttccctggaggcacttcctgtggggatgcctcatcccagttccacaggtccatggatgcgatgaaggccttctgaatgttctgggtcgggaaaagtccagatggcaatgggtgagctggtgacacttggaggccctggagtctgggccccagccctagcttccctcagagccaggagtccaggcctccgctccctccttccccaggagcctaaaatcttggtcctgggagtgagggaccccagctctcttcctctgttagacccaggagtccaggcccccggcttcttgggagtctagtcccccaggtccttcctaacccagacacccaggcatctagtcctcagttcatcgctcacctctggcgggttcctctgcccccagccgggggtctcagccccatttcataccatgcaccccctcccccaagggcctgggcaagggggaattttccgagacgtcagagcaggggtcgcagccaggctcaagttgcagaggcaggggcggggccgagcctcgaccccagcctcggggataggtgctggcctctggggctgccctgctgcaggggtggcgtgggcttggagcgaggcttggggaacagcgggctgggtgagggcagggcggaggctgggagaagtttacggggtgatgggggcggggcggggggcttggtgaacgggctgtctgcctcagggtctcgatcctgcgacatggggggagtgaggggagagggtctggggtcagctgggctaagctgggcttatctgcaacaggaagagggatttccggccagattcccccacccgcccccagcgtcagctgacgtcacaatcggcagagtaactgcgggggcgtggagcaggagtgaaggcccacccaatcctccaccaggcccagtagggagggcgtcctggggctgcttcccaggagtgccaatcatagcaatattgacatcaacaatttcaacaataacaatagtagcaataacggccaacattaaatgagggctcattgtgtgaaaccaactgtgccataccccttcattgaatccttctatgaggcaagtacaatacatactctcatttgatgaagggggaaggtaaggcaggcatcctcccactgctctccttctccagaccccatgcccttccgcgctgtaatagtttaggacaattggggaaactggagtatgaactgaatatgaaatatcatagaattcttttcttagatttgataatggtattcaggaggaaagatatcatttagaaaatgaactcagagatgaaatgttataatgtctgtaacttgtggttgggcgcggtgattcacgcctgtaatcccagcactttgggaggctgaggcgggtggatcatctgaggtcaggagttctagatcagcctgtccaacatggtgaaaccctgtctctactaaaaatacaaaaaattagccaggcgtggtggcgggtgcttgtaatcccagctactcgggaggctgaggcaggagaattgcttgaaccagggagatggaggttgcagtgagccaagatcatgccattgcactccagcctggggaacaagagcgaaacttcatctcaaaaaaagaaacaacaaaaaaaaagtctgtaacttgctcaaataattcagcaaaaaacaacaaaaaaccacagctatacatgtaacatatacatacatacatgaaatatttaggacatacctaaactataaaattgttcacgtaaaattcaataactgggtgtcctatatatatataaaatatttttcgagatggagtctcactctgtcgcccaggctggagtgcagtggtgcgatctcagctcactgcaacctctgcctcccgggttcaagcaattctggtgcctcagccttccaagtagctgggattacaggcaagcaccaccatgcccggctaattttttgcatttttagtagagatggggttttgccatgttggccaggctggtctcgaactcctgacctcaagtgatccacttgcctcggtctcccaaagtgctgggattacaggcgtgagccaccatgcctaggctaatttttgcatttttagtagagatggggttttgccatgttggccaggctggtctcaaactcctggcctcaagctatccacctgccttagccttagtgctgtaattagaagcatgagccaccaccgtgcccagccatcctgctgtattttaataagtatgtaatatttaccattaaaaataacttttgcatatcggcatcttccagtccccagcccagcctcttgatcattaactacttgccgttctggagagcgggtggcattgctcctccttccattttacagtaaagtaaaccgggggtcccatggagtgggagtgggactgggattggaatcagtgtggggtaagccacagagccctggagcatcactggtccctctatccgtccagcgcggaggcctgaagggagtcctggcttcccatccttgaagctggcctcttgtctgtctctccatgtctctctgccctctttcttcaggttggcatatctaaagctgggtctctgttgccacgggcctgactccagtgaggctttgtcacctggtctcttctgacatctctgtccctccccatctgtctttgagtgttcctatctcatctccttgtccgtctccatctgtctcttggttttctccccgtcccccttcccactgcacagtctctgatggttctcatctctgcctctgagcctcctgctcacagcgccatctc

SEQ ID NO: 1560330 - DNA, 4001 bp, Homo sapiens
ctcagcctcccaagtagctgggattacaggtgcacgccaccacgcccagctaatttttgtatttttagtagagtcggagtttcgccatgttggccaggctggtcttgaactcctgaccttaggtgatctgcctgcctcgaccttccaacgaactgggattacaggcgtgagccactgcgcccggcctacctggctaatttttaaactttttatagagtcggagtctcattacgttgcccaggctggcctcgaactcctggcctcaagcgatcctcccaccttggccgcccaaagtgctgagattccaggcgtgagccaccacacccccatccttcatgggcactacagggcagcaagcacatgggcactcgagggtgcagggcctgtccagcaccaccctgactcactctctcctgtccctgtgctctggcaggacaccctgaaagtgcctgcacatctccactgctgccgctgtgcccaggctggggccccgcagaccctggcgctgcctggtggctgagtgaccgcaccacctgcccacgccgtcggcccagccctgcctgcctggccgccccccaccttgagcagcttctccttcctgcgccgccactcctcccactcgttggcgatccggccccacaggatccacgtgtcctcctccaggtggctcaggttggaggaggccgaggagctggacactagcgaggagccactgttccgccgcgagccattcatggagcgcatggacttggagtcggcctccaggagcctgggcaggaagggccgacagaggggaaccagtgactccctggggacagggatccttggcgagcccagcccatcctccccctcctgggggtcttagaggacaccagggattaggtccctcttgttcttttttttttcttcttctttgagatggagtcttgctctgtcgcccaggctggagtgcagtggtgtgatctcagctcactgcaacctctgcctcctggttcaagcaattctcctgcttcagcctcctgagtagctgggattacaggtgcatgccaccacacctggctaactttatatttgtagtaaatatggggtttcaccatgttggtcgggctggtctcgaactcctgacctcaggtgatccacctgcctcagcctcctaaactgctgggattacaggcttgagccactgccctcagcgcccccttttttttgagacggagttttgctcttgttgcccagactggagtgcagtggcgtgatcttggctcactgcagcgtccgcctcccgggttcaagtgattctcctgcctcaggctcccaagtagctgagattacaggcacccaccaccatgcccagctaatttttgtgtttttagtagagacaggatttcaccatgttggccaggctggtctcaaacacctgacctcaagtgatccgtctgcctcggcctcccaaagtgttcggtggtgtgagccaccacgtccagcctaaaacctgcattttaaatgggggtagggtcagaggaagaaagcaggaaggcccgaatcgactcttcctccagtcctggctccattaaccgcggcggattcacagattcacttgacctctcaaaccttcagtctcatctgaacagggtggggacacatatattcagccagggttgggaggatgaaaggaggtgtctgtccctcatccagcatctggaggtggctgtcacattgcacacactgggcctggctctgaatgtgagggcacctgggaactcctgtgggggcccagactgcaccccaagatttcaccccatcccccagcccccaactcaccggttctgctcttcgagcttggccagcagctccagctcatcggggctgaggttctcggagtcagaggttggggagcaggtgggggccgacagggcctcctgggatgaggagtcggggctcagagtggggctcgccatggtgggtgggcttgttagccgtgagcggggttggttcacagctctgtctgggggccagagacatgcgtggtcggcattgggtgggagcccactccatcctgcctgcccaccctcgggacatttcctcaccctgggcttcctgcctctggtccacccccgtccgtgcacccctcatccccatgcgccccagcccagctgacagccatgctgccccttctgttcgagaccctggcgattgggatccctgcctgtgtcatcaggccggatgtctggatggagatgggaggactgttgccaggatgtgagccgtcctgctgtccctgggcatgaaggccaaggctcaactcgacacccctgaggctggagcagggcccggagcagaggctccctgtcactcggggctccatggaccctgctgggacctcggggtgcaggagccccctgcttttctggcccttcctaatagctttgtccccgtccccgccacggcctgccctgggagccccatatcagtgtctgacttccccatctcatcaaccaaagtgggctgctggcacggccaagagcaattactttcgactgttaattgtctggcgctgccaatggccagaagagtcgactccccttgggttgagaagccagggacgtggcagagtgctgggaatctgtgccctggcagacacagagccagagctgtgggctccgatccgtatccagatcttggcctgccacgtgccaggtgagtcccaggcacatctctcctatctttttgccgtgtcatctggcccgacccttctgggggcttcaaggacactggcctctcgccttctgccaccctggtggaggcagatcaatgccatgtcaaaaacaaaggtactgggctcaaatggatctgcgtctgaagcatggctcccctcaaccagctgtgtgaccttgggccagtcacttggtgtctctgagcctccgtacactgagatcatacaggacctagcctcaagggtggctgtggaaactgagcacatgactgcacataacctggtcagaacagagcctgacactcagtgatggccccacggacatcggctatcactgtccatcctggagccagggctcctgggttctgctgtggcctgtgtggggactgatggccaggggacccctagcagggggccctagaggaaagggacggctatgggagtggaggcagcggctggggatggtgttccttcatgcttcttcctggtgagcccaggctcacctccagcgtctgagaagatggggatacctagggtcctgatggcaggaaggaaaccctgcctcctgcctccttatttgcacggctcctcatgcccgcccactgcccggcacgctctgtagcaggagtctgccgtgtgccacttgaccccacctgacctggctgacagctccacctacagagagggcctcgctgggtccttggagtggggatatctggatccccaggcagcagggggacattggcgggaccatagcagaccactctatacctgcctgactaccgttgggtcactgggcaccttcccacagcccaaactcagcccccaaccaacccctgagggcctacaggttggatggacttgaccctggccaccccagtcctcctggaatagggttgggggaggtgcgccattcttttttcactgtatggggacccagaaccctctttctccaggcctctgtggctccccaaggctactggttctaccttgggccctcaagcgttcccctagtctgccgggtgctgagggttttggattttggggagtggaaggaactctcattgccaagtgggccagggccacctgccctaaagaccaagctgctgggcaccacctaatcaggagttaatcattcccgaggcagggacagtgggggccactttggggcctcccacagagtcaaagtctgcccggacagagacgggggctgtggacaagaagtgctgatcagaaggacctctctgggcagggaggggctgggagggtagcttcagagctgggagaa

SEQ ID NO: 1560331 - DNA, 4001 bp, Homo sapiens
cagtgtcgcgccagcatctcctctcctgtcttgtctcatccctgtgccagggccaagccacctgcgatcccttccaaaccaccctccgctgaccacagaagcccagaggaacctacaggttggaccctgaggccagagctgggagtggggagggcggcgggatggatgggaagagccacaaaagacggaaagacacagggacacgggtcctctagctcaatcacatcccggccgagggggaataaaacgaagcagacaactcattcatgttccactcgagcctcttcagcacatttttcccttctgaaaatattccttaacaaagagctgcctgcttctggcaggccccgacccaggtctcaaatgccaagatagaaggaagctgttttgttttggccaaacacactagttgtgggtgaaagaactctcgggctgtcaggggccagctctgaggagcaacctggaccgccctgctggctctggcatttgaggccagtaggcgtgatggggtcaggaggctgggggcagacttcaggacggaagccaggagctgtgaatcctctcccttcccgccagggggtggcataaatcagggggcgggcagtggttccttcgggacactagtgtaggagagaaagtgagcgtccttccctttgaaagggcacagcagggaaggatggataacttggcagaggcctggggcaggttcccacaggggtaggtgctgggggattctggggccctgtcaccctccaaggctccagtgtgggcgctggtttggtggaggggcaagttggcttcctggggtgcggcaggcacctcatggtctctggaatctctgcttgagctgggggagctgtcggggactctgggagggcctggacaggtgggatctgaggaggggtgcagaagtgttgagtgggtgggggcaggggcagatatgcctggggtctatgttggagctcttaagtttttctgtgtgtgctgggggatctaagtgactgtgtgtgtgtgtgtgtgtgtgtgtgtgtgtgtgtgtgtgtgtgtgtttggggttttcagaaagatgggtggctctggatggggagtggggtggttcagaatatccaacgggaggtcttgagcatgggtggatttttcaggatccaggagccaggatccagatggggcaggatcagtggagctaccacagtgtgctgggtggacgccggggagtggtgtttaggggtgcccttgggcatgtggcagctggggtgggagatgggctagcaggctgagctgagggctgtgggcaggggtaggaaatccgacttacagaggccagagaggggtcctgtggggtcagcatggggggcgggtaggccctgaggctggtctccttggggagaggtgggggcagttctgggcccaagataggaggacgtgaagtgagggggtgcggggagggggtggcaagtgttgtccagaagggaggggtcctgagagatcagggcagaaggtggacgggggttcttgggcttggggggcgcttctgaggggctgatcggcggagtggggggatggggagccctgagggggttcccggagaggagtcctgagggtcactgcaaagggtggacgggggtcctgggcctgcggggtcctcatggggaggggacggagtgggggagggggatcctgcaggagctcctggggaggggtccggagggatcggcaacgagggtgggcaggggccagggtcctccgaaggtcccgggctggggatgccgaggctcccagcgcgggttccggggcacgacggcccgagttgcggtcctgccggttccccgcgggccgcatcacggagccgccggcctgagcaggcgcccgggaggcccggcccgcgccgccctacctgcgccgagcgcgccgccatctccgtgccgagcctcgccgccccgggctgagccgccggatcctagccgcgccgttcgccccgcagccccggcccggccccctcagccgccccccgggaccgcggccgccgccggctccgccgctgccatttcacccgctgacaggagccgctgccccgcccccgaggccccatccgccaattcgccgcccccaggcgccctggccccgcccaccagccaggagtgacggggtgtctgaccattccgtggccattccgtgaggcgggccctggctacgttcagaaggttgccgcctctgaggagagagcgaattgaaatgagggaagcggtgaaggacaggtagttttgcgtatcggaatgaggaatcctattgatcaacacctgataagaccaatagcaaggaaagtgggggtgtgtccgtgaggaaaggctgcggccctgaggaacaccaggcagacgcggccaagcgtttggcactaagccccgcccagagccgggctttctgcccaataacgagacgccccgagacgtccattattatctgcccctcaaacctgggccctggcaactgctgggggcgccataaagaagattgacacctagggaaccaatgctactgaaggagggcgggaaagtgacactctctgaccaatgggtatgtgagattggtgggagcattggcgtcctgggcggtggggcttgaggcctgggttgaatgaaatgggggtggggctaagaggagggcgtggcctaggccagagatggggcggggtcaagcaagggaggggctcgggggttgggtctgagaaggggcgtggccagaaatcctgaagactcactggggacgtgatggcaccgtgtcgtctaggagcccagttctgtgctggggacggggcggttgatattgggggcgggtcccataaaagattcaggcccgtcccctgtcttactccaggccaggttaaatgtgttctctaaagctcacagagccgcgtgtttctccatcaaagctcggttcgcgccgtgatcgtggggagggataggccctcccattccccatcctcccaggctgatagatcctcggggagtcgggatgcagggcctaggtcgggtctcttccaggtccccagcatggaaactgcttataaacatttgatgaatgaatgaatgaaaatgggcccgtgactcttttaacagagaagggagaggtggagaatccttcaagctagagaggaattcgtagggacagttactgacagcgggcaagactgaccaaaatggacttatttcctccccaagatgtagggatgggccctggagggggtggggcagggaaggaccttgtcatagcagagagggtgacgtcataagtgtgtttttatttatttatttttcagagacagggtctcgctctgtgtcccagtttgcagtgcagtgatgcgaacatagctcaatgcagcctcgaactcttggactccaatgatcctcccgcctcaacctccccagtagctgggactacaggtgcgtgcacaccatgcccggctaatttttttggtagaggctggggtcttggtatgttgctcaggctagtcggaaactcctggtgccaggttctcccacttcagcctcccaaagtgctgggattacaggcatgagccacctcgcccagctagatgtcctaagttcagaatggggaagggaaggctggacccagggaggggcacgtcaggacttcctaaggtctgagagctcaaccttctctgtagtaggagactctgtgtggccttgcaagcagtgactgacatccacgtatggtcccggcctctgtccagctctctctgcctctccctccctcttcctgtctattttgcatctgccaacgttctggaactgttaataaacctccccagggtccgggcgcggtggctcacgcctgtaatcccagcactttgggaggccgaggcgggcagatcacgaggtcaagagatccagaccatcctggccaacatggtgaaaccccgtctctactaaaaatacaaaaattagctgggcatggaggcgggtgcctgtagtcccagctacttg

SEQ ID NO: 1560332 - DNA, 4001 bp, Homo sapiens
gccttggaggcttccccagtccagccctctctccccaccttctacgagcttacatgcctggagctatgtgatatcatcaatatccacccccaaacaccccagacttgggctcatggcatcctctcaattataaacaccattgccctacaaattggaccaaacccagttcccaccactttaggaagctttccggactccctatcctgcctccatcccttatagataacatgagagcattattgacatacattcccaaatgagatctatgtggtcaatgtgggtatctgttgccttcccagtcttccggtgacagcatcctgattttgttggaagaaccacccacccccttcactgtccaacgtgtggcttggatgtggctaactcccttttctctggggtagacaggtgacctggaggtggctaatcaccatagtccatcccccggccacaagaatgggtatgttttaggacacaaagtctcaacagtaataagattctaggactgagagggaccatggtactgaggttctgggtgctacccttatagaattcaaggggcaaacagcactcaagtcctaaaactggcccgggcatggtggctcacacctgtaatcgaagcactttgggaggccaaggtgggtggatcacttgaggtcaggagttcgacaccagcctggccaacatggtaaaaccccgcctctactaaaaatacaaaaaaattaggccgggcacagtggctcatgcgtgtaatcccaacactttgggagttcgaggcaagtggatcacctgaggttaggagttcaagaccagcctggccaacatggtgaaaccccgtctctactaaaaatacagaaattagctgtgcatgatggtgggcgcctgtaatcccagctactcgggaggctgaggcaggagaatcacttgaacccgggaggcggaggttgcagttggcagagattgcagcactgcactccagcttgggcgacagagcaagactccgtctcaaaataaataaataaataaataaataacgtcctaaaactagaaggatcaacagtgttgaggttctaagaccaaaagagggaatgaggctaaggtttaggattcaaagcttcattggtactaagcttctatggttgcaccatacattctaagttctaagattggaaacgtcaacagtactaatgccctaggctctaaagagaaagcagtgtaggattctagaattctaagtgtcattgtattaaggtgaagggtcagtggggctatggttctaggaaggaatggtcaacagtgctaaaactctaagactggaagggtgaacagctaagattctagtagcgtaagtgtcatgaagcccaggttcttggactggtgggcccaccgtgctgagctactaggattgaaactgtcgatagtgctaaaattgtagaactggaagagtcaatggtgccaataggttctaggtctgaaagggtgggaatgctaggattctaagactggaagcatcagtgttacttagatgctaggagtgtaactgtcgatgatgctaaggttgtatgtaggtctagaagaatgaatggtgttgagattttaggaacggaaaagtagcaacgcaaaggttctaggactagaggaatcaatggtgctaagattcggggactggaagggtggacagcgaggcgatctagagtgtaagtgttgacagagcgctgaggtttttggaccacagtggtgccggagctcttattctaggactgcaagcgtccatggtactaaggtgctggaaccggaagcctcggtagcagtgagagtctaggattgtaactgtcagcggtgctgacgactggatgggttaatggtgttaaagtgctaggactgtagggtcagctgtcccaaggtccttaaggtctgaagaagccagtgctagggggtagggctgagggtttcacgtgaccttgggcaactgagtccagcttacctggggtagacctgattgtgccagtgcagcagcgcgtagcggtcggccagcggcagcctgcgacgggcggaggcccccagccactcggccagggccccgtggtagccgcgcaggtagacgccgaaggcgcccaggccggcggggtaggcgggcgccaggcggccccgcaccacggccatatcctccagcagccgcgcccgcagcgcctccagctgcccggccaggcccccgggcgccccgggagccgctgcctctaggcgctcccgggccgcgcgcgccacggcttcggcccagcgtgcgcgtagtttgcgggccgccccgggaccccgacgcccgtcggccgcctcctcctgtaccagcacctggcccagctgcgccaccgcgccagccccggcgcacgctcccggcccggggcccgccagcgtctcgcgcaccagcgcccacagctcgcgctgcagggcctcgtacagcagcgccacgtcccgcgcccggcggcccccgccagcgccctcggccttgggaggcccaggcgcgccgcccctcgacggcgccagctcctcggcctctagctccaggatgtgctcgtccgcacgcgctagttcgcgctgctggatcaggctcaggatctccagcactgcgggagcaaagcgggaggtcagcagtgcgcgggggggaggagggcgatgccggacgcggggttgggggtgcttaggaaggggagagagatgaggggaaaagggttacaggaggcgggaaagtgtgggggcagagaagagcccggagaagagcaagaaagaaggatgttgagtgaaggatgtaggggaggggtcagggtgaggggctcatgcttgtaatcctagcactttgggaggccgaggccggcggatcacttgaggtcaggagttcaagaccagcctggccaacatggcaaaacctcgtctctactaaaaatacaaaaattagccaggcgtagtggcgtacacctataatcccagctactcgagaggcaggagaatcgcttgaacccggaaggcagaggttgcagtgagccgagatcgcgccactgcaccccagcctgggcaacatgttgagcgagactctatctcaaaaataaataaataaaaaagagagagggggaaaagaaaaatgcctgtgactgaggaggggatctggggaggttgcagggcggaaaaatggaggaggggtcggaggaggcgagaaggttgagagaggagccacgtaagggggagagagatggaggcagccggtgggagtaggaggggcagggtggtgacttggagatggggagaggatatgggaccactgatggggtctttttggggtggggatggctgtgggctgatctggccctctgatgagttcagactgcctcgagaaaggcgagtcgggctggaaggcctctgaggctgaaggagggtcctggcagcccagggttaccctcgacacctccacccccctccacttcctccctggcagagaaactatttcctggccagcgctatttctgcccatccgtttccagaaggcggggctctagtcaccccctcctcacctccctccagtgccctcccagtccccagggagctggggctgaaatagcctctggccagaacgtggagggcatcagaggacagaaaaggctctcctgaggtccccagccctggagcagttcgggcctcggggctaaaagccgggctcaggcacgggagcagagataaaggcagggttgggggtggcggtgaattaagatggggattgggacacggatggggatagggccggaggtgaggatggggtgaaggtgggggttgggatgagggagtttagggttaggatgaggtcaggtgggagtctggacagaaatgggaaagaggcaagaatgacattggggtctgggtagggatgaggttggagaggtgggggaggggaatgtaggtgaaagctgaggatggaaaggacataaagattgatgtgaaggccgagtgcggtggctcatgcc

SEQ ID NO: 1560333 - DNA, 4001 bp, Homo sapiens
tgcccgagcacaagagtctctcccctctcaccttcttgaagacgtggctccagcaattctctcccctgttgaccccacaacaatctacaactcctgccccacttatctgatcctcttacagcagaactcctgaacagctgcctcttcttccttttctgtgaccccaccactccattgcggcagctcaacatcgtcaccactgacctccaaatgatcaaccctcccatgacccggctgtcagtaaggctgaaacagctggtcagccctcacatctcagacatgctcttttcttggccccaggtcaccaccatctcctggtttccccctaactctctgggcgttccttctgagtctcctttgctagcttgtcacatgtctctgactgctcaagttggaaggcctagggcttggtcctgggacctcttctcttttccatctacactcacttcgttcaggcaatagcctgaaataccatctatatagccagagagttccaaattgcctatgtccagcttgggtctctcttctgatttccagacttgtacagatctgggcagaaaccttagttatgcctgaatctttttcctcgcactcaaaccaaactatacgtaagttttgtccgtattactttcaaactacatccagaatctcatcacctccactactcctgctctggctggagccaccatcacctccctgttttcccccatactccccacaatcaacacagcagccaaattttgttaaaatgtattggggctgggcgtggtggctcatacctgtatgagcactttgggaggaggattgcttgagcccaggagttcaagaccaacctgggtgacatcgtgagacgctgtctcaattttttttttttttgagacagagtcttgctttgtcgctcacgctggagtacaatggcacgatctcggcccactgcaacttctgcctcccaggttcaagtgattgtcctgcctcagcctcccgagtagctgggattacaggcgcccgccaccatgcctggctagtttttgtatttttagtagagacagggtttcgccatgttggccaggctggtctcgaactcctgacctcaggtgagccacaggtcttggcctcccaaagtgtggggattacaggcgtgagccaccgcccccggcctcccgtctcaaacgttaaagagaaatattcttggagttaatctacttctgagagttatttagctaggaaaaggggatatttgctctataggtaagacttgccctaatcttttttttttttttttttttgacttgccctaatcttagggatatttacttgtgtggagagatgcagtgaggtagcggtggggatgtatttctcaacccagcgcaatgacattatcttcaatttgaggagtatttacgtgggtgaaagatccgccacagtccacagtatgcaaatagacaggtttgcttcagtccgggatgcaaggacctagagggtgtgtgtgtggggggtgggggtgggagggtggaggaggaatcgagttaagggggatatttaccctggcgaggtgattttccctattctgaaatatcaattcttgggcggacagtctgcccctcctctcattctcagagatagttacaaagatggaactatcttctcctttctagtcgtgagggagagatgtgtgtatccctgcgtatttagtagtattcaatcggacaagaaatcatgcatcaacgcaggagtgacatttaccagctggtatcgtgaggaggtgggcactcggttgcacagtacacggtagtccctctccaaaagaaagacctgggtgaagttcttaccttgcaggaaggaagcagagccatctggccgcgacagcaggttctgttcgcaggcaaagtgccggaggctgcagccaggaccccgagggctggaccctgttccattttcagcacggattttggcgtcagtatgcgtctcctcctccatcgcgccgagcccacgtgcggctgcagttgtcacttccgcctggcagcgcgcgccgcaaacaggctgcgtaaccagtgcgcacgcgccgggctgggccatcctcctgggcgtccgcacgtggcttagcgtttaccaacaatctggctccgcccagtcccacctcctaactctggcaacgccattggacatttgggaacagaaggcaggccttggcattgatccgctttactctgggcccccgggccctaaatccctgaggccctggtcaggttgccctcttctttgcctgttacaggagtaactacaatgaggcgattggagaaaattttgggtagatagatttttttttctccaaatctctgtgcattctatctaccacagaacgggaagaagatggttttcttgtcagatggtgctggagtttgcgtcaggcacataaagaggcagccccgaatctagcctacgtgagtgccggaccgctgagtggttgttagccaagatggcggtagcgatcgctgcagcgagggtctggcggctaaaccgtggtttgagccaggctgccctcctgctgctgcggcagcctggggctcggggactggctagatctgtgagtacctgggccccaggcggttttcccaaaggggattagggatgtaaaggctatcttcagagtgtggggtccctgaaggatatgaaggaagggctgtcacaaaagggaaaaagagtgggagactccttggagaagacaccgaagggaagatctgccacttccttaggagacgaaaagaacttccacttctttaggagaggaaaaaacccgtttgcaacttctttgtgggccctgagggagacgacttgaagagagagatgggggttccttattagctgccactggtattcaggggaggctccttggaggaacaggggaagaccgcaagaccttctccctcagggtttggagaatgaaactgactttgtaagggagggactttcttctgggcaaagatccctcttcaagaagaagaaagaagagaacaggtccctgtcacaggctgcatagggccttgtatttctttgctcctttgccacaattctgattttaaaatgaattgtgtaaaaaatttgtttgattcctgtgtctcttgatcgaatatcaagacagagaattcgtgtgttctggacactgtacagaggagacgattaatatttgttgaattaatgaggggaaaaaaggagggagagaggtacagacagggcactttgcccacatttcttagaaacacttgagaaggctttgtttcttgtcaaaagggtcacaatcccttcaggtggatgctgctaagggcaagattacactgcaaaaaacctaggtggaagcctatctttagacggggagaggcaatgggttgcagaagagctttgaactacagttgacagataggagagtagtggttacatgggtggatgcatgtccttgctctgccgctttccacttgtgtagccttggccaacggactgcacttctctggatctatggagctaattttcctctctaaaatattaacagtggccacctcatagggctgtgaaaaatcaatatgtaaaatgctaaggactggacctggcacatcctaagggcaataggaatgttgatagtgagggtggagggaagggacagaaactaaccttggagatggggagaagaaaggggtgaccttgggaaggcctggattggtgaggccctggggaaaaaaatctgaaaagatattgtgaggttgagtctgatcctctgatccccaatccataaggaggggaagatggaatctgtagaaagaagctctgggtaggggaacaaacgggaggagggtgaagaagatgggccaggagtaggacgtagtaggtatctaggaacggagtcacttgaaacaggtaaatacagaagggctgcaggagcaaggtgtgggtagggcagtctcttgcctttgggctggagaccttttcacttttttttttttttttttttt

SEQ ID NO: 1560334 - DNA, 4001 bp, Homo sapiens
ccaggttcaagcgatccttctgcctcagtctcctgagtagctgggattacaggcgccagccaccaagcccagctaatttttgtatttttggtagagatggggttttaccatgttgctcaggctggtgttgaactcctgggctcaagtgatccatccgccttggcctcttaaagtgctgggattacaggcgtgagccaccaggcctggcctctccttatcttatgaggacaccacccacactggatgtaaggcccacccttctccaaagtgacctccgctagtgacagttgtaacaaccctatttccaaataaggtcacattctgaggtcccaggaaggacgtgaagtgggggaagggaccctgttcgacccagtacagccttccccactttgtgtcactggagcaaagaggagtgggtgcccatgccccggctgcccccttccgcagaggccttggaggccacggtgtcccccggcgaccgttggaagagccctgcccgcaccttgtccctgaactcggccgacacgtagtagtagatgaagggatccacgcagctgttgagggtgctcagcgccaggctgggcacgtaggcaccatagaggttgccccaggcgctggggctcgggtccgagtaatgcagcagcagcagcaggttgctgggcacgaagaaggccacggcggaggccagcaccactgcggtcagcctcagcgcgtggccgtagcgccggccgctggccgccagcgtgtgcagggtggccccgtagcacagcagcatggccagcaggggcaggaaacagcccaacagcgccaggcaggtgaaggccggttgccagtgggaggcctgtgcgtccaggggcagcgcgtcatggcagagcacgcgatcggagcgcgccagccggaaggtctgccgctgcagtgtcaggggcagtgccagggcggccgccatgagccaagcagccatgcagagtccaagggccaggcgccggccacgcagggcgcgggcccgcagcgggtgcaccagggccaggtagcgatccaggctgacggcggccagcagcagcactgagccatacatgtgaccatagagtgcggccgtggccaggcggcaggcggcctccccgaagggccagcgctggccacgcaggtggtaggcgatccgcgggggcagcgccagggccagcaggaggtcagcagccgcgaggttcatcagcagcatggtggagggcagccgaggtgcctgcgtggccagcacccacagcgccagcccattggccggcagccccaccaccaggaccagcccatagagggcgggcaccagcctggtgggcacccagcccagaagcagtgcccgtgagctgtccgggagctccagggtgtcactgtcattggcacagacttggcctgggtagccgcggggggcaggcaggattgagggcgtgctgtctgggagagagaggggacctcagtcagcccctgcctcggcaggtgacgagaagcagcagggagggaggtgctcagagcctggggtctgccctggtgggaaacagctggacatgacactcaagggaatagcccagccctatggggtcagagacgggatacagagtgggctgggctgaagcccgcaacttcccggcctccccctccccagctccgggcccccagctccatctctgatgtaaccccatctctgcaccccaaagccaggaccactcaccatcaccacctccggtgctcccgctctcgtcgtagacgctgggggtctgggtgccgccagacaggctgaaccccagcaccaggggccacaggagcagtcgcccccacatgactgcactcaggctgctctgggctgtggcctcaggcttcctgcctcgccggaccctgagccccagcttctggagccgaggcggacgagcagatcgcgccggtagagataaaccaggaaggctgcccctgcccccgcagacccaccagggccgcttgccagccagcccgtgggaggactggagtgtgggttatggagaccgggctgccccacgtggctatatccagtgtggcgcctcccagggacccaggtgccaggccagcaagatgcaggggggggggtcccagctgcagccagcacccccggtccctgaccagcccaggaagcatctgcggttcaagtggccacttcctgccagccgctcacatctgcagccactgttctcacgacagccctgtcctcaccccaatccccacgcccatcacgggctctgggcctttcctgaagtcaccccccgacttcctatctctggtgagcaggataagaagagccctgctaggccaggcacggtggctcacggctgtaatcccaacattttgggaggccaaggcaggcaaatcacctgaggttgggagtttgagaccggcctgaccaacatggagaaaccccatctctcataaaaatacaaaaattagctgggcttggtggcagatgcctgtggtcccagctactcaggaggctgaggtgggagaattgcttgaacccaggaggtggaggttgcagtgagccgagatcttgccactgcactccagcctgggcaacagagcgagactcggcaaaaaaaaaaaaaaaaaccaaggatgggcgcctcccagagggtaatagcgagggtcccttcagacccccagagcagcacgagcccagcgtcagggactctggctgaacctcgagagcccctcagcatcctcggctgaccccatactcacaaggcacccctgtatgagtgcctcacttcactcttgcccaggggacacacgggcatctgtaggggagacagtgatgctggggacagcacctgccgaggaccggggggacttcggggtgtgtggctcgcctgctctgacctctgaccctgagtgaggtggccaggttgaagggtccccaagccagcctccagggggcctccctcctctagccccagcacatccccactcctgggtaccattggatgggggctcatcgggcagatgaagaaactgaagctcgggggggtaccccttccctcttctgcacaaggcccctcagtgttgtccctccctgcctcagagaggcctcaacccgtcgtgccctgggggagtctggtatgggtggttctggccccagtgtgctcagcgctgggctacaggggatgggggacagggcttgggggggtctgggagcaggagggcctagttgggagccatgaggattggggaaaataaaatgaactagggatgggggagggaggggtccaatgtggccgtttcctgcctgggggagccctaatctcatcacacacttgagcactcggggatcagccaggaagtgactgagcagagtcttggacagagtcaacacccagctccaggaggagacactgaagcctggagagagagtctagctggggcagggtctcagaggccctgctcccatttctgggcagtttccatggccaccaatgagaaaatcagcttcacgtcaatgacttggggaaaaaggtggctgaggacaccctcagcacacggaaaacccacgcctgggctcccccctccaccgtcttctctgtgagcagagtgggaagctgtgcaggggaggctgggcacaccggcagtccagtgatgctggggcagggtggtttgaagatgatgcatcaaaatagtgatgcacgaccgggcgcaatggctcacgcctgtaatcccagcactttgggaggccaggtgggtggatcacgaggtcaagagatcgagaccgtcctggccaacatggtgaaaacccgtctctactaaaaatacaaaaattagccagacatggtggcgcacgtctgtagtcctagctcctcaggaggctgaggcaggaaaatctcttgaacccaggacgcaggggttacagtgagctgagatcacaccactgcactccagcctgggcaacggagcgagactccgactcaaaaaaaaaaaaaaaaaaaaaaaaaagccag

SEQ ID NO: 1560335 - DNA, 4001 bp, Homo sapiens
cactccaagcggaaatgtgatcaaatggagccatcacaggttttctgatgaggggagtgtcaagcactgagctctggatccagcgttggctggggagtggggtgggtccctgaagacctctcaaggacactgaacacttcccagcagtcaggggctccaggctggaggaaggaaagtccagagtgtggcccctcagatggcaagatccccagggagcccctgaggcaggcgggcaggtcatcgatgaatagagaacacgtgtccctcaatgtccattgctcctattggcctcagtagtagaatccctgatcataacggagcccatggctgtccaatggagactcatcttccagacttccttgctgctatgtggggctgtgcaacccaggctggccataaaggagtgagcagaagtgtcttcggtgaatcctgggaagcttcttcatgctagagctggaacgtggacacaatggctggagcacaagcagccaccttgggccatgaggcagaatccagctgatgacagggcaaagcaatgatgtagaaggagctggggttcctgaagaatgtgtgacattgctctaccagccctgaatggtgtctctccagagaaagagctaaacctctgttttgcttaagcctctagtaatatctgaatgtaatcttcactaacagcccaggattcatttcttcttttaaaaaaatttatgttttttcagctggctgttgtggctcaagcctgtaatcccagcactttgggaggccgaggcaggcgggtcacctgaggtcaggagttcgagaccagcctggccaacatggtgaaaccctgtctctactaaaaatacaaaaaatagcgggcgttgtggtgggcgcctgtaatcctagctactcaggaggctgagtcaggagaatcacttgaacccaggaggcggaggttgcagtgagctgaaatcggaccactgcactccagcctgagcaacagggcgagactctgtctcaaaaaaaagaaaaaagaaaaccatcagatgatgagacgggcaaggaagaaaaatgcagcaggaggggatagaggatgggcatggaggggtcacggagatgaaaggaagcgaggagttgggcgcagtggttcatgcctgtaatcccagcactttgggaggttgaggcaagtggatcgcttgaggtcaggagttcgagaccagcctggccagcgtggtgaaactcaatgtttctactaaaaataccaaaattagctgggagtggtggtgggtgcctgtagaaccaactacttgggaggctgaggcaggagaattgtgtgaacccgtgaggtagaggttgcagtgagctgagatcacaccactgcactccagcctggacgacagagcaagaccgtgtccccccaaaaaagaaagcgagggcccaagccatgcaaaaagctgcaggaaaggagataccgggcagcgggctcagcacaggcaaaggccctggggtgggaatgtgctcagcgggctccaggaacagcaggaagtgggtgcgctgcagggagactgagtgaggggctgatgttgctggggagagggagaggtgaaaggggccacgtggagccttgtgggaagggtgaatttcactccgaaggcaaaaggagcaggaagagttgtcactctcgcaaagagtaggagatggtgacagccccaggcacaaccatccatgtggggtccctgtgctggcagctcaatttcccttcacttcgcagccccgtgcctgccgctctgggggccacggcctcctgccctcaaccagccccacagctgagcttccgctcagctctctttgctgtttaccaacctccttccggtcaggccccatcccacttcctcactctcacatctgagtggcctgccgggacaagacgttgaagcaaacttcactttctgtggtttcggctccactctcaccctgcacagccgcctctgcgcaggtttcaattcccatctcctgctcagccgggtgcctcctctggatccccccacagaaacttgcacgtggctgggcagcccccatgcacccaccagcctcccacactgtcgtccctggggcctagagaaagctgaagggtgggccatgagcagatgcattctgggaaaatgtgcaggagcccagcacatggagactagactctctggtgctttcaaggctctgagcaggtccgcagcatggctgaatgcagtgcttcgccctgtcagtgcagctggagctcagcagagggttgacttatgtcccccaaaggacatgtctacgtcctgacccaggaaactcagcatgtgaccttattcggaatacttattccaaataagcatttatttggaacttatttggaatactcatttggtatcttgagatgaaaccaccctgggtgcaaggcgatcctaaatccaatgacaggtgtccttataagaaaagaatgctgggcacagtggctcatgcctgtaatcccaacactttgggaggctgaggctggaggatcgcttgatctcaggggttggagaccaacctgggcaacataccaagaccccgtctccgcaaaaaatttgtacaagtaggcaggcgtggtggtgcatatctgtagcaccagctacttgggaggctgaggtgagaggatcgctttagcccaggagatggaggctgcagtgagctgtgattgcaccactgcactccagtctgggtgacagagcgagaccctgtatcaaaaaaataaataggaggcgagaacacacaagagaaagaagtccaagtgaagacaaggagagactggagtgatatggccacaagctaaggaatgccaaggacaggagaggcctgggatgggttctgcctcagagcctccagagggaaccagccctgccgccaccttgaccttggacttctgatctctatagctaagacagaatacatttgtttttttgttttgttttgtttcattttaagacggagtttcgctcttgttgcccaggctggagtgcagtggcgcagtcttggctcactgcaacctccgcctcctgggttcaagcaattctcctgcctcagcctcccaagtagctgggattacaggcgcatgccaccacacccagctaatttttgtattttcagtagagatagggttttgccatattgatcaggctggtttcaaactcctgacctcgggtgacccgcccacctcagccttccaaagtgctgagattacaggcgtaagccaccgtgcccagcttttttttttcttgagaccgagtctcgctctgtcacacagggtggagtgcagtggcgcgatctcagctcactgcaagctccgcctccctggttcaagcaattgttgtgcctcagcctcccaagtagctgggattacaggtgcacaccactacgcccggctaatttttgtattttttttttttttcgagatggagtctcgctgtatctcccaggttggagtgcagtggtgcgatctcagctcactgcaagcttcgcctcctgggttttatgccattctcctgcctcagcctcccaagtagctgggactacaggcgtgcaccacctatgcccagctaatttttttttgtatttttagtagagacggggtttcactgtgttagccaggatggtctcgaactcccgacctcgtgatccaccagcctcggcctcccaaagtgctgggattacaggtgtgagccaccgcgcccagctaatttttgtatttttagtagagaagagatttcactatgttggccaggctagtctcgaactcctgacctcaagtgatttgcccacctcatcctcccgaagtgctgggatgacaggcgtgagccactgtgcccagcctgttgtcttaggaaattcatccatggtggctatgccccagggaagcaggccccgccttcctccccacagatgagggctatggatcagaacccaggccagggcgcccccaggcctgctgccatcaaacaccgcga

SEQ ID NO: 1560336 - DNA, 4001 bp, Homo sapiens
tgctatggcaggcactctacagtctttagtccccttaacacatcacaatgaccctgtgtggccaggggctggcaagacctctgcactgagttagacagtggcccccgcaaaatgcatgtccttcccagaacctcagaatgtaacattatttggaaattggatcattgcagatataatcagttgagatgagagcatattggaataaggtgggccctcaatcccatctgaccggtgtccttttaagaaaaggaaaagagagacagggacacagacacccaggaagaatgccaagtgatgatggaggcgggcattggagagaagcagccacaagccagagaagaccgggatctctgactgcatccagaagctagaaaaaaggaggattctgcccagctcactcagagggactgagagggagcgtggttctactgacaccttgatttcagacttacggcctccagaagggtgagacaatggatttctggggtttttttgtttttttgttttttgagtcagagttgtctcgtgatgttgcccaggctggagtgcagtggtgtgatctcggctcactgcaacctccgcctcccgggttcaagtgattctcctgcgtcagcctcctgagtagctgggattacaggcacgtgccaccatacctggctaatttttgtatttctagtagagacggggtttcaccatgttggccaggctggtctcgaactcctgacctcaggtgatccacccacctcggcctcccaaagtgctgggattacaggcatgagccaccgcgcccagcctgcatttcttattaaggggcaggtggactgggggagaggaggggaaggggctattttccagaggctcctggcaggaagtaagaagatgagtgtgagttctgggaggcaggccttgatgggaagccccgggggcaccagcctctcctccaaggtctcactgacctttccagatgaagcaggggcctgttggagcccctaagcttcctgggcttcccccatcacagccccatctgtctgcctgggcttctcccatcccggctcgcaccaccctgggctgtgtccccctcggactgtttaagagcagggcctggcactgtcctgatgaccactacgtggctgaactgcaaagaacgcccactcatccctctgcacatattaccaggaaggatcccctgaccggaagaatctgggtaggggccagaggcagggattccatcacctgtacatggatcctaagggacagtcgagccacacaaattctgtcttctcatcgagcctgaagttgtcaaaaatgacgtaatccacccttaactgtgtgttattggtgcactggacgtggcaggcttccacctgcagctcaggccgcaagcggctagaccacaccagcacctctcccagatagagccagcagggcatggcttcctccagaggctcctcaatgtagcggtaccccaggcgtttacactcgcccggctcctcacagcggttgcagtcctgccagggctcccaccaggtaaaaatgagctgtttgctgcccaaatgcagggtctcgttctgcaggggcctctgacccaggtccttgtgtgttatatgcagggtggtgacatcctgaaagtcaatttcatactgcaccacttggcggccattcttgttccagcagtggtagaggcccgtctgggagggcaatggatctttaatgagaaggctgccctcgggcattatttccatattggaaatattggtgaggctggtgagcctgcccttcttgccttgtgtgaataaatagtaccagtgcgcccccgaggagttgcaatacaggagaatatcattgcctgagagtagggcctgttggcactgcttaccactggggcagctgatggaaaagtagaaccccagtgccggggcagcaaagtggagcagcagccacagcatgggtggcatggtggactggggctgtggcagtgggctggtgccaccccgaacattgtgaggtcacccatgaactctggcctcagccctgggcagtgggatgaattgcagctaccacatgtgtgtgtgaggtcaccatccccttttgttttgtgacaagctgacaacactgtttttcttttttttttttttttcagacaaggactcgctcttttacccaggctggaaggcagtgctgcaatcacagctcactacagcctcaaactcctggaatcaagtaatcctctcacctcagcctgttgagtagctgggacttcaggtgcatgctaaccatgcccagctagtttaaaattttttctgtagagacggggtcttgttatgttgcccaagctggtctcgaactcctggcttcaagccatcctcccaccttggcctcccaaagtgttgggattacaggcgtgagccactgtgccccgctgaccatatttaatttctattccaagccctccattttgctgggaaaggagcaaacttaatttgtctattcagagttttctctactacctgccccgcttcctttcccaggggtgagactacattcccagggatgaaataagagcatgaaggtgtcacatgtgaacactcaacacatatttcctgaactcttactatgttctgggcacacttcttagcactggggataaagcagtaaacaaatcctctcgggctgggctcggtggctcatgcctgtaatcccagcacttttgggaggctgaggcgggcggatcacctgaggtcaggagttcaagaccagcctggccaacgtggtgaaaccccgtctctactaaatagctgggtgtggtggcgggcatctgtaatcccagctactcaggaggctgaggcaggagaatcacttgaacctgggagacggaggttgcagtgagccgagatcgcaccgctgcactccagcctgggtgacaagcgtgaaactccatctcaaaaaaaataataaaaatttaaaaaaatttatctctggttactgttctgacctcctgcacctttccccctactccctaccctccaaccacgctggcctcccgctgttccctgaatctgtcaggcaggcagaggggctcttgccccagaaccattgcacatgctggtccccgtctcttccctcagccatctgcatgactcaatacatcttcaacaaatatttttctcagttgctccctttccttccatccccttttctaaacaccttctcaggcggtggctcacacctgtaatgccagcacttgccagcactttgggtggccaagatgggagaatcacttgaggtcaggaattcgaggccagcctggccaacacggtgaagccccatctctactaaaaatacaaaaaattagccaggcatggtgtcgggcatctgtaatcccagctactcaggtggccgaggcagaagaatagcttgaacccaggaggcagaggttgcagtgagtgcagattgcgccactgcactccagcctgggtgacagagacactgcctcaaataaataaataaataaataaataaattaaatgatcttccagacttttcccaacatagaaaaagatggaagatttctatgagacttgcatcaccttatctcaaaaccttataaggacattacaacaaagaaaaacctcaggtcaatctcttttgtcaacacagacacactatcccaaagaaaatattgcaaattgattccagtgattttctttacacaaggataaatataaagaccaaattgggttatttcaggacggcaaatttgggttatatttgcacatcaattaatgtaattcaccacattaacagaataaaggagaaaaaccatattattatctcagtagatacagagaatgcatctgataaaactcaacattcatttatggctcaaaacttttggcaaactaggaacaaaaggaaattttctaagaagataaagtgtttctattaaaaacctaggacaggccgggtacagtggctcacacctgtaatcccagcactttgga

SEQ ID NO: 1560337 - DNA, 4001 bp, Homo sapiens
gacgtgatctcggctcgctgcaacctctgcctcccgggtactggttcaagcaatcctcctgcctcagcctcccaagtagctgggattacaggtgtgtgccaccatgcccggctaatttttgtatttttagtagagacagggtttcaccatgttggccaggctggtcttgaactcctgacttcgtgatccgcccgcctgacttgttaaatccttaccacaaccctgtgaggcagactttagtgctactttaagtaataggtagccggcttgcccagggtcacaccactaatttgtggtagaggcagagtcaaactcaggtctgtcatgccagaggtagtgcatccatgtgttttctgtatgcctgaattagatctgggagtaaggagttaattgtccccaaggtccattttccccagtgtcaccgtacagaatcacctagaccagggttagggtttctcagcctcagtgctactgacatttggagccggatcactctttgctgcggcaggctgtcctgtgtatcgcagggtgtgtggtgtcatccctggcctctagccactagttgccagtagtccccaccccaacccagttgagaaccaaaaatgtttccagacattgccacatgtgcttcggggtgggagtttaggggggtggagactacccccaggtgagaatcactgacctacactgattattccctctccccagcataatggacccagtttctgtcttactgtgaactcttctgttctccactgcacacatttatggtgttaagaaaaaataatttatcggagccttataatacaatacaaacaaagtcgtcatgggcatggccattcaatatcaacagctgagactgggtgcggtggctcacgcctgtaatcccagcactttgggaagctgaggcgggcggatcacttgagatcagaagttcgagatcagcctggccaacatggtgaaaccgcatctctacgaaaaataccaaaattagccaggtgtggtggcgggcgcctgcaatcccagctactcgggaggctgaggcaggagaattgcttgaaccccggaggcagaggctgcagtgctctgaccccgccaaaaataactaattttttaaaaaatacagcatgtttgaatctgccaaacaaagttgtcttggaaacaaactttgtggtgacttcgagcggcgagcatggccatttaatatcaagagctggcatccactgaacatgtatgcactgctttttactttcatgacttcctctcaagttcccaaccctcttagaataagttactaccctgactcgtacagaagaggaaacttgaggcacggaaataagaaagtcactggcctagtgtcgcagggcaaataagccacagcactggaatccaaacccgggtctccagctctggcctcctttcaacgccagttctagctctcccctctgctgcccactcgggccagcggggtcttctcatccttggagctcccccggcagagggcgactcttctctcactcacgtacagcatcctctccccgtaattaaggtctcctctgaccgctcccctgccctcggagcgtcccagccctgaccccaatttccagtctcccggcgccgggtgttcccgcctccccgccgccttctgcttctgctcacccgcttctcctgcattttctcgaaggccgcctgggccggggtccgcttgtccaggccgcgccgcttctcctcctcgttctttttgctcgttcccattgcttccaggagtttcgctttgtctttgtccttctttttcttcttcctggaaaaagacatgaggaggcggcgggtcggaggatcagggccaggggtcccgagaaaaggtctaagggggatgaagacggaatcccgcgggccctcgggcctcaccgcttggtcactcccagctctgcgacgcctttcagcttcaggggtcccttttggacctgctcgtaggcctccatgacactctccagtgcttcggtagctggagtgccacacttcctgtttgcaaacactatttccgcccgaatggccgcctcgcttctctttgattggctgagctacaaggtgagcatgcgctcttggttctggacccgggccacacttccgggtagtgggcgggacagagagccaagcgaatgagtgcccttcgattcctatctgctgccacacttccgaatttggcgcccacttccggtctcccattcttcacacagggtgctggaaacccaacccctttttgagcgttttgcgcacttttgggtgacctgttctctctccttgatttttttttcttttttagagacacgatcttggtctgtcacctaggctggagtggagtggcgcgatcgtggctcactgcagccttgaacccttgggctcaagagatcctcccgcctcagcctccccagtagcagactgcagacgggcgccactgagcgcggctaatattttcatttaaatttttttgtcgagatggggtctcgctgtgttgtccaggctggtctcgaactcgtgggttcaagtgatcctcctgcttcggccttccaaagcgcagggatcacaggcctgagccacgccccaccacccccgttctcttttattgccatattttgagcgttcactggatagctgaacctaattttgtaaacctaatcagtattcattaatttttcagctttaggtaaatgacaatatcatgtgacaaggttggtggtatgttaaaacaattaaaaatctattttatgccgggcgcggtggctcacgcctgtaatcccagcactttgggaaaacgaggtgggcggatcacgaggtcaggagatggagaccattctggctaacacggtgaaaccccgtctctactaaaaatacaaaaaattacctgggcgtggtggcgggcgcctgtagtctcagctactcgggaggctgaggcaggagaatcgcttgaacccgggaggcggaggttgcagtgagctgaaatcacaccactgcactccagcctgggcgacagagagagactccatctcaaaaaaaaagtacatatatatttaaatcagcactttgggagaccaaggtaggcggttcacgtgaggtcaggtgttggaaaccagcgtggccaacatggcgaaaccctgtatctactaaaacaaaacaaaacaaaacacaaaaagcaaaaattagctgggcatagtagcctgcgcttgtagtctcagctacttggtaggctgaggcaggagaagcgcttgaacccgggagtcggaggttgcagtgagccaaaatcgcaccactgcactccagcctggtcaacagacaaagactccgtctcaaaaaaaaaaaaaaaaaaaaaaaatcaatagagatagggtattgctgtgttgtccaggttggtctcaaactcctgtcctcaagcagtcctcctgaagcattagaattacaggcgtgagccaccacccctggccctttctttctttcttttcatcctttcagtactgtgcggttttcttacatacgatgtgtacatgcatatatctttttttttttttttgagacagagtctcgctctgttgcccaggctggaatgcagtggcacgattttggctcactgcaacttccacctcccaggttcaagagattctcctgcttcagcctcctgagtagctgggattacaggcgcccaccaccatgccccgctaatttttgtatttttagtagagatagggttttgccatgttgtccaggctggtttcgaactcctgaactcaggtgatccgcctgcctcagcctcccaaagtgctgggattacaggcgtgagccaccgtgcccggcccttgaatatatctttttaatgtcagcagaggactatcggaatttttggtttcttctctatttccctctgtatcaaaaacctagtaaaaaaaaaaactattatgggaaaaatttaaaaaggctgtgcctaccaagtatctgtgaagatgtgttga

SEQ ID NO: 1560338 - DNA, 4001 bp, Homo sapiens
aaagtgctgggattacaggtgtgggccaccgcacccgatctgcattactttttcaatgaaaaaatatgacgtaaaggggcagtgtggagtgaggcacaggagggctcaagaaccatgagatccacaatcatgacaagcttggcattccaatcctggcccactctggagccacagtgggaccctgggcaactggctcccggctctctgagcctcagtttagctctttggcggatggggctaagggaccccaccatgtgaagatatgaggtcagaggtgagatcgtatgcgcggcctaggggcgtctggcatgagcaggccctgcggaaatgatcattctcctgaccgctgctggggcatggctgaggactgtccccttcaggtctgtctaatctctgatttctggcccctgagggctgctctgtccttgttctcccgggtagatggcagctcagggagggccggtagcactgccagctcctggccctgggggtggtctggacgaggggaggtactgctgggggctcaggtgcctggagctgagggaggaaggggtctcggctgaggtgggggcagttacccgaagagttgcaggtgtccgttctccttggcagggccggccagaagcaataggtccgggagctccagggctggactggaggctgccacccccatggtgacctcgttggcaacttctcccaaccgagtcacctggggccagaggtcagaggtcggggcaggatagatgtcggggcagaactgaggagggatcagaggttaggaatcttggtaggggaaaaggtcatgaaccaggtgagttgaaaatcaggctgggggccagatatcttgaaattaaagttcaagaatcatatgggtgtgaagtcagggaaactgaggcaagggagttacaggccagggttcacaaagaatctagagaactagaagtatggggtgtcagagatcacataggagttgggagtcgggaatcccacgagatggacgttatgggggagcaggggctttccaagtcaggaggaggtcgaggggcaggccgaggctggggatgagggggttctggggctccctacctgtacgaagttgctctcaaagatggggaagtcccgaaactggtcgaattcgccgctctggaggtagcgttggagccgtctgggacggcccgtgggagaggctgcaaccaggaggcattttaccaggacgaagtctgggggtcgatcctgggaggctgtgcctggcttcccaactgagagggcccggcacagccccgcggagaggacggggtatcagatgcccccgaattgccggccccatcctacttggttccttcaccaggtccaacccctctaggcctggctcccctctctcacctgccatcccacctggttccacctcgccagctccacccagggccggcttagggccgcgatcccgcctcattgcaatgtccccgtccgacgggagcggacggaggagcagagggagaaagcgagggggcgggactacgcgcactgtgacgtcatgatgcggagcgggctttatgacgtcacacaagagcgggctcctgatttgtgatgacgtccctggagggggcggctcctggagatcaggccaaaggggcggccccatcctgctgacgtcaggccccaggtgcggacgggtgccagtgcgcaggtgccggggcccagcgcaggcgcacgggcgtcaggatgcggcctgttcctcccggcgtgctccgcggctcttggctcacagccgtcccttcgctggtgggaagaagccgagatggcggcagccagcgctggggcaacccggctgctcctgctcttgctgatggcggtagcagcgcccagtcgagcccggggcagcggctgccgggccgggactggtgcgcgaggggtgagtgctctttagctgtgcatagcgggcgcggtctacggatgtcgcaggtcttgggtctttaggtgagttacagacggaaggaggctgcgcagggctgagagggaagaggtgggagatccctggaaagccaggcctcagtcacgcacgcgcaggaggggcctcgccagtgcaccgggttgcaaggactgggtgggaggacaagcgcacctgtcggaaggctctggctcgggaatatgtatgagggggcggggctgggggtgtggaatcttggagaatccgacgtccgggcggttgaaatgaaagaggcaaggtgaagccgggcgcggtggctcatctgtcatcccaacgcttagggaggccgaggcgggaggattgctctaggccaggagttcaagaccagcctgggcaacatagcgagccctgtctctacaaaaaatactaaaaaaaaaaaaaaaattaggccggtcgcggtggctcatgcttgtaatcccagcacttcgggaagccgaggcgggcggaccacttgaagtcaggagttcaagaccagcctgctcaaaatggtgaaaccccgtctctactaaaaacacaaaaattagctggatgtggtggcaggtgcctgtaattccaactactcgggaggctgaggcaggagaatcgcttgaacccaggaggcagaggttgcagggagctgagatcacgctactgcactccagcctgggcgactgagcgagaccctgtctcagaaaaagaaaataaggcgtgggagggggctcttgaggaagtggagatgagttttgtctcctaaatatgcgtgagtatgcaagtttggaggttggagaaaaggaaagcatgaatcttgaatgtgcttaatagggactgaactcaggctgcatcttggctattgggctgtcaggtgataaggaggccatttgaatattagcatgaaaaagaaggcttgggagagggagagtgtcatttaactcatgagtatttgtggcgcaaggcttggaagtgaccttgggatagttgctttggcaatgaggttaggcatgtttgtagggtctggttttctgggggtgagggagtgcagagtatgaatattcatgaaatgggtggtttctagtgaaataaaggcaagcagcagtgattaacttgaagataaggctcctccctcagcccaccagtctgtctgtcctgggttctgtgggtgactactatgctgagggcttgggtggtcctcacctggggccttctgtgtcctctgcaggctggggcggaaggtcgagagggcgaggcctgtggcacggtggggctgctgctggagcactcatttgagatcggtgagtcaggcaacgtcctctcctagacacttaacattggtgccctgagaagtcaagacttggagtctgggtgcctcccgtcgtatgacatttactaacaaccatttactaacagatttgcctcaggttaggggaaagtgggacatgaaagaagagaaacactctttaaatgcccccttgcctgtgagacaaacctcagtttttaaaaggtcatcacagcagtaataatttcagagcggctttcctgatcagtcgccacgtgcccagcattagcggttccacgctttgcaagtattaactcagatgtcctcacagcagccatgtgaggtggtaggtattcgtgtcagcccctttttccagaagaggaaacgggctcagagtaggcaccacacaaggtctcatcgtgagtgagtggcagagcaggggccagcttcaaacccaaacttaaattgccatgatgcaggtgtccaggttcccagagctggacgtcagtgctgcccagagtgtagtaatcgagtctgaggccccgaacctgagggcacaaaccctgaagctggtgcccctctgcaaaccctggcatctgctcagtgaacagctcccctgattctgacatggccaggtagttgggaattcctgaactccacagcctccgtattttgcagttggggaagctgaggctcagagaggttgtgtggctatccctgggtcacctggtgaggcagaggcaggatttgggagctgtgggg

SEQ ID NO: 1560339 - DNA, 4001 bp, Homo sapiens
gacatcctgggtcagggaccccaggggagggcacgaggacctaccccaggagcttgtggagggccccaccaaggaagggggaagagccaaagggtgcagctctgtccctgcgacggggagaacccagaggtcctgacaaacagcagggcctgctcacctgcatgtctgctgatgggctggtcctgcagagatagagggaggcaggaggggcccgggcttccacatctccataacctacccagcgagaggcctaggccccctcctgctcccaggacctgacgatccagctcctcctgcctcagacccaggagtccaggcccccagccgctcctccgtcagacccaggagtccaggcccccagtccctcctccctcagacccaggagtccagggccccagcctctcctcccttgactcaggggtccaggcctcagttcctcctccctcagacccaggagtccccagcccctcctccctcagacccaggagttcagactgccagccctccaccctcagacccaggagtccagaccccacagcccctcctccctcagacccaggagtcccccagcccctcctccctcagacccaggagagttcagactgccagcccttcaccctcagacccaggagtccagggcccttagctcctccgtcagacccaggagtccaggcccccagtccctcctccctcagacccaggagtccagggcccttagctcctccctagacccaggagtccaggaccccaggcccttcttccctcgactcaggggtccaggcccccagctcctcctccctcagacccaggagtccaggcccccagcatctcctccctcgactcaggggtccaggcccccagcccctcctccctctactcaggggtccaggcccccggcctagactttgggctcttggtcgcagtcccctctggatctggccggagggttcctggggcctgccatgccctggtctgtggagctgggatcccacctgcaggtgccaggtggaggcaggcgcttcggccagcggcatatccaggggggccgtgcgcgtggtcctgggggtccaggtgggagccggctcctgaagcaggttgatgaggcggacccagcagtggaacaggaagcccacctcgttgtcaggggcgtccagggccaggtagtactggcggcccgagaccaggcgcagcttcaggcgccaggcagagaggtcatggacgcagaggtggacgaggtccagggggatcatcctgggagagggagaggggagcgtctagagcaggaggggtggagggggcggccgaggggttgggggatgcggcacctggtcagcacgaggccggagcagtccctgtcctcggcgggctggccgatcagcaagatgtcaggcaacaccaggcctggcagggaggcggccacgcccatggccagccggttggttctgtgattcacgaacactgggcccccttgatgggtcacctggggcagccagggagagggggctgggaccactccttcctccagcagccacagcctgagcctccctcctgatcgtcccccacacagtgactgctaaatcccgttccctctcaagatcccccagcacggggggccttgcttcccctctgtccctctcagccccggggcactgggaactggagacctgaacaaagttactctcgaacatgggcagcggacggaggggcaggtactcgcccttctggagggtcttttgcagctcccccagaacagggacccacttcggggtgccctggagcggctcaaggcacctcctgtttcgaagccagatcatggtggctgtggtggatgggtactggtttagggacccagaacccaggcgtgcaggcctcccagccccggcccaccagccttgacccgtggggcttcacgggtgcctggagctcagcgttacagagcgtggagatgccccaggctgggagactcgggcctccgccatggccctgccagggtggacagcaggggtctgggggaggagcctctggtggaggggctttgtgacctcatcggacacacaggggcctcttccaggaactctccggggactgtgggctcccttctcctccagggatacagcctggagttttttgtttgtttgtttgttttttgttttttgagatggaatttcactcttgttgcccaggcagtgagcttagattgccacactgcactccagcctaggcaacagagcgagactccatcgcaaaaacaaacagccctatgcagtgcggggccccaggcgaggctcagaccctgcctccacggaggaggcacgatcacccagacagctctgtggaggcagggtctgagcctcgcctggggccccgcactgcctagggctgtttgtgatgtgatctcggctcaccgcaacccccgtctcctgggttcgagcgattctcctgcctcagccttccgagtagctggattgtatttttagtagagacagggtttctccatgttggtcaggctggccttgaactcctgacctcaagtgatccacccgcctcagcctcccaaagtgctgggattacaggcgtgagccaccgcgcccagccagcctggagtcttgagggctatgatgggtgaatcaaaactccgggcccaggatgggcacctccaaccccagactcaaactagtgacgacacggggcccctggaagtctgtctgggttattgtaaagggaaaagtaactaaagcatttgaattatcatccctactctgccattgacccttctctaggccctgggtaagacccaaatccttactgaacctgtttctccatatctcatgtgtgtgcatgtggcgaggattcctcaacaccgacttgcaaagagagctttgggaaagagccagacacggcgcagaatcccacttccacctctccctagctgtgtgactttgtgcaacagagtccccactccttgtctgagactcagtttccctcgcctgtaaaacagggcgtattcaagagtccaggaggattgtgtaagtaaaaagcccacacttagtgcacagccctgacaggctcaatcagcggtcaactttgtcccctcctgagggcttatttttggagaggaggaggctgatattctgttattctaaaaatagtgtttattatttttaaaatgtgtcatgcaaaatacacagtcatggcagaaattctgtaaaatacagacaatcatacacattaaaagtcacccacaatcccacctctctcctttgacctggagacagtcattgtcaacattttggcgtatttccctttaggatttttgttttaatccatatatagaaagaaaaacacaaaattgggatcacagcatgcagtggttttgtagcctgctgtttcatgtcaggacatcattctttcttttttgagacagggttttgccatgtctcgcaggccggtctcgaactcttggacttcagtgatccactcgcttcgtcctcccaaagtgccaggattacaggcgtgagccaccatgcctggccaatgtcaggatatctttctatatcccaagcaagcctctctccttagcctccctgaatgacagtccctgctccgggcggctgggtggcgttctatccacagatgcaccatgttgcttaaccctcactgttggatatctagattgtttccagtttgctatggtgaacacagccataatgaaccatcttgaccttgcagctttgtcccatacgggtactgttgatcacagggtgacttgtggaaccttccattaaatatttattgaagacctatgggtcaggtgtggtggctcacacctgtaatcccagcactttgggaggccgaggcaggaggatcacctgaggtcaggagttcgaaaccagcctggccaacatggtgaaaccctgtctctactaaaaatacaaaagaaataaataattagctgggcatggtggtgcacacctgtgatcccagctaatcgggaggctgag

SEQ ID NO: 1560340 - DNA, 4001 bp, Homo sapiens
gagtacaggagtgagccaccacgcccggctttttttttctttttttaaaagacgaagtcttgctctgttgcccaggctggagtgcagtggcgcaatatcagctcactgcaacttcggcctctgggactcaagcagttctcctgcctcagcctccagagtagctgggattacaggcacccaccaccacgcccggctaatttttgtatttttagtagagacgggatttcgccatcttggccagggtggtcttgaacccctgacctcaggtgatcccccagccttggcctcccaaagtgctgggattacaggccgtgagccaccgtggctggcctacaaatcacgtttataacacagaacagcgtcccctgagctgcgacactgcggtacccaaatgtccacggcagtttggctgtaggatcagtggtggatgtcccgtagggcactgtgggcaactgcatttctgggtcctgtggaattttctgggtgctgggtgcaggacggctgacctgctaggccaccgtggcgaacttgggggacacggaggtgctgaaggcctggatcttgcaggcagcataaagcagtggaaaccctgactcagcagccagacagcctgggttcaaatccccactcggccacttacagggaagagatttaaccgcccccgtgcctccgtgggcacaatagtccctctggcggtacagggttccgggacgatgatgcacattagtccctgagaaacccttcacgtgggagctggcggacgctaaggctgtgaagtacacagcaggctttccaagggctgcagtgtggacatctgggccttccttggagggagagtggaaacccctggcttggtgatgaggggatgggggaatgactgagactgggggtgtcataattaggttcaaggggcatcgatacctaagggcatccaggtcttgggggagggtaggggcccccatttctttctttttttttttttattgagatggagtctcgctctgtcgcccaggctgaagtgcagtggcttgatcttggctcactgcaacctccgcctcccgggttcaagcaattctgcttcctcagcctcccgagtagctgggactacaggcgcccacaccatgcccggctaatttttgtatttttagtacagacggggtttcactatgttggccaggctggtctcaaactcctgacctcgtgatccgtccacctcggcctcccaaagtgctggaattacaggcgtgagccaccgcgcccggccgggcccccctttctgagagtaaggatgaggtctggggttgtaggcacctgagtcctggggctggaaggtgtgcactcctgggtcccaggggtataggtcctttagggtaggggtgtgcgcttgcaagtcccaggaggacaagggagagaatgcctgggtccccgtcccagtctggtgaatggacacagggcccccgcgacacccaccttgtgggcagcctggatctccagccgcaccagctccttgaggggcggctgaccctctccaggaggctgggtgtacagctgcgcccgggtgatgcctttccacgcagagtccactggccagcccagccgcaggacgggcgccggctgctccgactgcccaggccagtagctcaggctgcccgcgtccacatcggtggtggtggctccctctgccatcccgctgggctcctgcttggccactgtccagtcttcagctgccgctgccaagccctgaacctcatccgcactgaggaagggccacagctcctcgcgctgcacgcaggtctggaacgcctccgcgcccttgctcaacagagcctccagtgccagccgctggccctcggaatatagaaagccggggctggccccgggcaccctgggaccggagtccactccttccagcgccgccagctgggaggccgccatcggggtcactcgggtgggaggactgactgtgagaggctgggtccccgggggtctggctgtctctggggactgtgatcatctgggggttctcctgataggcagaccctacgtggccatccgaggcctccggcggggccctgcagatgtccaaatggctccctgcagcagcccctgccacactgttctgacaatcacgctgcccaaataagcgaccatccaatgtgtcaggccactcagatccgccacctgcctgcacccagtggcaccatgcctggctggccttccgtgaccttcctgccagccgtctctgctggtcaggttgacctcctgacaccatccccaactgtgtgacccatcagctggccatctctgctcagccacacgacagcctccaacccaccagtcacacagtgcccagtcagacccttcagctgtcctgaatttggtcaggctgaccacttgatcatttccaggcggcaagctgcctgcctgtctctaatcacccaaaggtccttaaaggcacgacaggttgcctgcctgcccccggccaagagcacgacgaactgaccctctccttccactgtctggcaaacgccaatggcttccgactgacagtcacagtatctgcctgttggagcatctgtctctggccaaatctgacagcccccacgagtttctcctgctcatcagctctcacccgcagaccagccaggatgcctctccactgggcctgctcgctcagccttaaaggccgaaggcttggcaaacccttccctaccctgtcaatgggggaccctgctccctggaccctcctcacactccttccagctgctgcagtggagggtgaaatgcgctacaggggtctccattactatgggacaggtctatgatcttcacagcccatctaggtgtgagtgccacctaaccagccaccctcctcaggctggctgcccctgcctggggcctggccctgggacctgttccaggccgtcctctgatctgcggggagccctacccaagctgcccccagcctggtttctgcctaaatgctatctcctgccagctacccggacgcttcttcccggacaggggccagtctctatctcgccctgtctccctcccaagcctcagttatccccttgaggctcctgacccaacctcggggaccctggacccttgatccctgcaaaccagaagcccttcattccaatcccaccaacccaggccgctgcttcctccagaccacagcagggagctgcaaagagaagaaaggagtcaaggcaggccagcctccccgccccaccctcacccatcccccccatcgccggggctcacccacaccggctagtgccgggctcaatggcctcccttccagtgcctgctttttccgagaacgtaggctgtggctccccggcttctacttctgcggtgcttcccggcttctggcctcactcatcaggcctcgacctggaatccagggagcccggccccttgtgtaaacacaggagggcccccacaggcccctggaggaggtccgggggtgcggctcacacgctttctttacctgtgctctcccagggggtgaacgcccctctagactcaggcttcccggtccccggggggttgagattgcctcacctgttcccaggcagtctctccctccccacagccctgccagcctgcaccctgcacttcccggtccacgccccacccgccatcccagcaccagggaggggcacaggatcctttaagaggggcgggcgtggctgacccaaggaagccggtgtgggaacacctgccacctggctgttgggaaggaggcagggagcttccggggcagtgggggcaggaagagggctggtcttcactggcatgacgtccctgtccccaaaccaaatgcattctcacccgcaggaaccaattctccaacccatcccccaataacacacacagagcactgtcagcaaaaatctttttaataagagagtaggatccagggttagtttttgtagcctcggctggcccgtcggcctctggcacgctcgaacttccggcccttggagcgg

SEQ ID NO: 1560341 - DNA, 4001 bp, Homo sapiens
ggaggggactctgactctctaccttagcatgcaactcctgcagcagctggctggcgggggtccctggtgcaggtctgggcagccccagggcttggagggtaaggtccagttcttggaccatgccggctccctccactaccccttcaccaaggggtggcctaggactcggatccagcagagagcggaggcacaggaggcgggtggcttggagctctgagcagagaaagcctgaaagtaataaatgggtgctgtgcactcagggaggctgctacccactcatccatcttggtcaaaaagctccactgatggccgggtgcggtggctcacacctgtaatcccagcactttgggaggcagaggcgggcggatcacgaggtcaggagatggagaccagcctggccaacatggtgaaactgtgtctctactaaaaatacaaaaattagcaggacatagtggtgagtgcttgtaatcccagctactcgggaggctgaagcaggaaaatcgcttgaaccaggaagttggaggttgcagtgagctgagatcatgtcactgtactccagcctggcaacagggcgagactccatttcaaaaaaaaaagaggctccaccggctttaaaacctccacctttgcccaggcacagtggctcatgcctgtagcctgtaatcccaacaccttgggaggctgaggtgggaggatcgcttgaagccaggagttgaagaccagacagggcaacatagggagaccccacctccacttaaaaacaaaacaaaacaaaatcctccaccttctagtcccccccacctaaagccttccagagtaagccccaccttgagaccctgtcccctcctacgaattccactcctgcccactttgaaacctcaagccttcctcctaatccaacccacttgagctcctaggccctccaattaaaattctaaccccgggccgggcgtggtgggctcacgcctgtaatcccaacactttgggaggccgaggtggacagatcacctggggtcaggagttcgagacctgcctggctaacatggtgaaaccccgtttctactaaaaatagccgagtgtggtgtcgcgcgcctgtaatcccagctactcgggaggctgaggcaagagaatcacttgaacctgggaggtggaggttgcagtgagccgagatcacgccactgcactccagcttgggtaacaagagtgaaactccatctcaaaaataataataataaaataaataaaaaataaaacgaaattctacccccgcccattttagagcgctctgcttgccccaacatgctcaccccacccacctcgtaccctctgggccgccccaaagttctgaccacaccccttgggaacctcgatttcccctaaaaagtcagagcccgccgctccggaggccatggccttgccacttctgcatcccgggactcacgcagcaggcgcagtccggcaccgggttcccgaagcgcagccgcgccatccccgccgcagagcgcgcgatccgggcagtgcagctcccgcagcaggctgccgagctgccgcagaaagtcctcctccgcgccagggcctgcgaggacaggggtgtcagggctcggtggccccgtggcggcccccctgccaccctcccgctccgtgtttaccgtcgccggcgctcagcacctccgcgcccgcctctcgctgctgctcgagggcgcccagcgtcgccagctccgccgccagccgcacgcacagccccctgaagtctgggcatgaggcgccccgcgacgccgcccccgggacacctccatacctgtggggaccgaggcagcgggagggggcggggatgtcactgggaatcccttttcgtccgcgtccagggggcagacctggccttcctgcacccaccagcctcaccgcacacccttttaccccagagccagcaggtcctgggccaccgcggccccctcccacgcttccgccttcaccgcctccatgaaagtgtggtctcggcgcgccccctggcggccggtggcaggctccgccccaaaagcgccgcgcgcacgagctccccgcagcgtccggcggcactgaccaatcggcatcttcccgcgcaggggcttgggtgctcccattggcgcaggaggacgccgaacccgccccggggcccgcccgccccgcccctcggctaacctgtcggggttgtaggaacgccccctggagctgtaaattgcagtgcgttcgggatctccgctgtcaagacaagctggcggcgggtgtcactgttgcggcgacataaaaacaacttcggtgccattttccttttcctccctcagttgtcttctgctggtgttttgttggtttgtttttgaggcagatttcgctctatcgttcaggctggactgcagtggcgccatcgcggctcactgcagtctcgaccttctgggctcaagagatcctcccgcctcagcctcccagctaaatttttaaaaatcagtcagccttggtggcttacacctagtagctgggaccacaggcgcagaccaccgcgcctggctgatttgtttttaatttttttgtagagacaaggtttcctcatgttgcccagcctggtttccaactgctgggttcaagcgatccgcctgcctcggcctcccaaagtgctggaattacaggcgtgagccactgcaaccggccaatttttttttttttttaaagttttgtagaggccgggcacggtggctcacgcatgtaatcccagcactttgggaggctgaggtgggtggatcacttgaggtcaggagttcgagaccagcctgggcacatggtgaaacctcatctctaataaaaatacaaaaattagccgggcgtggtggcacacgcctgtagtcaccactatttgggaggctgaggcaggagaattgcttgagcccgggagacacagactgcagtgagccaagatcgcgccactgcactccagcctggggacagagcaagactccgtgtcaaaaaagaaataaagttttgtagagaggggtctagctatgtcgcccaggtttgcctctaactccagtgttcaagcaatccttccctctcagccttccaaagcttgggattacaggcttgagccagtgttcctggccctgtcctctgctcttaaagcagcccagacggagtggtgttcacccaactctgcctaaaatccaaaacttcctccctcctttccacctcagggtttgaattacataagggacccaggaatcccagcacacccctcacacaccaggccctcctcatcgatcacgatgtgcctgttaggccttcactcctctccctcttaggccttggagtgagcaggtgcaatgcaccatagtggttaagagattacaccctaggaatcaggcaaagggttagggcttgattctgttactcgccagctccatgttcctgccaaattgcttcccatctgtataatggggataatagtacctacctcttagagttgttgctgaggattaattagagtttcatatgtaaaaagtgcttagcagatatatagggagtacttaataaggaataactaatatatatacagcatttaatgtgtactattgggcgaagtatcttatctcttttacagaagagaaaactaaggttgagagaagataagtcacagagtgaattcatggtgatgccaaggcttgaagatgaaattccagactctatactcttaaaccacggaacctatttccactgttactactgctgttgttttgttgctgttgctaagtaaacattgtgtcagatctaatctcttccttactgtatcctggtatccagtagttcctagacaattctgctggaagttgggggtggaccaggagcctggagggaagaacaggggtagaacttgttccttaagggcagatacgagtaaccccataaccctgtttaccccaaggcaggacacttggggggctattttttgacataaatcaaatgttaaaaattgccca

SEQ ID NO: 1560342 - DNA, 4001 bp, Homo sapiens
gccctggaggtccacattacaaacaaaaactgaggttccaggtccagagtcatgaagacaaggacaacaagggtaagtagagtgcacagggcctggctcccacttcattctaatcccaactctgcccttcacttactgtgtgacctcaggaaagttgcttaacctctcagtgactcttctcatccataagagaaaggtgtgatgggttctacctcagatgattttaaggagtagctaaattaatactcagaaagaatatatagtgcctaccacgtgacaaacactgcataaattttttttttttttttttttgagacggagtctcgctctgtcgcccaggctggagtgcgatctcggctcactgcaacctccacctcccgattcaaacaattctctgcctcagcctcccaagtagctgggattacgggtgcccaccaacacgcctggctaatttttttttgtatttttagtagagacagggtttcatcatcttggccaggctggtcttgaactcctgacctcgtgatccacccgccttggtctcccaaagtgctgggattacaggtgtgaccactgcacccggcataaattctaattactataattatttttatggctattactgtcattagattgaacctcacctccttatattatttaaccctctgtgacgtatacaaatgtcagatcatattggtcaaggcactgtcaccccacacaacacagctgccatctctcctctgcattgaggactatgggctctgcagcctgagtgcctaatttcaaatctgggctcatcggcctcttctattcacactgattatgttactgaccatcagttgtcacatctgcaaaatgggaataacatggccatcagccaggattatggaatggattggacaaacaagctgagaccaaagtggggcacagaacatgagctctacggataaacagcccagatcctggccccatggatctagccttctgggtggcccacgggcccctcagcatcctacgcctgtgactctgtcactgtccacttgcccaagtcagaaggctggacttcatctgtgcgccccctgccttgtcctgaatcccacgccttccccacctcccccaagcttccttcccatagccagacatcatgccctccagcttggggaagtgccagcttcttctttcatcccttcacctccagtcctgtccatgccaattcttcccaaaggtgatgtggatagcacactcatctgaccggctctagctcctgctatcgcttcccagttccctcatgaggtaaagacctaagaggctttgcaattacagctatgctggtctcccttgccgcctgccatcccccaagatcccggccactgatctctaaagtgctatcactttcctcaacagagaacagactcagccgtcacctgcaccaggccgctctccctgacccccaaggctgggtcagctgtcacagctgggtcccctgttttcccccatcactctggttcttgaagcaccttcctattacgtcgcaacctgcgtgagggcagcaaccgcgacttcctcgtccatcatcgtaccctctacccacgctgaccgtgcctcaataaacgtttattgcatgaggaacatccgtgcgtctgggccctcactcgtcccacttcccgcccgcacatcccggagtggacacatatacagctaccccaaactaggcctgagggaatttggcttggacgtagagcgcccgtggcaaggggactgtaggtgcaagggcaaggcggtccggcatcacgggcccggctcacctcgcccagcgcctgaaggctcttcacggcgcccaccaccgcctggtgctccatgcccagctcagccgccaactcggcgctgtccaggccgccatcagacgcctccagccgccggagcagcagttccgccacctgaccatccgccatgactccttccagtgtgctcagcgtgtccgggcccgggtgggcggggggagctgagccaccggaaccggaaccggagtgtgtaccgccatcttgaatgtgtctaactgtagaacagggctcaatgtgtcgtcatcttgagtgtggcgacggagccgcaaaaggtgcatgggactcagttcccacctccaccctggctccatcaatggcgtctggttgaccagaggggtaaaattgattatctcaaggtcagaagcaccgccctgttttgagttttatctagcctcacttcgagcgggctgtgtgaccttggacttccccgtctctgggttacagaaccctctgcccttctggtattctctcttgccctaggagaggcggtgggtggtgggctccagagatggtcattttggcgatgtcagctacttttaaaatttcaaaggaaggctgggtaggtaccgtccctttttatagagggaaaaggaattcacctagtaagtcaaggtggcacctaacctgtgtggactacctcgtatgtggtagtacttagcccagaactgagtacttcacgtgtagtatttcatttatccccaaaactttatgatgtagatactgatataaccgcattacacatgtgagaaaactgaggctcagagggtggtatgacttgcccaaggttctacagagagttggtggaaatgaagtcataaattataaaccttccagatcctcccacccctgtgcgctgagagtaacgtcagtgcaaatactgcatggcctagattagcactgtcctatagaaacacagtgcaaaacatctttcttttttgagacagggtcttgctctgtcacccatgctggagtgcagtggtgcaattatggcttactgcagccttgacttcccaggctctaaggatcctccaaccttaggctcctgagtagctggaactgcaggtgcgcgccaccacacccagctttttttttttttttaagtatgggttttggccatgttgcccaggctggtctcaaactcctaggctcaggttatcctcctgcatcggtctcccaaaatgctggcattagaggcatgacccacctcgcccagccagccagaccctgactcttacaaaaaaaaagatgactaataaaatattttgcactcggccgggcacagtggctcacctctgtaatcccagcactttgggaggccgaggcgggtggatcacctgaggtcgggagtttgagaccagcctgaccaacatggagaaaccccgtctctactaaaaatacaaaattagcagggcgtggtggcgcatgcctgtaatctcagctacttgggaggctgaggcaggagagtcgcttgaacctgggaggcagaggttgtggtgagccgagatcgtgtcattgcactccagcctgggtgacaaggcgaaactccgtctcaaaaaaaaaaaaattgcactttttttcatactaaatcttcaaaatctgatgcgtattttacacttacaacacatctcagttcggaccaaccacatttcaaatggtcagtaatcacatgtgggcagtggtgacttacgtcagcacaggtagattagaatcctagatctgctggccaggctcagtaatcccagcactttgggaggctgaggcgggtgaatcacctgaggtcaggagttcaagaccagcttggccaagatggcgaaaccccatctcctctaaaaacacaaaaattagctgggtgcagtgggggtgcctgtaatcccagctacacgggaagctgaggcaggagaatcacttgagcctggtaggtggagcttgcagtgagcagagatcgcaccactgcactccagcctcggtgacagagcaaggctctgtctcaaaaaaaaaaaaaaaaaaaaaaaagaatcctagatctgttatttatgtcattcaaccagaaggtgtagtctttctgtgcctcagtttcttgctcacatggaggtgattggagcccaggttactgtgagaattaaatgcccacacatattcacactgcttactaaattgagt

SEQ ID NO: 1560343 - DNA, 4001 bp, Homo sapiens
cccagtcctcagaaaaaacacatgttcacacaaacttttccagtaagttctttttttggggggaggggggtccataaaccccctgatttaaaatctgctctccttccacagccttctccatctcaaaaatggcaattccatccttccagttacacacccccaaacccttggttatccttgactccgatcacacacccacatacaatctgttggttctgtcttcaaaagcatgtaaaactgtcagcatgtccactgctcccatcctggtccaccacaccatctcctagattacagcaacaagcttcccaccaatgtgcctgcttccacttttgccaccctgaggtctttcacacatcgaagcaaaaagaatcccttttaaaaatgtcagactgcaccacgcccctgctcaaaaatctcccaaagggttcttttctcactcaggctaaaatccttactaaagagctaacacctgacaacttttacaacttcacattctaccacacatggaggaaggttggaagaacgggtatcctccatttatgagggaatcacagaccagaatgcctgcaggcaagccaggatctcagcatacctggcctacaatcccccaccccacttcatcaagagatccccaaacacggaagagaaagggaacttgggagaagggcacagatccacaaatctcctgccaggtgacccccatctctccacacaaacacacacacaaaagaaaaagaaagcctgtactaggaaaacagaccctttgggccatggtggaaattctccaaactcaatgaagcaagttctcacacagatgagtgcgggttgggcaggccagatggaggaagtgctcaggcaccaccgagaaggattctaatgttgttctctttgagaaagataaaggtaacaattagagctaatactattatatgtcaagcactgtgctattttttttaacgtcgcttaatcctaactggcgccattttattgatgagaaaacagaggctcagagaggtaaagccacttgcccaagttcacacagcaggctaagaagctgagcaagagctgacacactgaactgaggcccttctgctgtcaaagccaggaccccctcatcattccaccatgaagggagtggtttcagcagaatctagtggaaaatcttaagaataaaactacttacctcctgtgacaaccacccgccccaccaccccagactaatgccgagcttgttaagtctcgtcccggaggtggaaatcttaatccccaaatctccactccatccccggggatccgccccactgtaagtgcagaaggcgggaaagtgagccgaagagcgccgcacacggccaaccggggagtcctcatccactccggcccactcggaaaagctgggatgcgggataaggggatggtggtggtggcagcgacagggaaggcaaatgggggcttcccacacacagctccaggacccaaggtcaggaactctccatctccgacccaagcctgattcccaaaacacgcccagcgatccaagactccagatgcctgaatccaaactctagcccaagacccttgagtgccgcctcctgcccaatatccaaaatccctattagacggcctcaatgagacgaaccccacgtcaacacccccaatgccaggcccacggccttcttcgactcacgaccgtgacctctgaagccagtcacaaacccctagacctgctggaatcagaatcccccttcccacaggagactggaacccgtgctcagaacccctgcccccaggccaaggccccacccctccgattctggcctggcacccggattcccgcccggcctccgtccctgaccccggaccctcaccccagcctgacctggcttcatggcgagccctggtttgtgcggctccggagtccgcggcgttcacaactccacgagtccggggctttcgcacgtggaaaagagcgcaggcgcgcggcgacgtgcgctgcgtgacgccaccccgtagtcccgcccccgggccccttccccgcccggagctcggcgcacgcgcagtgagcctggattctcgagcctgtcgacacgcaacccgctgccctcgctctctgccttcccagcctttgcctgtgcagcggtcgccctaaactcgcttccggtttcctcttccccaatgcgagcaccccaataatcagggctcatagccttcgcacgggctgtgccctcttttgtattcctagctaaatccctctggcccctgtacacccaaaaaggcttccccaatacatttccagccccaagaacagtgaccgactctgggcttccattcaaacatccgaaaaacatttacagtgcacctcgtgtgtaccaggtgctgttctaggagctgggaatacagcggtgtacgagacataaaaatctccactctcctggagttcatctttttaatggaggaaatagacaccaaacatgttgaatgtttgaaagcgataagtgctttggagaaaataacagcagggaaaggggatagagattttggagggcaaatgatttttgtttttttggcacggtggtcaaggaatgcatcaggagacttttgagctaaagggctgaaggaagtgaggagtgaggcatgcacctatctaggggaagagagttccaggcagggaaaagatctgcagatgcagaggccctgaggaaggaaagatatgggaagttggagagacaatgaggagggtgggtggggcaaagtgagcaaggtggagagtaagaggagataagggcgggtagctaacaagggcagattgtgcggagctttgtgggacatagtgaggacttaggcagtaagatggaaccatggaagggttccaagcagagaaggaatgtgatctgacacaggtccctctggctgcatgtgggaagcagactgcaggagtgagggtgaaagcaggaaaaccaaggactggctgctgccgtgaatcagaagaaaaggatggacagatcagagtgggggcagagagcggcgtcaggggtcaacagattctgcttaagtattaagaattttgggctttgtaattgtgtaatatcagtatccatccctatattcattctgcaaagcaagacaactgctgttatgagaagttaccgaaaaactccagaagaacctaccagtccagagcctagatgttgactctgttccattcactgctctatcactctaggcctaggacagccctctgggtgcccagtaaatgtttgttgaatgaatggatggcctcataccgttgtgagttctctgtgtacagtgttccagctgtggaatgccaccaatttgcacagaaacattcctgaaagattgtttagatattatgatggaaaatctgcttaaacttttcagaaccggtcggggcagtggctcacacctgtaatccaggcactttgggaggccgaggcaggaggatcgcttgagcccaggagcttaaggccagcctgggctacagagtgagaccttatctttacaaaaaataaaaaattagctgggtatggttgcttgcacctgtagtcccagctactcaagaggctgaggcaggaggatcctttgagcccagtaggtctaggctgaaatgagccatgactgcaccactacactccagcctgggtcacagagcgacacccctgtcccaaaacaaaaacaaaaaccaaacaaaaaaaactttttaaaaactatgagatgaaatagttgagtctattctggatttctagatgtgcaatgattccagtgggtccaattccggataatgttacctatttcacatggattttactatttgccttctaattaatatttttcttctaaaggacaaaagtactcagagtgcagtgcagatttaggggattccagccctatttcttggaatcctggcaccatctcctgcttctgagatactttgcctgctagcttgctctgaagacctgaaattggctctatcggtaagtaattag

SEQ ID NO: 1560344 - DNA, 4001 bp, Homo sapiens
aaccccatctctactaaaaatacaaaaaaattagtcaggcaaggtggcgggcacctgtagtcccagctactcgggaggctgaggcaggagaatggcgtgaacctgggaggcggagcttgcagtaagccgagatcttgccactgcactccagcctgagtgacacagcgagactctgtctcaaaaaaaaaaaaaaaaaaaagagactgtggcaataaacgtcccctgcaatctccagtccaggaagaaggaaccctgggcagtgggcaggtggcagcagagactaatactctgggatcacagtcccaggtgtgcaaagaggggagtcccatggggatactcacgctgcccacacacggtgcctgtgtagcccttctgacacagacaggacgccccccggcaggtgcccccattcatacagctcacactgcaccctgaccctggggacaggaaggcaggacgcatagtaatgtggagatgggccccgagatgccctcctaggaaggctgcaggactaggcatgctcagccccgctcctgtccttcaacaaaagcagcccaggctcctcgtggcaaccagaaccctgtgaacttcttctccctcccgcaagaggccgcttcccgctcacctcggctcaccccgcagctgggagccagcgtcccatccgcacaggtgcacaggttgggctgggagcagaagccttcaccgcaggcgcgcctacagatggctggatgagtgcagcgggtggcagtcaagaccaggaccgagcctgggccgtccctgctccattggtgtccgggctggccggaacacctcagtggacgctgctggtcatctgcatccccggctctgctcatagcacaccccacccctgttttcatgggatgtccccccactctcgggctgggctgggcagggtgtgtgacccaggctgtgggttggggactctgctagagccatggggagagaatgctctttgggccagagctgctgagctgtgaggacagagctggaggtgctggggtcctggatactgaggttgggtgtctcctgggaagtggagtcagattccagagacagaaacagaaagagagggtgaggccagagagagacaaacagagagagactcagagaaacagagagagagagaatcagttagatagagagacagtaaccaacagagagaggccaggtgcagtggctcacacctggaatcctagcactttgggaggctgagatgggaaaatcgcttgaggccagagtttgagaccagcctgagcaacacagagacccccatctctaaaaataataataataaagaaaagaaaccaacagagagagacatgagcagagatgaatagagagaggcagagacaaagcaagggaaccagagagacagacagacacaaggaggttgtagggcaaaggaaatgaacatggcaggttggcctggaaccctgaggacagacgcagatgcaagggccattcctgtggttcagccagaggtccctggctaagtccccgtgtaaacagagctgaacctgcaggcaggtaagagtgtccccggcctgtgcccccccacctccagacggcggtagcactcacgtacgacacactggctcctgccagggaatgtcctccagcctggacagcagtaggcatggaaccgggagccgcacacattcggccttcggggacagcgagatgggtctggtgagcccctgcccgtgtggacatccccccgggtattccgctggccccaggacagcccaatccacaccgaaggggtctcccagcatcccaggtaccacgcacccctgcaagatgcctgggctgccccgcctccgcacacgtccaggacctgcagcctccaaggccccgtcccagcggccttggccacctgccatgcacaacagggccgaccaggccagcaggagccgggccagggggccccttgccaaatacagaccctccagagtcatggcgtgtcccctggaggctgcggagaggaagcagagtcagccctagatgagccccccaccctagccatgggggacccaacacaacgaggagggcagggtggttgccaaatggggcagccccggggcctctgggagcccaaggaggcatccagccccaaccgggaagcggtgaacagtcagaggaggcttcctggaggaggtgtgatgttagagaagggtcttggggctgagggtgcacagccaaggcaagacgggagtgggaagtggaagggaggggagagagggccaggtggggccaggtggggccaggcgttgcaggagtgggcatagcagtgtcatgcagcttttgctcattcgtcaaggacaatgaagagcccttgaaaagctttgagtgggaggagcaaggtcagaaatgcatgttaggtggtgtggggaagggcagcagggtcccgggggggaaacagggtgtcagaaggctgggggctgtccagatgggagagagaggagaggaatgggaggctcatgtcgtgggaggtggagggcattgaggagattcccaaagttctagctgggacggtggagcccagagagcgtccagggtaggaggaagatggtaagtcgtggaaggcaacaaccccactgtccctctgtgacacagatacccccactcctgcaatgcctggccccacctggccctgtgtcccctcgcctccacatcccacgccggtcttgcctgggctgtgcacccttagccgcaagacccttttctaacatcacacctcctccaggaagcctcctctgactgttcactgctcccaggtcagggctggatgcctccctgggcagggggcccaggcaggggctggaacttcccaatgcagagagtaaccctgtgcccagcagggaagggaccgcttctgtgcccatttcacagatgcacaaactaaggccatcacaccatgagtgaggggctaagccggagcttaagcccacgaagagaagaaggaggggaagaagatcaggaacggaactcgctcctgccccccttggctgggtctttcctgggccatgaaggacgggagggagaagaccgggacaggagacgaccgtttggagggtggaggcaaaatacttgagggagagaagccagaccaagtggccttcctgttccattcaggttccagggaggaaaggaaccggccctaggtggagaatgggcggggagccctgctgtgtggtcttggccacgcccctctctgggccaacctggttgtccaaaggccccggagaagggagagacccctgtcaacgttggagggttggctggctggagaggggcgccctctttttcttctcagttgtccgggtcagtccgcactctgaggctccgtggactccaagcagcctcggggcttgcaagccctcctcccccactccctccgccccagccccctgcctcgggtcgggtgggggaattaggtggggggagtctctggcctgatttgcctcggtcccccctacacaccgctgcttctgcgagccacaccctggagtttgtggaatgaatgagcagagaaggcgcgcccggcacggggtgtggaggctgagggccaaacagcgagggataccaagcttcgccgacggggagggggcgcccccggagcccgcggggcgcgatctccacccggcagggcccccggccgcgaccacgcttggctccgccctcacctgtggggtcaggggccccgcgccccggccgagcccctcccgccgggtccccgcgcccccactccccactgcggcgggcgccactagaaggcggagaggggagggggctgggcccggggctgcccggctgcgaacaaaggaatcctctccccctccccctgccggcccccccgcccccgccttctccacccttcagcgcccgcgatctcgccccgccgctggccccgcgccttcacctacctgcgaggcggcgcgcgtggaggcgggcacggcaggcggacgcgcgggactcag

SEQ ID NO: 1560345 - DNA, 4001 bp, Homo sapiens
tactttccccgggtccctcccacaacacgtgggaattctgggagatagaattcaagttgagatttgggtggggacacagccaaaccatatcatgaaccaagagagaaagaaacatgttttaatgaatcttctcaggcggctgaggcaggaagatggcttgagcccaggagatggaggttgcagtatgttatgattttgccactgcctgggtgacagagtgagatccatctcaaaaaaataaattagaaaaagataaactgcagagcataaatgttatgggctacttttgacagaggaatcaaatcttccttgccaaatttagacccgtgtgggtcagcagaaattgactagaaatagtggccaccgaatggtaactcacaagggtagcagttaaagttggtaaaattttaaatgcacacaaaaccaatggacgaatcaacttttcctcgcaaaaccaacaactaagtttcaacaactgagaaaaagtttcatattatcaggccagacactgtggctcacacctgtaatcccagcactttgggagactgaggttgggggacagcttcagtccaggagttcgagaccatcctgggcaacatagcaagactctgtccttaaaaaaagaacttcaaaagcaactgtattaaagggagttacagatggatatatacagtaaaattgtttaaaagtagaacactatctaaatagtagaacagcattacccgaagttcagaaatacattactaacactataattgtttttggacacacacatatgaagtaacgtaaaaggaagggtgcaaattcactttataatagcaattatctatgaagacagtttcaaaaagggcaacaaatatatctataaatgttttgagccagttgctgtggctcatgcctgtaatctgaacactttgggaggctaagtcgggagaatcacttgagcccaggagttcgagaccagcctgggcagcatagtgagactccgtctctacaaaaaataaaaaattagcaggtgtagtggcgagcgcccgtggttccagctactcaggaggctgatgcgagaggatcgcttgagcttgggaggtcgaggctgcaatcgcaccactgcactccagcctgagcagcagagcgagactctgtctcaaaaacaaaacaaaaacttgataacatagtcataaattagcatttatcgaatgataaatatgtgccagactgttctaagccctttccctgcgtgatctcagtgaagtcccataatagccccgtgaggcaggtactgtcctttatccccattgcagggatgaggaaattgaggccctgaggtcgaagaggagctggtaagcgatgatgccgagataggccccggatcgcctggctctaaatccccagcccgggccccgacacacagtcccagggtgggagaggtggtcttcggggtccgggcaccgcgaccgcggcccaggcccgcccggccagctgcgcgtaccgtgtagagcgtcaggtcgacatgtcgccacagccaccggtcgtccaccagcctcttccagcggtgacagaccctgggggaggggacgcgcggttagaacgaccccagccccgggccacatcgcatctccaggtgccagctgcgccctccgccctgcccttccccccggaggcggggccgcacctggagatgcggatccggtcccgtaccgggaggtaagagaagatctcgagcaggaccgagtccggcagttcgaccaaagtcgccatgatcccgccgacacgcacttccgcttccggttaaagagacccgaggggtcctgggggcgccgaggcggctgacagggcggcggccgcgaccttcccgtagccggtcgagaaatttgaccttcctctcgctgggaagtgattcggtcccagggccggaccagccgcggatggggaccagaaaccagcctggaaagcgtggctgaggcagtgagaggcttgcgggaggtggctgaggcgtgatttggccgcgactgggaactaagaccaagtccagaaggcggggctggagtgaggcgaagctcggaggcggggctagagacgaggaccaagtccggaaggcgtggccggggtggggtgaggatcggaggcggggctagagaccaggaccaagtccggaaggcgtggctggggtggggcgaggatcggaggcggggctagagacggggaccaagtccggaaggcgtggctggggaggggcgagacccggggacggggctagaggcgaggcccaagcccggaaggcgtcgctggagttgggcgaggctcaggggcggagccagagaacggaaccaagtccagaaggcggggctggggcgcggctagggggcggggctagagacgaggaccaagtccagaaggcgtggctggggtggggcgaggatcaagcccggaaggcgcggctggagcggggcgaggcctaggtggggctgcagacgagaaccacgccttggaggcgtggctagggcgggtagaggctcggacaaccgctggaaggcggggctggggcggggcgagaccttgggggcggggttgacgacgaggacctagccgagaggtcgtggtctggacggaaaccaggctgcagcaggaccaggcgccaagggcgtggctggggagcgatggagacgctcggaaggtggggagcgggggacggagacagggagaagactacgccatgaaggcgtggttgaggcggggcgaggcctgtgggtctggccccgagcgaatggcttggtagagagtcagagaactctatttttttacttaatgatgcttcttgatgtctatgcacaaggataaatttgtattactggaatatcgtggccaaaggacctgttgaatttttcactttcattgatactacagatattttctgaattggcaagtccaccaagaaactataaaaatgtgtgtgtgcaatggctgcacacagcagcttccttggtagtgtacgcagcctgttggttgtatgggttgctctaagggaccttggagacaggcctttccgatggatgttcatgtttctaaccttgcactaccacaatgtaggctccaaacaggcatgtgaggtgcctttggaaagccccagggcactgtggccagggttgacattggccaagttatcatgtccatccgcaccaagctgcagaacaaggagcatgcgattgaggccttgcgcagggccaagttcaagtttcctggccgccagaagatctacatctcaaagaagtggggcttcaccaagttcaatgctgatgaatttgaagacatggtggctgagaagcggctcatcccagatggctgtggggtcaagtacatccccaatcgtggccctctggacaagtggctggccctgcactcatgagggcttccaatgtgctgccccccctattaatactcaccaataaattctacttcctgtccaaaaaaaaaaatgtgtgtgtgtgtgtgtgtgtgtgtgtgtgtatatatatatatatatatatatacacacacacacacacacgcacgcctcctgaagccaggaggcggagattgcagtgacctgagatcgcgccaccacactccagcctgagtgacagagcgaaactccgtctcaaaaaaaaaaaaaaagaatatgaaagagattgtggaggttgcagtgagcccagatcgcgccactgcactccagcctgtgcgacgggtgcgagactccatctcaaaaaaaaaaaaaaatcatgttactgcaaaggacatgatttcattatctttttttttttttaaatttgggacagggtctctctctgtcacccagtctggagtgcagtggcgaaattatagctcactgcagccttaacctctggggctcaagtgatccgatccttccacctcagtctcccgagtagctgggactgtaggcacatgccaacacgcccggctaatttttgttttgttttttgagatgaagtcttgctgcatcaccc

SEQ ID NO: 1560346 - DNA, 4001 bp, Homo sapiens
caaaaaataaaaaaattagtggggtttggtgggggggcgtgcacctgtagccctagttactcaggaggctgaggtgggaggatctcttgagcccaggaggttgaggctgcagtgagccatgattacgacactgtactccagcctgggcaacacagttttgatttgatttgatttgatttgagacagggtctcaaatatatatgtgtatatatatatatacatatatatatatacacatatatatacacacatatatatatgtacatatatagtttttttttttttgagacagagtcttgctcttgtcacccaggctggagtgcaatggcacaatcttggctcactgcaacctccacctccagggttcaagcgattctccttcctcagcctcctgagtagctgggattacaggcgcctaccaccacgcctggctaatttttgtacttttagtagagacggggttcatgttggccaggctggtcttgaattcctgacctcaggtgatccgcccgcctcggcctcccagagtgctgggattacaagcgtgagccaccgcgcacgcccggcctaaaaatatattttttaaaaagaagctccttagccaagccttacaaaaagagagtcaacagatactaggtatatttaatggaacaataaatacaagttaaaaaaattattttatgttagaaaagtagccaatagagaagccgaaagtaatgtcctgactatacagggaggtgattatatagggaggaggaaaaccacggagatgatcaaagttgtctcctatttttagcaagggatccatggacgcgttgtctaaaagttgatgaaataagaaataacaatccaaaaatatgctgtaaagatttggaaatagataccagaggaataaaaagtggaaaaagttaaaaacgaggcaccagcgatcacgagttacttcttgccatttttgaaaagtaatgtagttaacaaaaaaatgtatttggccgacaggggttgggggcggtggtgagggagaggttgttgtttaaaggcgtgttgttttccatgcaaagctctgtcctgtcctacgtgtctgagtgtcgtgtattactggaacatttttaaagaagtattatttattttacaactagactcccataatatttgtctttcaaaatatggagtaaatagacgctgtctaaagttgaagaggcagtatacagagctttcgaacatatcactgaacattgcaaaagtaacttggcagaacaaaatttaaattgagggttggggccgcagcgaaacacataatgtgcccaagttgctaaatcgagaaaccgccctccaaggcttctgattcacagattctgcgaagggactgacggccagaagacagaaaatccagcaacggtaaaaagcggcctggccttccccgggctgttgcgcccacgtgttggtttgcagcgtttggcaggggttttggatggtggcctccgcggacgagcgcagggatggagaggcctgggcgttcgaacacccacgttcaaagcaaagcccttccagatttagggctttctaacgtgcatttgtataactttgggtttaaaggagcctcaggccgagggagggcccgggaaagcgacgctgcgggttatgggactcccagggacccgcccctccgggcagggcctggcgcgggaatccttcccggggcgccccagctgtgggcgagaacgggactgacgcttgggtcccgacctgggtcccctacctgtcccggcgctcacctggcgggctgctcggaggcggcagcggcgggctaagcttccctttcccactttgttctgggaggcagtcgaggggctccccgtgatcggcgtggcccagggggccccgggaccggcggtctgggcggtcggtcctctcccggggcgtggcggctgcagcccggcgccgggggcggcgactctgagatccagcgggcgggggcgggaggccgcccctcctccggctgcggggcccagcgggagcgagggcgggcgggcgggggagcttggagggctgcgtgcagcgagggggaggcccagttgccgcgaggccagcggggagcggggccagccccgcgcccctaggatccggggcccacccctgggagagccacctcctctgggtgtgcgagttccacatccccaagacgcccccgcggggggactggtcctagctccccacccccacccaaattccgtttccttctggtcctggcctcctgcttgcggccgtctccacccctcacatccatgggatcctgcacaggtccacggttggtaaaccgcttagctgtgagcccgacccagggcctgattcgaaacacttggatcaaagtccctggccacagggattttcttgtatttacgttgcttcccagggccagattctcagaagcccggggctgatcttaaattaaatcccttcaccacacgcactctctgtggcaatgacaaacctgtacccttccaccttaggactcccctgtcctccccatccccccagctatagacaactgaattaatccggaggttcagtttcggtcaggctggggccgcgacccattttctccctttacctctgcccttgggtctttgcagtcccttctgatggccctagattgcaccagggacctcaaggtgactgatctcagacaccccagagctagttttctggaagccaggcctcccccacgctggtaaatcattctccaggcccactggctcatatctgccactgtgctaaatgctttgtatgcatgacctcctcatggacgcctctcccgagaaactgaagtccagagatacctggtctgttgcacgtagtccaagtcgctagcttggaggggtcacacagccagagagcctggattccctaaagccccttcccctagaaacctcagccaggccccacagcgccatcgtgaggacggcgtgagactgcgtgtgcagcgcggagcacagtgctggactcagagccaacgctaatttgactactattacattatttgtaacaaccgcctttgaaagcattttctgctgtgggttgtaaaattactgtattattggtagagtttttagcacagatccacacgcagttccttatgtgaaaggcgtaggcctaggtttgttttgcattccggattttggggggtttatttattttattttagttttttgagacggagtctcgctctgttgcccaggctggagtgcagtggctagatcttggctcactgcaagctccacctcccgggctcaagcaattcttgtgcctcagcctcccgagtagctgggattacaggaacgcgccaccacgcctggctaatttttgtatttttagtagagagggggtttggccatgttggccaggctggtctcgaactcttgacctcaggtgatctgcctgtcttggcctcccaaagtactgggattacaagcgtgagctaccacgcctggccgtaagtagccatttcttcatgctgctcaattctctgacatccaggggcttgcatatgtagggacaagaatactaactaatctttgttctttgataaaacattaaacagttgttcctctaagtcttcctcgaaaccagatttccctaatcatttcaacattccttccaaaagccatcgcttaaagccttcccaaatctaatgtcagatgtttgcgattgttgtaaataccttaacaaatagacaaagcaattgtgtgttattataatgattacaaagctaatgcatacttgtgctgacacgtgtcaccagtgtgctgatacccatggacttgagcttgtttctttattgttattattacaaaaagtggaattgtttatttttcatttattgatttatttttgagtcagcgtctggctctgttacccaggctggagtgcagtggcatgatcacagctcactgcagccttgatctcctgggctcaagtgatcctcccacctcagcccctcaagt

SEQ ID NO: 1560347 - DNA, 4001 bp, Homo sapiens
aggttaattttagaccgctgagataatatgcaaaaacagcaatcatgtagtttttaaaactaactctgggattaaagaagtatgtaaacaactatgttttgtcaaagattttttttttttgagacacagtcttgctctgttgcccaggctagagtgtgcagtggcacgatcttggcacattgcaacctccgcttcctgggttcaagcgattctcctgcctcagcctcccgagtagctggaactacaggcgcccgccaccacgcccggctaatttttgtatttttagtagagacggggtttcaccatcttggccaggctggtctcgaactcctgacttcgtgatccacccacttcggcctctcaaagtgctgggattacaggtgtgagccaccacgcccagcctgttttttcaaagatttataggggcattgtgacccaaccaaggacaaagaagtcatcaacctcctcggaccctagctggcactcagatgtctgcagtggtcacctccttatttttattattattacttttttatggagctagaaaccaggactatagcctctacctcctgggctcgagtgatcctcctgcctcagcctcccaagtagctgggactataggtgcatgccactatgcccagctagttttttattttatttattgttttgtagagatggggtctcactacattgccctggctggtcttgaattcctgggttcaagtgatcctcctgcctcagcctcccaaagtgctggaattggtatgagtcactgcgcctggcctgttggtcacctcttgatcacaatgcccttctcttccctctgcccctaaaaaaaaaaaaaattgtactgatttaagatggtactttaggatgatagtccactgtgttctcggtttgctggctctccaaataaacttgcttttcctcccaccaactgtcatctctcttgagtttggctttctatttttttttttttttttgaggcagcctcactctgtcacccaggctggaatgcagtggcccgtctcggctcactgcaacctctgtctcccaggttcaagtgattctcctgcctcagcctcccgagtagctgggactacaggaatgcaccaccacacctggctaatttttgtatctttaaggagagacagtttcaccatgttggccatgctagtctcgaactccagacctcaggtgatccacccacctcggcctcccgaagtgctgggattataggcttgagccaccacgctcggcccgagtttggctttcttttctgaaaccgagtcttactctgttgcccaggctggagtgcagtggcacaatcttggctcactgcgacctccgcctcccgggttcaagcgattctcctgcctcagcctcccaagtagctggaattacagatgtgtgccaccacaccgagccagtaatttctgtagtagagatggggtttcaccatgttagccggctggtctcaaactcctgacctcaagtgatccacctgtctcagcttcccaaaatgctgggatttcaggcgtgagccaccacgcctggcctgagtttggcttttgagtgttgagcggccaaacctcagtcgggttacagacccacaaggaaacccactgcggaagaaaccatttctaccccataccccaatgtgtgccagctactgtgacctttggaacccatgacccatcttcaacaaaatctcttcttgcctcagttacttctctgaacattcctaccaccttcttgctctaactggaacccagctctcctgtgggccttccaagtggggaggtctccgtgctcctgggagctacttcctgaccattctccctccaccctccccaaaacccccagcgatgaatctcatcactaccttgcttcatgcgtcatctgctgacccagatcatgactcctctcttctccctaattttagctctgggctcacggccgctcccgctgctcttagcatcattctcagtgatttctataaccagatagttcttccgcagccccaacctctctgttccctgacctctctctagtgactttttccttccccaacatctccctctcgtggtcaaacccagaccttgtttgaataacagcagcctcttcagaacctcaatctcacactcactctccacccatcactttttctttccacctcattccctccagtgccccactcgcatgatccttccaacccactgtgatctcccatccgttgtccctttcatattttactccccctcaccctcccatgccctcatttcttccttagccagcttaaattccatggttaatcattaaaaacattcttgacctggcacgctggctcatgcctgtaattccagcactttgggagggcaaggtgggaggactgcttgaggccaggagtttgagatcagcctgggcaacacagcgatactccacctgtacaaaaaataaaatgaaaaaattagccgggtgtggtggtgcacacctgtagtcccacctactccagaggttaaggtgggatgatcgctggagcccgggagttggaggctgcagtgagctatgattatgccactgtactccagcctgggcaacaaagcgagaccctgtctctaaataaaataaaaagaatagcaaaaaaagtggggctgtagctagaaggggaggtgaagtcaagagagggtttgggctgggcacggtagctcacacctgtaatcccagcactttgggaggctgaggtgggcagatcacttgaggtcagtagtttgagaccagcctggctaacatagtgaaaccccatctctactaaaaatacaaaaattagctgggtgtggtggcgcacctgtaatcccagctactcgggaggccaaggcaggagaattgcttgaacccaggaggcagaggttgcaatgagctgagatcgcaccactgcactccagcctgggcggcaaagtgagaccctgtctcaaaacaaaacaaaaacaaaaacaaaaaaagagagagggtttgttttgagatgggagacaggatgctgtgtgggctaacaggagatccagtgcatgggggaaactgaatgagcagcagagagaggtgagaaccagggacggtggctggaagtgggcgggaaggtgggagcaggtgatgggacagtcacagcaggagaacgggtgtgggcaagggtgcaggtaggtggtagaggcgggggtggctgtggaagttcacttctcatctcttgcattttctctgcaaaataagaagccaagggagagtgaaagggggggaggaggtgttggaaaggattagaggagaagggaaaaggtgtgaattagttgtctagaagacaggaggaaggaggggatcagagaaatgtcatatggctgccaggcagcattggggtccgcctgagggtcaagttcacagacttgaaattagcctggccagggggctgtgttgttttttagctcactcaagctgtgtgggtgcaggcacggcagagaggaaggctggatttaaccagggtctcatgcaggaggaagccaaagtgggcaagggtgtgtgcagagaatgtgttattttttatttatttacttttttgagatggagtctcgatctgtggcctaggctggagtgcagtggcgcgatttcagctcactgcaacctccacctcctgggttcaagcgattctcctacctcagcctcccaagtagctgggattacaggcctctgccaccacgcctggctaatttttatatttttagtagagacagggtttcaccatgttggccaggctggtctcgaactcccgaactcaggtaatccacctgcctcagcctcccaaagtgctaggattacaggtgtgagccactgcgccgggccgagaatgtgttttttttttttttttttgagacagagtttcactcttgttgcccaggctggagtgcagtggcgcgatctcagctcactgcagccttcacctcccaggtttaagcaattct

SEQ ID NO: 1560348 - DNA, 4001 bp, Homo sapiens
gctaattactagaactgtgagtgtgtttttcacttcacctccctgaacttcagtttcttttctttcttttttttttccaggactgagtctcactctgtcgtccaggctggagtgtagtggtacaacctccacctcctgggttcaagtgattctcctgcctcagcctcccaagtatgtgggactacaggtgtgcactaccaggcccggctaattttttttttgtatttttagtagagacgaggttttgccatgctggttgggctggtctcgaactcctgacctcaagtgatctgcctgcctcgaccccccaaagtgctgggattataggtgtgagccaccatggctggcctgaacttcagattttttatctgtaaggaggggttaggaggcctaaattaagtcacccataaaaaggccatgtcacatgcagtcagtgcttagcaaggggctattttaatcgtcacactcaccagtcagagacacaaatctcaatcctgccactatccagcagttctggccacagaccctcctcctctaggtccaagacctgcttcttgcaacaccagctgggaatgcaggagacagggtaatgagaacaggcaggcctttctcaacaaggggccggacctttggatagcaggggcattcacctgaatgaagtcacgaagcacgtctgagaaggggccccaggcacggttgtcctgttttcctccaccacccagccgtccccaccgtgttgcaccatccactttcggaggccttctgtgaaataaaaaaggcttgtgcccaagttccagtcgcccgcctgttggttcctagtgagaccccgcccctagcccctcccacgtgctcacagtgcagctcactcacctgacccttcccaccgaggccccgcccccttcccctcccaccagctcagggcaaagccccgctcctctggcccttctcactgatttgcagcaaagccctgcccctccaacccctctctcgggctcccagaactgccccactcccacccctcccacaggcaaacggtgaagccctgcccagtcagccctgcaccctgcgtgccaatgctgcctcgtccctccgacacctcccaccggctcccaatgctgccccgcccctccggcacctcacaccggctcccaatgctgccccgcctctccgactcctcccaccggtcccactgcggccctgcccctgcggcccctagtaccggtcccagtgcggccccgcccctccggccccgctaccgctcccactgtggcccagcatcctggacttcctcttccgagatcccaccttggccgcaggggttgcgaataaggttgcgtccgatgggtctgcgcgcgcagaagcggcccagggggcaaggcctggcgttacgggcgggagactggcagctgcgggcgaggtgcagcagcgcgcggccggtggcgccgtggtcgcgggccaggatcagcagccacagggcctggccgtccaccagggctcgccagccccggcacacttggcggcagcgcccgagcagcgtgcgcggggggacgtggctcagcaccaccagaagcagctctgggggtagttggctcaggtccagcgcctcttcgggttccggctccggcgcggggacccgggcggcccggcccctggagaccgaggcgcccatggtccccccgccaggcccggctgtggctgcgggagaggaagggtcaaggcgtcagggaccagcagcctccgcggcgcgcagcctctgcctgccctgattctgccagccgcacccccgtcttcaccatccctgggccccgtccccaagtccccatcccccagcccgtccttgatagccccgatatcccggagaccccgcggtctgtgtgtatgccccgaattgcatgcaatcagcccccctcggcggccgcaccgacaccgcaccccaagtcctaccccggggcctggcggcgctcctcgccgggatgccctagctgtgccgcaagctccccacgcccctctgcgtcctttttactcgccggcccctcccctcttactagccagcttcacccacccctgcatcctctttcttactcgccagcccctcccgcctgctccctcccgctctccaaacccaacctgcttcccgcgacggggccaggtgcagccaggagccaaggcctgctgctcacagccgtcccctccagccggccccttgaagtgtccctaattcgttagtagcaatgagacgtctggctctgagcaaccattgttattttggtcaggcttctgagtgggaggcctcgtatccgttaacgtgttaaaaaatttccatcacctttaaggtcgggcgtggttatcttcatttcacaggagaaaacaggctccggctgctaaaaattaatgcaaccaatagtaacaccagccaacttttatggacggttttactgccagccagggtggcaaccccatgaagtaggtgctgttatgccctttacttcacaggtgaaaaaactgagaccagcagaggccaagtggcttgtctatgatcaccagctagtagggatttgaatccagccagcctagctccggaattcctcattttaacctctagatcagctctgtccaataaaaatacaattgtggctgggtgcggtgactcatgcccgtaatcccagcactttgggaggccaaggcaggcggatcgcttgaggtcagaagttcgagaccagcctggccaacatggtgaaaccccgtctctactaaaaatacaaaaattagctgggcgtggtagcacgcgcctgtaatcccagctaatttggaggcttaggcaggagaattgcttgaatccgggagggggaggttgcagtgagcagagattgcaccactgcactccagcctgtgcaaaagagtgagtgagactccgtctcaaaaaacaaacagaaaaaaaaaattgtgaaagttgatcatgtgaattggatccttcttgtcatatccaactaaaacaaagttgagaggccggggggaaaacacttagggcagataccattgctccaagaaagtgattctctgcaagcctggctgttaaaactgcctgttgtaacctggaagcagtctaactggtactgaaaaaacctgccgtgactctaagactagtttttccctctgctgtcacttaccagtcagaacttgccagctccccagaacgttgctagtgtcaatgaactttcttgcaaaacaatacctaacatttctgtttcttataaaaacctctaacctctttgttctttgaaagttctgaagaccgcctggtctgtgtggatgcctcgaatgtcaattcttgcttcccaaataaaacattttattatttttttgagacagagtctcgctctgtcgcccaggctggagggcagtgatgcaatctcgtctcactgcaacctccgcctcatgggttcaagcgattctcctgcctcagcctcccgagtagctgggattacaggcgcatgccaccatgcccagctaatttttgtatttttagtagagacggggtttcaccatgttggccaggatggtctcaaactcccgacctcaggtgatctgcccgcctcagcctcccaaagtgctgggatcgcaggcatgagccaccgcaacaaaacattttaaatcgagagatttgtctctatatctctatattttatttggcttcgacataacgtgagctgtatacatagtttaagacatcaacaaacaaaaccagacatggattcttccccacaaagaacttaccttctagagggagagacatgataaacagttggcataatgagcaaattacgtagtatcagggaaataattaaatataaaacctccaggccgggcatgatggctcacgcctgtaatcccagaactttgggaggctgaggcaggcggatcacttgaggtcaggagtgtgagaccagcctggccaaaatggcgaaactccgtctctactgaaaatacaaaaattagccggg

SEQ ID NO: 1560349 - DNA, 4001 bp, Homo sapiens
gggacgctggggcgggcagatcacctgaggtcgggagttcaagacctgtctctactaaaaatacaaaattaaccagacgtggtggcgcatgcctgcaatctcagctactcgggaggctgaggcggagaattgcttgaacccgggaggcggaggttgcggtgagccaagattgcactccgcctgggcaacaagagcgaaactccgcctcaaaaacaaaacaaaactaaacaaaaaaccataaaaataaatatagggccaggcgcaatggctcacgcctgttaatcccagcactttgggaggccgaggcgggtggatcacctgaggccaggagttcaagaccagcctgaccaacatgcagaaaccctgtctctactaaaactacaaaaattagccagggcgtggtggcacatgcttgtaatcccaactactcaggaggctgaggcaggagaatcgcttgaacccgggaggcagaggctacagttagccataccactgcactccagcctgggtgacagagggagactgtctctaaataaataaataaaaataaataaaagacttgcctaaggtcatatagcaagtaaatggcagaactaatattctagactgctttgttcgctgtctctactcatcacattgtatatttcagtatggagagaggactaaattatagtgctgaaagcacagattctgagccaggctgccaagatcggaatcctgagtctagcaattaatgctggatagccttgggaaagttgcttaatttctctgtacttctgcttcctttctgtaaaatggagaaaataacagcacctacccctcaggggtgttatcagaattaaatgagttaatgtgtacaaacagctaaggacagggccaggcattttgtaaaacaataagcgttagctgtaatccacagtggggagcccctacatgcttctgagctggggtgtgtgcccagatcagtgccagcttttgagaaaacgcctctgggactggactggaaaggaggaaatccattagcacctgtaacccagtcacattccgggggcggagaacttcccaccaacagctctgagactgaaacttcacagcccagctctcccactaatagtaacgattttaatgactccctttaaccctgttctcagaggcatgcttgctgttcccatactacagataagggcactgaggctcacagatttgtccatggcacaaaggggtggaagaataggggatatgaatgctgtacttctcatagggataaaccattacactcttctaaattccaccggggaagtgagggtgcgaaagcctgtctcgatggccctttctggccgtattatcctacagttctgtgcctgtccagcttaccgggagtctctggcgggactagggaaattatcactacatccaggcccctaatttcacgctccttaccccaccctcagtcctggagcctaaacccacactctatcctaccactgatttctccctcctacctcctcaacttgccttcctgcccccaatccgatccagaggccccaacccattgcgtccaccgttcgcctgtcccttggagcttccagaccccctcactcatcctaaccctgatcctcataccctcgccgcaggttaagcccccatcgaaatcgaccccttcagggcctctacctggatgtccagcccagtctccaactcggggcccacttccccagctctgagcccctttacaatcaattccaaagctccactcccaccccacctccaagacccctccccaagccaccattcttctactactacctccggctcccattcctcccagtcctctcccccaggcaatctcccctcacccagccccttctttcgcccctgcctcttccccctcgtcacccggtcccgaacccccgtcccgactctccagcgcccccggcccgcgcctgggctctcaccatcgccgcgcgctgcatctccctcggctacgcgggtttcccccactcgctcctctccagcctccccttccgggttctcgtcccgaagcccgctgggaattgaagtccgggcagccacggactacatcccccagaaggcagcacggtcaagcttggaggtggggtaggaagcaaattaggcgggcggaggaaaagaacgactcgaactcccgggagacaaagccggggaggacttggcagcgcaagcgcagggtgcttccccgctgggcgcgctgggagatggagtctagccaggagggctccatttttgcccgaggcccttgggaagggaattgagaatattgcaatagggtgttggtgaggggtggagagttggggaagagcaaatttattgattcatttgtgccgatcaacacaatagctaacagctccttgtgcttttccaaactccttcccatccatccccttctttttttttttttttttgagacggagtcttgctctgtcacccaggctggagtgcagtggcgcaatttcggctcactgcaacctccgcctcctgggttcaagcgattctcctgcctgagcctcctgagtagctgggattacaggagcccgccaccacgcccggctagtttttgtatttttagtaaaaacggagtttcaccatgttggtcaggctggtcttgaactcctgacctcatgatccacccgcctcggcctcccaaagtgctgggattacaggcgtgagccaccgcgcccggcccgtcccctcctttcttacctcctgatttacaaatgagaaaattaagccttaggaggaaggaaagtcccatacattaggagttagtccacatcatagaatagcagctccacatcgctcgagcccaggagttcgaggcagtgagctagtgttacaccaccgccctccatgcagttcagcctgggcgacagaatgagaccctgctgcctcttaaaataaaagaaggccgggcgcggtggctcacgcctgtagtcacagcactttgggaggccgaggcgggctgatcacaaggtcaggagatcaagaccatcctggctaacacactgaaaccccatctctactaaaaatacaaaaaattagccgggctgggtggcgggtgcctgtagtcccagctactcgggaggctaaggcaagagaatggcgtgaacccaggaggcggagcttgcagtgagccgagatcgcgccactgcactccagcctgggggacagagcgagattccgtctcaaaaaaaaaaaaaagaagaagaagaagaagaagctccaggagggcagagatctttgtgtaccttgttcaagcacctagaacagcgtaaacatgtgttcagtaaatatttattgcatcggaactatatgccagacaccctacagacaaccctggtaggaattacaatcccaaatttataaggcagaaagagattaagcctcttgtcgctggcaacacagccaagaaaacgatttgaactgaaatgtattggatttcagggtttctactcttgactaggtcgttagatcatctccccttaagacgtattttccaggctgggtgcggtggctcatgcttataatctcagccgggagactggctttagtccaggagtttaagaccaaactaggcagcaaagtgagaccctcgtctctaccaaaaaaaaaaaaaaaaaaagcccaaatcttttattctttttctttcttttttttcctttttttttttttttttttttttgagacagagtcttgctctgtcgcccaggctggagtgcagtggcgataccagctcattcaacctccacctcccaggttcaaatgattctcctgcctcagcctctggagtagttgggactacaggcgcgccccaccatgcccggctaatttttgtatttttagccgagacggggtttcaccattgttggccaggctggtctggaactcctgacctcaagtgatccgcccgcctcgtcctcccaagaaggcccaattcaaatggccctcctctttgaatcctttcc

SEQ ID NO: 1560350 - DNA, 4001 bp, Homo sapiens
gttggactccgtccccagctgccgcaggtcccacaagttgacgttgcgatctcgggagcccgacagacagagtgacccaccctggaaagggagcaaggtgatgttgtcagggccaccctggcccaccctgcctggccccccacagaccccgtctcacctggagcagcagcactgagtcaacggaagccacgtggccttcggccaggcagaagtattcgacccagcgcccatcctctgcccagcgggacaggtgctgctccagcgcaatgcaggctgccggccagtcaaagttcttctctgtgggttaccacgagtagggtgcccagtgggcagggaccctagcacccatgccagctggccaagcccaaccctggcttccagggagcccacactacaccagacttggacagaaccccatggagatccctactcccaccccaagccgacccaggctgtggtcttgggaccacctgcctgcccatttcccaggcaggtctaggactactcactccaatttccagaaattgggaactggggtctcagaactacctctccaggcgccatcccccaacccaaactcagggcagagcagtctcaggatgttgaggtctgacctcaggctcagcatagaagctgggacctcatgactaacccttcctgcctcagccatctgaaccagaccaagggggctgtttctcaaacagtatctggaaaccagggagccttgtcaagatgcagaatgcaagccccagatgcagattctgtgatatggacggggtccaagcatctatgtttattaagctgtttgggagagtctgacctgggggttggatggcaacaccttgagaatcactgatcccggagtgatcctgattcctctctaagcagaatcaaagcttccaggttaagggtatcaaacacccaagctgtaatacatcttggcttaagggcctgaggatccagctgtatcaggatcaacaatatcgattcaaaggtcccaagctgtcttccctcaggaaccaatcaactcagggccaagagccactgtctcacccctaactgggtcaaggctctagggctcaggagttttgacatcaacaggtgctgtctcagcttctaagctggactcagaacctgaggatccttgggctcactttgagccccagcataaactccagagcctaagacttcaagtccctgtgtcaatccccaatcaggggtcagtggcttagtaccacaagaccccaagactgaggatatttggatcctgagtcgtccaggaaccacagccccatgttagggtttcacagcctcaggaccccaagtgcctgactgcctcgtggtccacccagaggtcctcaggggcttcggcaccaccagtaactaccttagcctccagcctgagccaggacagccacgaagcctgcaccagaggctgcatccggaacaccccatgtacctcttccccgccccaagcctgacctgggcgggcgcccccggcccccggtccccggcccccggccccgcgcaccttccaccactgggtagggcgcgcgtacgcggcgtagcgcgcgtagcctccaggtgacatggtcagacacgaggtcgcggagcgcgtggcacacccgcgacaggacgtggagcacgaggcgggcgtccaggtaggagcagatctcgagcagcagctccgggggaaggctcagaaggcccggctcacttacggccgaaaccctggacgcggcccgaggctccgaagcgctcggggacgcggcgggtgtggatagctgcgaggggcgcgagaacgccagcccggattttggcggactgagaacgcgggccacgtaggccttggcctgcgcgtctgggtctgtctctgactctgggtccgagtcatcgtcccaggtgcgggaatcatcgcaccgccctaggggaagctccattgcgaccgggtgggcgctgccggcctcgcgtcttgtctcctaggcagcacgagggcacttccggcgctgtctgatgacgtttatgcgcccaccggaagcgacgaagtcagacactggcttaatacagaacatcgccccgcttacagggtctcttgcaactgcgtcggccttaggctggaaaatgcaggttcctgtttctgcgctttttaaactagccgataccgagagccagccaactctagctaaaaacgaaactcaagccaggcggggtggcgcgcgcctgtagttccagatactcaggaaggtgaaggggtaggatcccttgagtccaggagttcgagactgcagtgagccatggttgtgccactgtactccaacctgcgcaacatagtgagaccctgtctctttaaattagacataaaataaacactgctttaacgaaggcatctgttatatgtgacactgagcttagaaacccaaaggcccctttccgagttcaaggagtagagattggaactcttgcctcttttcccagagccagaaatatgcagttacactgcagaggcatcagttaagtgactttttttttttttttttttttttttgagaaaggaactggggcctcagaactacctctccagaccccattccccaacccaaccttggaggacagcagttcagtcctccaagcggagtgcttggctcattgcaacctccgctttctggactcaagtgatcctccacctcggccccccaggtagctgggactacaggcgcgcaccaccacacccggctaatttttgtattcttttgtaaagacagggtttcactacgttgtccaggctggtctggaactcctgagctcaagccatccgcccccaacttggtctcccaaagtaccaggattacaggcgtgaaccatcgcgcctggtggaaagctacctttttcttttttctgagacggagtctcactctgtcacccaggctggtgtgcagtggcgcgatctcggctggctgcaacctccgcctcccgggttcaagcgattctcctgcctcagcctctagagtagctgggaatacaggcacgcgccaccactcctggctaatttttgtatttttcagtagagacggggtcgcactatgttggccaggctggtctcaaactcctgacctcgtgatccgcccgcctcagcctcccgaagtgatgggatgacaggcgtgagccactgcgcccggcctaacatcacacttactaaaacagcatgttggccgggtgcggtggctcaggcctgtaatcccaccacttcgagaggcaaggtgggttaatcacttgaggtcaggagttcaagaccagcctggccaacaaggtgaaaccccttcctactaaaaatacaaagaattggccgggtgtggtggcaggcacctgtaatctcagctgctcagaggctgaggcaggagaatcacttgagcctgggaggcggaggttgcagtgagccgagatggcatcattgcactccagcttgggcaacaagagcaaaactccgtctcaaacaaaaaaactgcaggtatttactgcaagcctcttttgagccaggcagctaaccaatccacgtaggtcatctgcgcagtccttgctgtttgctctacttgacactcttctctccatggctctgttcaaacatcgtcttctcagtgtggcctttgcaggtcaccctacataagatttcaaccgtttcccccaccattctctctgccttcctgtttttctctataggacttagcacagttccactttttatactctatcctctcactagaatgcaggacttatttgttgaatattggatgtgtgtcagtatttttaaattttcccacgttggtctttgggccacaccaaggttgcagtaagattttattttggctgggggcggtggcccacacctgtaatcccagcactttgggaggctaaagtaggtggattgcttgagcccaggagttcaagaccagcctcagcaacatagcgaaaaccccctctacaaaaaatacaaaaattagccagca

SEQ ID NO: 1560351 - DNA, 4001 bp, Homo sapiens
tactgcaaaaagaataaaatacctgggaatacagctaaccagggaggtgaaagatctctgcaaggagaactacaaaacactggtcaaagaaatcatagatgacacaaacaaatggaaaaacattccatgctcatggataggaagaatgagtattgttcaacacacaaataattcaggctttagaaggagctggaagagagaagacatggatggacgtggggctcacacccattaggaggctaaggcagtagtagttggggtggcagaatattcagtagtacactaagactgcctcatgcttagtactgcagtagtactacagaatgctagagtgttcagtagggttagactatggcagcatccttttaaatgaagtgacgggaggaagtgggttgctaaaacaaaatagaatcagcataaggaaggatattgggcagatgactcctgacttcctcattcttgcagtttgagcattcagtaaattacagatccttcatggacagtctaacacaggcaaggactaactataaatccaggcctgagcattaatgagtctgaagggtttggagataacaaagtgagatagaaattatgcaagagaagcacagcagaaacaactagaatggggattaaaataagaatggtgcttcaggctattcttcaatttctttatcctagagctcccaagagggtctaaaggggctgggagagatttacaggacacttaccttcctgtgcctgaatcctctggcccagacagagcactggaagagagagatttatgaaaaatcaagcttccatttccaacctttacgacaaatcaccctctgtaatgacagaccagaaaaagaccagtaccagatggattcacagctcaatcccaccagatatataaagaagagctggcatttttttttttttttgagacagagtctcgctgtgtcgcccaagctggagtgcagtggcatgatcttggctcactgcaagctctgcctcccaggttcatgccattctcctgcctcagccgcacgagtagctgggactacaggcgcccgccaccacgcctggctaatttttttgtatttttagtagagacagggtttcaccatgttggccaggatggttttgatctcctgaccttgtgatccgcctgccttggcctcccaaagtgctgggattgcaggtgtgagccactgcgcccggccaagaagagctagtattattcctactgaaactattgaaaaaaatcctggaggagggactcctccccaactcattctatgaggccaacattatcctgataacaaaatgtggcagagatacaacaaaaacagaaaacttctggataatatctttgttgaacataaatgcaaaaatcttcaacaaaatactagtaaccatatttctatatggggttctatcatatgttttccttccacaacaatcacagttttgaggttcattctttatttttacctttcagattccagcctctaagtctctccttgataagaaccttgggaccatcatgaatcccagataacacactataggtttaatacaaatattaaaccttgagccccacaagctagcttgggcttgggtagagacaaagttatagatacattgacaaagacggcctttccactaaggagatcagaatctccttggcagccactaaaatctcctagtcacactgttaagagacaccctgattattttgggatttctctatcttcccctctaacccacttttactctgaaactcaccaagacacaggagggtggtctgtttggggtccatcgtgctgacacggcctcagccccgttgctctcctttcaatgcacattagcaggatgacagatattcttacgacaataagctccgcaggaagtatgaggacagagcccctcgtcagggaatttccacatctattgcctcacaacaaagtggaacagttcgttgccgaataacttagttccaggttgctcttgggtggagcccaagagaagacatatatatgtatatttttttaaatagagatggggtctttctatgttggccagggtagtctctaacttctggcatcaagaaatcctcctgcctaagacctatatttctatttatgtttcagatgagaaacgaatgagaagtgaattttcattaagccagtgtctaatggtgttcaaattcatctttgaaccagatgctacatccaaatagacgggcttgggacagaatataaggtggtggataccatacaggcagacattgccttcactgggccattagtcaaaagctctgtggctttgtctgttctgaacctatgtttcatctctgagattcatggtctgagtatatttacttggacttgaccaggcatgcagtatacccttatcctggagatgatctcaatgccagagtgtggaggcattttctctggcactatttgtcatctctaaagaaagaatctactattttattatacttttttgtttatttgtataaatttaaggagcgcaagtgaaattttattacgtggatattttgtgtagtggtgaagtctgggcttttaatataattatcctcaaataatgtacattgttgctcattgagtatttttttaacttttattttaggttcaagggtacatgggaaggtttgttatacaggtaaacttgtgtcatgggggtttgttgtacagattatttcatcacctaggtaataagcttggtacctaatagttactttgcctgctcctttcccgcctcccaccctccaccctaaaggagaccccattgtctgtttttcccttttttgtgttcatgagttctattatttagcttccacttataagtgagaacctgctgtatttggtgttctgttcttgtatagtttgctaaggataatggcctccagctccatccatgtttccacaaaacatatgaactcattctttttttatggcttcaaattaattttatttttatcttattatttatgttattttgattgtagactcctggctatcacgaattcttcaggtatggagagtgaaatattcctaattaaaccttctactattttattttattttatttattctttttttttttttgagacggagtcttgctctgtcgcccaggctggagtgcagtggcgtgatctcagctcactgcaagctccacttcctgggttcatgctattctcctgcctcagcctcccgagtagctgggactacaggcatccgccaccacgcccggctaattttttttgtattttcagtagaaacggggtttcaccgtgttagccaggatggtctcgatctcctgacctcgtgatccacccacttcggtcccccaaagtgctgggattacaggcgtgagccaccgcgccccactttattttcattttaatacatcataacttagcccttccaacgccgaagtattttgaagtcctgagcttgtcccatatttcagaaagccgatcagcttccatgttgactgtttcatttgtgcaaatttaagtgaccttttgttttgccacattttgttaatttccacatacatatttacgttcgggaaatttggaaatactacgttctggaaatttggtgttgatgattgcatgaaattgaccgcattctaattttctttttttgttgttttgttacttatgccttatttattcattcctttgttctcacttgaatgggactttgggtgaaagacaaataatggctgtactcttagttgagtatttaaaatgcagagattgtaaaggcaggatgacctaattaaaaatactattgttggctgggtgcagtagctcatgcctgtaatcccagcactttgggaggccaaggcaggtgaatcacttgagttcaggaatttaagaccagcctggtcaatgtggtgaaacccagtctctactaaaaatataaaaaattacttgggtgtggtggcgggtgcctgtaattccagctactcggaaggct

SEQ ID NO: 1560352 - DNA, 4001 bp, Homo sapiens
accccctcgctttttcccctgcaaccccaactccaggagtcactcacactgggatttctgcgccatctggtcaccgtggtggctttccaagttcttggaaacttgagagactggagcggcgggagagaagagatatcccaggaacctcaaaggcaggtccttggaccccgcctatgccccaggctcagggaccctctcacatagtcacaacagctgctgttgctgtttgttcatttactggagcaggaggagtgtactcaggaaggtatatgcaagaatataatgaactactgtgtacctctccctcacccagggttaactataaaagcagtaggcgactatcagggtacttcacaaatcttagagcttgtttctgtctcacggcactaaaagtatgcccattttacagatgaggaaatggaggcacaaagcagttacaaaatccttacactacagatgcttaaggctgccaacttacaatggctcaacttacaatagctcgagttacaatggctcgactttacaatggtctgaaaccaatatgcgtttagtggaaaccttaactctcttgcaatgctgggcagtggtagggagccaaagccttcagccagccacacagttttgacttaaactattttcaacgtactttgcgcttatggggacataaccccattgcaagcggaagagcatctgtattaggatgctatcaggcacttttccaagcttccctgggtccccgccttccctaggacagggagcaacttagtttgaccttcagttccttagcgaggggacactgaggcccagagaggagcgggatgagtgctgggcatcctaaccctcacccccaccccctccaccttgaccccttcataccgttccgggcagccctctcttccagctgttttagactctgtgtggtgtcccagtctggggagggggagagaagaggagtggagaggggggattgtcagtgcccccacctgcctgcaccccacctcccagctggggatggaggtcttgggtataagccatggaggtgctgaaagtgtggaggacagggatgctgggtgtggggtgaggggctctggagggtgggggatgggaaagggctggcagtggcaagatgggaggcaggatgggaaaattgggttttgagaggatgcgttgggctcccccagctctgagatgggggtgaaggagggaacacagaagggccccatgagttggggggaccacatggagctgggggtgtcctcacgccacaggagaagcagagtcagcagcccagcccacagagcggcggtcaccagccccagcagcacgatctgagtcccacgcctgcaacaccgcctcctgggaagctcctcgatctctgccgggggtggagggactgactatgggtgcagggtgaagctggatgctggccctgtccgtctctccattacccagagcccccgacagcctgggagcttgtccagagcccacactgaagcaaagggtctcagtggacccccagctccatttgcacagcttccttacctgactcagggctgggtcactgaccacagagacagatctgggactaagagctaagactccctcagccccaacaaccaatgccaggcccccagcttcacttccagaagactaggtcctgctttttccttcccctctgagccccaacgcccacccttacacctctgcacctgtccccaacctggagtcccttccctaaacccaggacactgagtcccagttcttccccaacatcggagccactccccagccactttcccaggtgtcatccaacatccagacctccaaacctctcccagaccccacccaaaggtctatctggatgtcccacctcaagcccctggccctctgcactcaccctggcttggaggattcattatgctaaattctgcttgttccaagttcctgttctatttggcctctgactctattgggctccccgctccctagctgaagccgtttttttttttttttctttttctttttttgtcaggagggtgttgaatcagaaaaaggaggggccctcaatttgccactccttcctggctctgtgccaggaaagtcagtccggcctcacctccttactcacaccagtccctttcttagaaattcaccctctttcccagagagggactggggagccccgcttctcttctgggtgaaaggcagtagctaagggtcattgcttctgccaacgttagaaccagagagtcctcctacctgaatattgaccttcctccatggcggtcctgcttggattctcccgatgatggagcactcactccctgacaacgcagtccactcagcgggcacaatcacagctctggctgatttgggatttaatgatggttagggtgagccatcaaatcctagttaccagcacaggatagcatctgggacttggtggcactcaggggccatttgctgattttgtttagtctacaatctggactcactagcgtggttagcagggagacacagctggtgtggagagatagcagcctgagatcagaagtggggcactccagagcccatcacacttgagctacacagcaggtgcacccatgagatcttgacaaatggcttaattaacctggaaacttctttcctcattcgtaaaatgatgataccaagaacacctatactgttggttggtgatctgtgctaaaaatatcaccagcgtttattataattgccttgcctgtgtgacctcagccaaggattcaaccattctcagcctcagttttcccctctgtaaaatgggctgatgacagcacccaactcatgaggccaagataggatccaatgagatcacagcatacctgaggtttttggtgccgggctgcgcacagtgggtcttcggattctaaacatttatgaaacatctactctgtgccacgtcccactgagaaatgctaagagcccataacccaggcctcagccttctcctctgccaatgtccccagggcatctgtaaagtgctctgactttatttatttatttatttatttattgaaatggagtctcgctctgttgcccaggctggagtgcaggggcacgatctcggctcactgccacctccacctcctgggttcaagcgattctcccgcctcagcctcccgagtagctgggactataggcacgtgccaccatgaccagataatttttgtatttttagtagagacgggttttcactatgttggccaggctagtctcaaactcctgacctcatgatccgcccgcctcggcctcccaaagtgctgggattacaggcgtgagccactgtgcatggcctatttttttattttttgagatggagtctcgctctgtcacccaggctagagtgcaatggcaccatcttggctcactgcaacctccacctcccgggttcaagcgattctcctgtcttagcctcccaagtagctgggactacaggcacccaccaccacacctggctaatttttgtattttagtagagacagggtttcaccatattgatcaggctggtctcgaactcctgaccacaggtgatctgccctcctcagcctcccaaagtgctaggattacaggcgtgagccactgcgcccgaccaagtcctctgactttaaagcatctactatgtgctgaggagcatgggacttggggtccttcaggcctggaggtcacgggctaccttctttcgctgcttgactataggtaagtcccttctctcggagcctcagggaggtggggtgtggcgcggccaggctctgattagcggcagctcaagctggcccttttgacattgtgagaggaacccagagaccatcctgggactggaactgtccagggaggcagctggacagacctgagtccgagtcctggcttcttcctggatgagcagctcagtttgctcatctgtaaattgggagtattcaaagcaccagcacacagtaggtgctcagtaaacctactggcaggat

SEQ ID NO: 1560353 - DNA, 4001 bp, Homo sapiens
accaagaacacctatactgttggttggtgatctgtgctaaaaatatcaccagcgtttattataattgccttgcctgtgtgacctcagccaaggattcaaccattctcagcctcagttttcccctctgtaaaatgggctgatgacagcacccaactcatgaggccaagataggatccaatgagatcacagcatacctgaggtttttggtgccgggctgcgcacagtgggtcttcggattctaaacatttatgaaacatctactctgtgccacgtcccactgagaaatgctaagagcccataacccaggcctcagccttctcctctgccaatgtccccagggcatctgtaaagtgctctgactttatttatttatttatttatttattgaaatggagtctcgctctgttgcccaggctggagtgcaggggcacgatctcggctcactgccacctccacctcctgggttcaagcgattctcccgcctcagcctcccgagtagctgggactataggcacgtgccaccatgaccagataatttttgtatttttagtagagacgggttttcactatgttggccaggctagtctcaaactcctgacctcatgatccgcccgcctcggcctcccaaagtgctgggattacaggcgtgagccactgtgcatggcctatttttttattttttgagatggagtctcgctctgtcacccaggctagagtgcaatggcaccatcttggctcactgcaacctccacctcccgggttcaagcgattctcctgtcttagcctcccaagtagctgggactacaggcacccaccaccacacctggctaatttttgtattttagtagagacagggtttcaccatattgatcaggctggtctcgaactcctgaccacaggtgatctgccctcctcagcctcccaaagtgctaggattacaggcgtgagccactgcgcccgaccaagtcctctgactttaaagcatctactatgtgctgaggagcatgggacttggggtccttcaggcctggaggtcacgggctaccttctttcgctgcttgactataggtaagtcccttctctcggagcctcagggaggtggggtgtggcgcggccaggctctgattagcggcagctcaagctggcccttttgacattgtgagaggaacccagagaccatcctgggactggaactgtccagggaggcagctggacagacctgagtccgagtcctggcttcttcctggatgagcagctcagtttgctcatctgtaaattgggagtattcaaagcaccagcacacagtaggtgctcagtaaacctactggcaggatgctgggggactgtcctcattctgtggggcctctctcagtggaactgaggttccaagagggtaagtcatttgtccccatcacgcagtggtgggactggaactcaaacccgggacccttgagctgggagcccatttgctcaatcatctggagacataatctcatggtggggtgtctactggtaagtgctgggtggcaggatcccaactccaggccgtccttctaacccaagaggtcctgcctctgcctagagtcttccatggctccccagggccctctatgatcggcccagcgcactcaccaagctcatctcagaccagatggcctgctttcacttccccaaatcagggactcgaatgcctcgagattctgtccacactgcggcccccacccccgccccctcaccacccaccacctcccttctctggttgtgacctcctgctggtcatcccttgaggctcagcccaaggtcgtttcttccaagggcgctttgatctccacttcccatggccaacccccaacacaccagatacgtactcacttagtggagtttggagcctgtgtctgtcctcctagtgtgttggggtcgaccagagcgattggcagggaccgtcagagacagaggtttaagcaggaagagagacactttcttctgaaagtagagccactgacagcttctattttcatagacctaaatatgggcttgccacccggataacattacacgcatggcctctcctggtgctccccacacccgggtgaagtccgtgttattattatctccatttctcaggtaagagaattgggtgagaactagagatgttaagcagcaagttcccacagggctgaaggaggtgagtggtagcgtcaagatgtgaaccactgttactgcacactgaatcataccactatggccgatcacagagggccctggggagccacggaaggctctaggcagaggcagggcctcttgggttagaaggacggcctggagttgggatcctgccacccggcacttaccagcagacaccccaccatgagattatgtctcttgatgattgagcaaataggctcccaggtcaaatgtcccaggtttgagtcccagcaagaaaaaagggaagaggagagagaggcagaggaaggggaaaaaaaagacagaaggaaggagagggagaaggaggagtaggagggaaggagggaagcggggggaaagaaagatacgtgagataatattcaggtcaaatatggacagttttggctgggcacggtggctcacgcctgtaatcccagcactttgggaggctgaggtgggaggatcacttaagcctgggagttcaagaccagcctggacaacatagcaagccgttgtctctacaaaaactataaaaactagcagggcatggtggtgcatgcctgtgatcccagctactggggaggcagaggtgagtggatcacttgagcccaggagttcaagatcagcctgggcaacacagtgagatgaaagaaagaaagagagagagaaagagagagagagagaccgggcacagtggctcacgcctgtaatcccagcactttgggaggccgaggcaggtggatcatctgaggtcaggagttcaaggccaacatggtgaaaccctgtatctactgaaaatacaaaaaaaaaaaaaaaaaaaaaaaaattagctgggcatggtggtgggcacctgtaatcctagctactcgggaggctgaggcaggagaatcgcttgaatccgggaggcagaggttgcggtgagccgagatcgcgccattgcattccagcctgggcaacaaaagctaaactctgtctcacaaaaaaaaaaaagaaaagaaaaaagaaagaaaaacagaaaagaaacaccaaactccatcccagccccatcctggaactaagacttcatccccatgtcctcacaacatggcccagctggacttattcccaagcttcctcctccttctcctcgtgtgtccccattggtgggacagtccgtccatccacccagacaccccggcccaggtccaggccttgtccaagcacttcccgatcttccaccccaccgctcacccagcacccgcgcctggctcgtctcaaaaaaataacctgcttctccccatccccacagctgctccctcttccccctggaccaggtgacatccccctcttagggttccccctgcctggtttgccttgtccctgggactgcctcctccatggcctccccactctcatcctgcccccatgacagccttccctggggctctacctcctgtcttgccccccaaaacagaccctccagggtcctcactcccacctggccaccacggcagacccccccttaggatccccaacccgacctgccctcaagactaatcccccagtgaccccaccctggcttggcctcaaatgctgtccctatgtccactcagcagcccccagccacctctccaatgctcagcggccaactctttcccttcctttttgattttttttctttttttgagacagagtcttgctgtgtcatccaggctggagtacagtggcatgatctcagctccccataacctctgcctccccggattcaagtgattctcctgcctcagcctcccaagtacctgggattacaggcacgcgccactacacctggctaattt

SEQ ID NO: 1560354 - DNA, 4001 bp, Homo sapiens
gttggtactagctttcacctgttataatgaaagaatgtgagcttttttaaattgtaagaccttcctgtttttctttttttttttcttctgagatggagtctcgctctgtcacccaggctggagtgcagtggcacgatctcggctcaccacaacctctgcctctcaggttcgagtgattctaccacctcagcctcccgagtactgggactacaggtgtgcgccaccaggcacagttaacttttgtattttttcttttttttcttttgaaatggagtctcactctgttacccaggctggagtgcagtggcgcgatcctgggtcactgcaacctctgcctcccggtttccacgcccagctaatttctgtatttttagtagagatggggtttcaccctgttggccaggctggtctcaaattcctgacctcaggtgatccacctgcctcggtctcccaaagtgctgggattacaggcgtaagccaccacgcctggccgttctttctgtttttaaagagaatgtggctatctgaattttcatgtgaaatctccaacccacaattgttttaagcactttggggctcaaggtggatgtactctgctgccagtgtatgatttccatctttttacaaactggagtgcagtggcttaaacacaacacactgcagcctcaacctcctgggctcaagggatcctcctgtctcagcttctggtatagctgggaccacaggcacgcactgtgtgcctggctcattttttaatttttttctagaggcagggtctcactttgttgcccaagctggtcttgaactcctgggctcaagtgatcctcctgcatcagcctcccgaagtgctgggattacagacgtgaccaactgtacccagctggtttttgtcttaataggacttgtgggggccaggcgcggtggctcttgcctgtaatcccagcactttgggaagccaacgcgggtggatcacttgaggtcgggagttcatgagcagactgaccaacgtggtgaaattccatctctactaaaaatgcaaaattagccggacatggtggcatggggcgcctgtaatcccagctactagggaggctgaggcaggagaatcgcttgaacccaggaggtggaggttgcaattagctgagatcacaccattgcactccagtctaggcaacaagagtgaaactccatctcaaataataataataataataataataataataataataatgggacttgggggtttgtgaaaaggggataaagagaagaaggggattatggaagggtgaatgaattgtctcctagaaatagatggcagtgggggcttctgaccacccccaactaggaagagcgtccctggggctgaggagagagaggtctaaggaatcttgaagagagtgtgggggctatggaatgaccaccttccatataaagggggctttgaaggatatcccagggggccaggggatcaggaacaatggacatttcaaaagtaacctagatggatgctgactggtgacgagagggtcctcatatcccatcctccccccagtactttggctttatccaaaattttagttctggacacatccctgggagaagtggggacaacaccctccaagaatgactttcgtgaaattttccatcaacttagcagaatgaggctcagagtcaaaaccttagttgagttgcagaaaaccaagaaagttcttgcacacttgagtttggggactaaggtttttgcctgtgctcccatccagaaaagggtgagaattggtgaattctaccacatccccctgcagagcctaagggcctctctcctgtctcagctagcctggggtgacatgtggaggaggcacacatggaaggcgtggacccacgcagagttccccagattggaacaaggacatggagagggtcttggtctgacttaccccacaggagggttgctccagcccagagtatccaccagctccatagggcacccatggctgcagtaggaaaagagaaaggatcatagaaggctgatccaccgcctctgctggagactgtcctgggcagaagggcccactctcatgacaagggccacctgggaccatgaaggctgaggtggggaaagaagtcgggcagattgggccagggggtatggatccaaggaccagtgtgtgtgtataggggaggctggctgtccagcgggtctggaggtgggttggggagggcagaagccagggacggggtggagagttggctgtcttgtgggtctaggggtaggatgaggaggcctacagtcaggggcaagagtaggggacctgctgtcccacttccaaaggggaccccagcccttctcacctgcaggtccctggagctgcagggccagccctgtggcagggctatatagtggagtttctgggccacaccctgggccacgtgccaggcagatgatgccaacttcctggaggaggctgccatcctcatggccagatgaaatgggaaactgtgaaggcctgggaaggagggacagtgattctggatgcctgggttccaagaagggagtgaggacagctggtggccattccctggaagccttctggagagtttggtcctggaagggtggggtccctgagggagacagctggggagcaggcagatgagcacctgggtccctgggtggaggtggggtagggtgggggtgtgggcagtgagggtgggaggtggcatgtggtcatatttgctggcttagtggctaggttccttcctttggctcctgccaggaacaacagtgagggacccatatccgggtcctggttccttctcagtccccacaggctggggagtccctagccacccacatcctgcttccagacaccactaggggcaggtgtctgggatgggcaggagtctgaggctatggagtgggacacaagacctccaccgcagcccagtggggcgtctgcggtttctcatctgcaaaatgggaacaccaaaaccagcctctctgggcatctttacgtcccagagatgtaaaaaaattctcaaggactgtagagctggggggcagcctcctctggtgtgggcgcaggccaggctgcaggtgggcactgggactgaggcggtgtgtgaagaagggacaatggcctctgtttcctggttccacacagacacccagattctacttctgatcccagacacctgctcctcagtggtgctggaaacaggatataggtggccagggactccccagcctgtgaggactgaggaagagccaggacctgttggttttggagtttttttgtgtgtagggagggtttgctcttagcaggggctagctgaacaggtttaggggactctgtgcctctccatcaccccagaatttgcctgagatgggaggtggaggtctaggttgcacacaaggagcagaagaatgagctgaaagttgggctttctcagctggagtcagctcctctgaggggctggcctgacccatgccctgcctgccttctccctgactcaggatctcattgtttgctgggggagtctcccctgggaccagcagctgcaaagcctgggtgctctcttggaccaacaccctagcagctgctgcccctggggctcctcctctcttatcacagcagcctgggcctctgggaggccagagcgggtggggggcttctctctccctggagctccaaccaatccccacgcccacccaagaaacgttcctggagggaaagataaaggctaagagttgactgggacataaagtcaaccaggagaatgaggtgagtaaataggagactggctaaaagccagagataacaagaaacaagcaggggcaggggacccacaggaagtggaagctttgggaaaaggatgcctgggtccctgaggggtctaaaagttggtggaaggggctgctgggtccctgagacagagaaggactcggaggaggagacgtcgggattcctaggaggaaacagcaattgcaaaccaagatgtga

SEQ ID NO: 1560355 - DNA, 4001 bp, Homo sapiens
tggcggtgggcaccgaggtgttgtcagggcccagttcacagcccagcaggccctgcagagtgtagggacctggggcgcccaaacacaggtaagcggggccccggagcatggacccggccccttgcccctccagaccggaatctcaccttttccccccaaagctttgaaagcttccagaaagagcttctccttgatcctcagatctgtggtctctttctcccaataccaggacacctggttttcccagacccaagctccacagggctccgcctcgccccgcaggctattgtagctcaggtactgctgcgggcccagccagccggacacccagaaggcaggagtccccggggcaggcgaggacaccgcggtaaggtggtacaggagggagaggtggctttctgcagacagaaacagagctgaagggagcacacgggcggggaactagactgcagtgggacagatacccagggagggagaagaatctattatggagggagggggacagattcagagagaggggacagaaacccggggggggggggacagagacccagagagagagagacaagagacccagaaagagagggggacagagacccagagagagagagggaaacagacacaagaggcgacaggtggttcccagcctcaggcccagcaggagacgttgagaaagttaattgagcggagaaggcagcgccaggggctcgcggggaactcgggtcccgctggcttcgcccctgcctgcctggggccgcctcccgccgcccgcctgcagcagggccctggcccggagcggccctcacctgcgcccaggctcccaggaaggagaaagagcaggagccccagcgcccagggctgaggccgcgggacccccatgctgagaggacgacctggggcgggagggggcacgtgactcctcccgacccccggcccgccccttcctcccgggacaccgcgggcacggccgggaccaggacgccgaggaggggctctgcgggctcggtccagactgacaacaatgccctcctcgtacctgaagaactttcacccctgaactggatctcagttggttaattaattacagacacttgataggctgagagtcccggccccgagctccgccacgccccttccgcccccctcaggccccagcccctcctccctcagaccccggagtccaggcccccaaccgctcttccctcggacccaggagtccgggcccccaaccgctctaccctcggacccaggagtccgggcccccaaccgctctaccctcggacccaggagtccgggcccccaacccctcctccctcggacccaggagtccaggcccccccggcccctcctccctcctccctcagacccagcgtccagacccccagtccctcctctctcagacccaggaatccaggcccccacccctcctccctcagacccagtgtcgagacccccagccactcctccctcagacccagggttccaggcccccagcccctcctccctcagtcgggccctggtcggctcacgttcccttcagcctcgctcccttcctgcctgcggccctggccggctcctggctcccgtgactggagaccccagttcctctctcacatcctgtgggaggctgctgctccctgactccaagaacatccagccccaccccccagttgcagggcacaccccaggccctaggcccagcctgtttgtttctcaaaacgcttgtggttcttctttttccttctctgtggttcccgttttttactttgagggtgtctgccgctcagggaattcttgacaaaactgggaaaggaactcgatgcctccggagtccacaacttggaggtctctggatcctcctcctacccctctgtatccccgtggccttccctagcgctcgctgttaatcaaaatcttctggaagcctccttagttcctccttcaagcccttcccccggcatccccttaaaaaattcctgcaggtgctctttaatatccttctgcgggccgggcgcagtgactcacgcctgtaatcccagcactttgggaggccaaggcgggcggatcacgaggtcaggagttcgagaccagcctggccaatatggtgacacccccgtctctactaataatacaaaaattagctgagcgtggtggtgggcctgtggtcccagctactcgggaggctgagacaggagaattgcttgaacccgggaggtggaggtcgcagtgagccgagattgcaccactgcactccagactggcaacagagcgagactccgtctcaaaaaaaaaaaaaaaccacatccttctgctaggacttcagtgaccacatggtccccatacaatgctgcctcactcgaaggcccctccaggcaccagcccccgcccacactcctgctacaaagcttcccatacacttatttcattgtggtaaaatattcaaaatatttacccttactgtcatttaacacatttacagtgctgtgcaactgtcacctctatccgagttccagagcttttttatcaccccaaacagaaggtctgtccccgttaaacagccgctgctcccagacccctggcaaccattcatctgctttctgtcttgatagatttgcctattctgcacatttcaaagaaattgaatcatataatatgaagtctttccttccttccttccttgcctccttccttccttccttccttgcctccttccttccttgcctccttccttccttccttccttccttccttccttccttccttccttccttcctttccttttttttgacagggtctggctctgtcactcaagctagaatgccgtggagcgatcatggctcactgcagcctcaacctcccaagctcaagcactccacctgccttagcctctcaaggagctggaattacacacacttgccaccaggcccagctaatttttgtatttttgcagagatagtgtcttgctatgtttcccaggctggtctcaaactgctgggctcaagacagcctcccaccttggcctcccaaagcactgggatgacaggtgcaagacacccatgcctggcctgttttcagctctattgagcatacatctgggagtggaactgctggtcaggtagttcaggttctctagagaaacagaatccacagaatgtgtatatgcatacacagaaagagattcatttgaggaattggcttccaggattagtggacgttcagctggttcagagtctgatgcgggggccaggtgtggtggtgcatgcctgtcatcccagcactttgggaggccaagttgggaggatcgcttgagtccaggagtttgagaccaacctggccaacatagggagaccctgtctctatttttaaaaaaaatttcaaaaatgttggacgcggtggctcaagcctgtaatcccagcactttgggaggccaaggcgggcagatcacgaggtcatggtgaaaccccatccctactaaaaatataaaaaaattagcgaggcatggtggcaggcgcctgtagtcccagttactcaggaggctgaggcaagagaatggcgtgaacccgggaggcggagcttgcagtgagctgagatcccgccactgccctccagcctgggcgacagagcaagactccatctcaaaaaaaagaaagaaagaaagaaagaaaccccaaagtctaatgggggagccagcaggtgggagacacaattgcctagcaggactccctctccctctgggcagacttttcttcttttttttttttttgagacgcagtctcgctctgccatcaggctggagcgcaatggcccgatcttggctcactgcaacctccgcctcccgggttcaagcgattctcctgcctcagcctcccaagtagctgggattacaggcacctgccaccacacccggttaatttttgtatttttagtagagacggggatttcaccatgttggccaggatggcctcgatctcttgacctcgtgatctgcccgcctcagcctt

SEQ ID NO: 1560356 - DNA, 4001 bp, Homo sapiens
tgtctacaaaatataaagttagccaggtgtgatgatgctgggctgtggtcccagctacttggttggctgaggtgggaggactgcttgagcctgggaggttcaggctgcagtgagccgagatggtgccaccacattccagcctggggtgacagagcgagaatctgtctcaaaaaaaaaaaaaaggggggagccaggagcagtagctcatgcctgtaatcccagcactttgggaggctgaggtgggcggatcacctgaggtcaggggtttgagaccagcctgaccaacatgaagaaaccccgtctctactaaaaatacaaaattagccgggcatggtggtgcatgcctgtaatcccagccactcgggaggctgaggcaggagatcacttgaacccgggaggcggaggttgtggtgagccgagatcgcgccattacactccagcctgggcaacaagagcgaaactccgtctcacaaaaaaaaaaaaaaaaagaaggcaaggaaggaagccaggagtttgtcctggggggcgctggggagccatgggagggctgagtgtagaaggacccctgaggaatgggggggcagagcgtgggctgcagtgggaggctgatggagggtcctggcaggggaactgaggcaggtgggcatgacgggagagaggacagaacagcctgcggctgcagatccggctcacccttccactccaggtttccgcggcccctctccaggtgctcccgcaggcggtgcgggcaggagaatagcaggaaggtgagctccttgttggccgccttgtcctgctgctgccaccgctgactgatagccagggcctcgggccagtccccaccccaggtgccctgcttgaggtcgaaattcatgaactcctcgccgttcagggcgaacttggcggtgggcaccgaggtgttgtcagggcccagttcacagcccagcaggccctgcagagtgtagggacctggggcgcccaaacacaggtaagcggggccccggagcatggacccggccccttgcccctccagaccggaatctcaccttttccccccaaagctttgaaagcttccagaaagagcttctccttgatcctcagatctgtggtctctttctcccaataccaggacacctggttttcccagacccaagctccacagggctccgcctcgccccgcaggctattgtagctcaggtactgctgcgggcccagccagccggacacccagaaggcaggagtccccggggcaggcgaggacaccgcggtaaggtggtacaggagggagaggtggctttctgcagacagaaacagagctgaagggagcacacgggcggggaactagactgcagtgggacagatacccagggagggagaagaatctattatggagggagggggacagattcagagagaggggacagaaacccggggggggggggacagagacccagagagagagagacaagagacccagaaagagagggggacagagacccagagagagagagggaaacagacacaagaggcgacaggtggttcccagcctcaggcccagcaggagacgttgagaaagttaattgagcggagaaggcagcgccaggggctcgcggggaactcgggtcccgctggcttcgcccctgcctgcctggggccgcctcccgccgcccgcctgcagcagggccctggcccggagcggccctcacctgcgcccaggctcccaggaaggagaaagagcaggagccccagcgcccagggctgaggccgcgggacccccatgctgagaggacgacctggggcgggagggggcacgtgactcctcccgacccccggcccgccccttcctcccgggacaccgcgggcacggccgggaccaggacgccgaggaggggctctgcgggctcggtccagactgacaacaatgccctcctcgtacctgaagaactttcacccctgaactggatctcagttggttaattaattacagacacttgataggctgagagtcccggccccgagctccgccacgccccttccgcccccctcaggccccagcccctcctccctcagaccccggagtccaggcccccaaccgctcttccctcggacccaggagtccgggcccccaaccgctctaccctcggacccaggagtccgggcccccaaccgctctaccctcggacccaggagtccgggcccccaacccctcctccctcggacccaggagtccaggcccccccggcccctcctccctcctccctcagacccagcgtccagacccccagtccctcctctctcagacccaggaatccaggcccccacccctcctccctcagacccagtgtcgagacccccagccactcctccctcagacccagggttccaggcccccagcccctcctccctcagtcgggccctggtcggctcacgttcccttcagcctcgctcccttcctgcctgcggccctggccggctcctggctcccgtgactggagaccccagttcctctctcacatcctgtgggaggctgctgctccctgactccaagaacatccagccccaccccccagttgcagggcacaccccaggccctaggcccagcctgtttgtttctcaaaacgcttgtggttcttctttttccttctctgtggttcccgttttttactttgagggtgtctgccgctcagggaattcttgacaaaactgggaaaggaactcgatgcctccggagtccacaacttggaggtctctggatcctcctcctacccctctgtatccccgtggccttccctagcgctcgctgttaatcaaaatcttctggaagcctccttagttcctccttcaagcccttcccccggcatccccttaaaaaattcctgcaggtgctctttaatatccttctgcgggccgggcgcagtgactcacgcctgtaatcccagcactttgggaggccaaggcgggcggatcacgaggtcaggagttcgagaccagcctggccaatatggtgacacccccgtctctactaataatacaaaaattagctgagcgtggtggtgggcctgtggtcccagctactcgggaggctgagacaggagaattgcttgaacccgggaggtggaggtcgcagtgagccgagattgcaccactgcactccagactggcaacagagcgagactccgtctcaaaaaaaaaaaaaaaccacatccttctgctaggacttcagtgaccacatggtccccatacaatgctgcctcactcgaaggcccctccaggcaccagcccccgcccacactcctgctacaaagcttcccatacacttatttcattgtggtaaaatattcaaaatatttacccttactgtcatttaacacatttacagtgctgtgcaactgtcacctctatccgagttccagagcttttttatcaccccaaacagaaggtctgtccccgttaaacagccgctgctcccagacccctggcaaccattcatctgctttctgtcttgatagatttgcctattctgcacatttcaaagaaattgaatcatataatatgaagtctttccttccttccttccttgcctccttccttccttccttccttgcctccttccttccttgcctccttccttccttccttccttccttccttccttccttccttccttccttcctttccttttttttgacagggtctggctctgtcactcaagctagaatgccgtggagcgatcatggctcactgcagcctcaacctcccaagctcaagcactccacctgccttagcctctcaaggagctggaattacacacacttgccaccaggcccagctaatttttgtatttttgcagagatagtgtcttgctatgtttcccaggctggtctcaaactgctgggctcaagacagcctcccaccttggcctcccaaagcactgggatgacaggtgcaagacacccatgcctggcctgttttcagctctattgagcatacatctgggagtg

SEQ ID NO: 1560357 - DNA, 4001 bp, Homo sapiens
tcaaggcagtatcttatctcaaccagcaccacgatggggaaactgagacacgtgccccaggtcacacagtgactcgggccaccaagtgggaatctgagccagggattctcagaaattttctgtcctccccatgggtcccctccctcttcctcacttcatttggcaaacatctattgaatgcctactgtgtacccaactttcccaggtgctggagtctcctcaggcaatgcctttgatagactcccccttcccctccctcctcctggtcagctgtgacccgatttaaagagcactaatactgtcattaatattataataatcatgtctgtatttacagagcttcctcctcccacagactcctcccatcttcccagaggaattcagcccatttcacagaagaacaaacaaaggcaccaagggaaaaacacacacacaggtagaggcaaattcaaacctgggggtgtcagactcccagccccatgcccaccactgggagggcgctccaagggacagggaatgagctggcctggcaactcccaccccctcctgcccaggacctcgcccgagaacaggttcacccctggcgtgggtgatggtatgtgggtcagggtgtgccctaagtggccccaatggtgagaccagggtggcgatgccccatcccagccattgcagcttggtcctatgttttactccctgtccccatgccctcagccccaatatcagagtgtcatcatcaacccattttgcagtgcagtaaactgaggctgagaggatagcaaggcactgtgggagggtctccaaacccaatgctgtcttgaccccaaaccacccacatgttaagcaaaagagtgaatcaccattggacaaaatgtgggctgggtgagttcagaatctgtaaaatgcagggtccgaagctcccaacctcaattttcaaaagaggaaaccgaggttcagaaaggtgctgtcacctgcccaaggtcaccagtgaagcaggtccattcgacactgcctcctggtccccagtgcagctggggcaggtgactcgggggatccaaggcagatggaggggtcccccaccccccaagcctcctccgcaccccactcacagccagcctctggcaagatcctaatttacctcgatttattttaatccccagaaacagatgctagctgtacaccccgcccctcagtaaaagagggaccccccccccaagtccaggctccaggcccttcaaggcctggcctggataaaccgtgccaggcaggggaccccacagtgacctcctccccaaaattccaaccttggggtccccacagaagatgccagtgaaacgccccccaccccatccttaaggtggaggactgggatggggcagattagaggaggggccaggtgacaccccagctcctccagccaccaggcctggataggggttcacagtggaggaaaagggaaggggtccctcgtctcggtccccggtggtctgcaggccggagctgggaagagggaatctgcgggtggtccccatctcagccaccgcccagggttccaggctggaaggggagcggcgcccccatctttgcagccccagaacccagacctaggcttagaataaaagaatttggggaggggtctcgcgtcgtcgccgcccccgtgcacgctcggttctaggccaggagacgggggatttggggagcggtccccattttcgcctgcggacccccaattaccacttggagggggaagccggggcgcccaccgcgtagccccaaccccctgctctccatccctcgcgtcccgccgcgcctttgccctccgcagccgccggggctgcagggcacggtgcgcgtgggaggctgcgcgggccagggtatcccagggggttccggggggcaacactcacctcctgagctcgggccgagccccgcgctcgccgccacctgcggcttggtcgctgacaccggagcccgccccgcccctccctccgcggctgcggcgcggctgccggcgggctccgcccccggggcgtggcctagaaagtccccacccccgcgacggcgccaggaggcagggcgggctctgatcccgcgcggccccccattgggccatttaggcgcccagctccgccagctcagcgcgctgattggtccagccgaagactaggctcctttttatgttcccccccttacgccacccgcagtctatttgcataatttaaagagacaggcgccactctttcgccctgagactcagtggtaaggagtaaggagcgaccaacgtttattgagcgaacaggcagggctcagttgatgaccccccacaagcctgtaacctggacattattggtctttattttacaaatgggaaatctgaggctcagagagggcaagatcttgcttggaggccacacagcaagtctgcagccggcctagggcagccccgggatccggcaccttgcagaggaggtcatcccctcatatgccatatgatagttcttttttggagttcgaactcgatcgcttgaggttaggagttcgagaccagcctgaccaacatggtgaaaccctgtctctactaaaaatacaaaaattagctgggcatggtggcaggcgcctgtaatctcagctacttgggaggccgaggcaggagaatcacttgaatccgagaggcggaggttgcagtgagccgagatcacatcactgcactccagcctgggcgacaagagtgagacttcgtcttaaaaaacaaacaaacaaacaaacaaaaacaaagaaaaagaaaatataaacttacacaacacccgccagtcccccatcctaccctctgcttagggacagggcacccggctgattttcttgcccctccaccagcctcccaggctcagtcagggcagcccaggagcacagaccagaagcttgggaggccctaaggatcttctcttcccttcattaccagcatttcatcccgtggattcagtgtctctgaaacagttccaaattgtccattttcctacaccccatagtggtcccagcgaagacccaattgtcttcagcctggatgccaactcggtttcttatttgtgtttcttgttccctccatcccagccctagacaatccctattctccaaggcaactgtagttgttctttcttttctttctttctttgtttagagacgaggtcttgctcagttgcccaggctggagtgcagtggtgtgatcatagctcactgcagcctcaaactcccaggctgaagcgatccccctacctcagccttccaaaatgctgggacaacaggcgtgaagcactgaaactggccagttccttttatttccaaataaaccttttattttagagcagttttagaattattgtgaagagagtacagagagttcctgtatacccaacacccagcttctcctattatttttttctttaattttttttttttaatagagacagggtgtccctatgttgcccaggctggtatcaaacccccgggctaaagcaatcctcccacctcagccacccaaagtgctgggattaacagtcatgagccactgtgcctggtctattattattattattattattattatttgagacagagtctcgctctgtcacccaggctggagtgcagtggcatgatcttggctcactgcaagctctgcctcccaggttcacgccattctcagcctcccaagtagctgggactacaggcacccgccaccacacccggctaattttttgtatttttagtagagacggggtttcaccgtgttagccaggatggtcttgatctcctgacctcatgatccgcccacctcggcctcccaaagtgttgggattacaggtgtaagccactgcacccggcctattattattattattattaatttatttatttggtgagacggggtcttgctcttgtcacctaggctgaagtgcagtagtgccatctcagctcactgcaagctctgcctcccgggctcaagcaatcct

SEQ ID NO: 1560358 - DNA, 4001 bp, Homo sapiens
atggtcagggctgggccagatggagggacaaggtccaaaagaacctggactaaaggagggctcatgggagttggggttttaaagcatgaataggagttcactgggcaaggaattatttgtttcaacaaacattcccaaccctgcactggttaatgacagggcccctgaaaaacttcagtccccaccacacccccttaggaaacctagtttggtggcaggggtagggtggtgagcatgctacactgacatccctaggggaaaagccctaaatttccatatcatttcttagcttctgtccatgaccaggaccctaagcatctccaaatctcttagagctgtgctgactggcatgggaaccactagccccatgtggtgacttaattttttttttttttggagacagggtctcgctctgttgcccaggctggagtgcagtggtgcgatcatagctcactgcagcctccacctcccaggctcaagggagccttgaatagtagcctcccgagtagctgagactacaggctcacgcctgaataatttttgtattaagttttttttatttttttattttttctggagacaggttcttgctctgtcacccaggctggagtgtgcagtggcatgatcacagctcatggcagcctcgacttcccaggctcaagtgatcctcccatctcagccacccgagtagctgggactacatgtctaactaattaaaaataaatttttttttttttttttgtagagactaggtctcactagtgtggcccaggccagtctcgaactcctgagctcaagccatcctcctgcctgggacccccaaagtgctgggattacagccatgagccacaacccctggccttaatttttgtattaatttttgtattaatgttaaaccaagtaaaattaaatacaattggctgggcgcagtggctcacgcctgtaatcccagcactttgggaggccgaggtgggtggatcacttgaggtcaggagttcgagacctgcctggccaacatggtgaaaccccatctctaccaaaaaatataaaaatcagcagggcgtggtggcacacacctgtagtcccagctacttgggaggatgaggcaggagaatcacttgaacctgggaggcggaggttgtagtgagccaagattgccccactgcactccaacctggttgaaagagtgagattctgtcttaaaaaaataataattaaatacatacatacatacatacatacatacatacaattatatgcccagctcctcagctgtgccagcctctcttccaaggctcagtagctacatggggctgatggctgctgtattggatggccaacattgttctagaagatcccaggaaccaaggagcccaagttccccagaaaccaagaatctcactactgttttcacagtttcaattagattgcctcaccccacctctggcagacagatacacatggagcaccagtatgtgtgcgaccctgtacccaactattcacacgcatctgctcatccaatcttcatgccatgccctcagaggcaaccccaactttatgaaggaaaccgaggcacagagagatcaatcattggtcccggctgactgtgattttgcccctggtctgtctgccaatgacctcctgtttgaaaccatcacgcgtggctctctgggtttccaagctccccttgccgcccccctaacccaaaccaccactcacagctggaatgggggacggggggcagggcaacgggtggccccatgcaggctttggccagcccaggaagtgacacctgctacttctcctgaaacccaggctccgggcaggggggcctcccctctgttcctgaggggggccaaggcgagatgatgggtatctactggccagggctcaaactcaccggacagggtagcgagtgggatggggcccctgtctgacggggcaggcgccaggagacagccacgaggccacttccgtcagcaccaagttggaggcttgtgtgcatgggttgggggggggacaggaagctcaccccgccccgcctaccatccaaccgccacctttcctcccccgcccgatcagcacccatgggacctccctggaaccacacaggccatgggtgagtaaacaagaggcgcttgaacctggagccccccggcctgaacctggagctgttcttaccgaacaaatattaatcatggcaattgggaaataactgagcaccaaccctggcccaggcattcaacatcttgccatcctgaggtaggccgatacccacttcacagactgggcaaactgaggctcagagagggaaatgcgctcagaaaggggaagacatggccaggcgcggtggctcacgcctgtaatcccagcactttgagaggccaaggtgggtggatcacgaggtcaagaggttgacactatcctggccaacacggtgaaaccccgtctctactaaaaatacaaaaattagctgggcgtggtggcccatgcctgtagtcccagctactcaggaggctgaggcaggagaatcacttgaacccgggaggtggaggttgcagtgagccagaggttgcagtgagccgagattgcgccactgcactccagcctggcgacagagcgagactccatctcaaaaaaaaaaaaaaaagaaaagaaaggggaagacatttttgcattcatgagcgctttccttcactacaaaagaaatttaaaattatattttaggtggtggctgatgcctggaatcccagcactttgggaggccgaggcaggtggattgcttgagcccaggagtgcgagaacagcctgggcaacatggtaaaaccccgtctctactaaaaatacaaaagttagctgggtggggtggcatatgcctgtaatcccagctactcgggaggctgaggcaggagaatcgcttgaacccaggagatggaggttgcagtgagcggagatcgagccactgcactccagcctgggtgacagagagagactctgtctcaaaaacaaaacaaaacaaaactgtattttacaactacattgacataaagacaaatatattaatattatacacaaaaatgtttccttcaacccaagagttcatttttttccctttggattttaaaagaagtgaaaacatcaacctagggacccctaaaagcactgtgagcctgagacactgggcattttgggtctgatggagaagtcagccctgctagaacccaagtctcccagcctgtacagtaccagcacaaagcccagagatggccggagacttgcccaaggttacacagcacattgccagctgactcagaggtccccatcctgccttcccggcaccaagtcttgcaaacctggggctgagacatgtgagcagccccagaacagataaaacaaagcaggaaccacatcagcaacaaaggcaagacccgagctcccatcctgggaatcgagtggtgcctggctgggtgtccggagccgctgacgtcttgcctgatgaccttgggccactcctgaccttccacgatctggcttccaggatcctgggaaacaggatctcacatttccctctctcttggaccccagtgtatgtacagtagggccagtagcaagggttttctcatccttcccacggaccagtcacttggttcaagcaggtaccatgctgtttcaatgacccactatgtcatgtctcccctcttggcctcgccacctgggctgcgatcacagacaatctggcttgattctcgtcaccacacctcaaggcagtatcttatctcaaccagcaccacgatggggaaactgagacacgtgccccaggtcacacagtgactcgggccaccaagtgggaatctgagccagggattctcagaaattttctgtcctccccatgggtcccctccctcttcctcacttcatttggcaaacatctattgaatgcctactgtgtacccaactttcccaggtgctggagtctcctcaggcaatgcctttgatagact

SEQ ID NO: 1560359 - DNA, 4001 bp, Homo sapiens
ctctgtcatgcagcctggagtgcagtggtgccatcttggctcactgcaacctctgcctcccaagttcaagtgattcttgtgcctcagcctcccaagtagctgggattatatgcatgtgccaccacgcccagctaatttttgtgtttcttgtagagacagggtttcgccatgttggccagactagtctcaaactcctgtcctcaagtgagtcgcctgcctcggcctcccaaagtgttgggattacaggcatgagccactgtgcctggacaagaaatttctattattatttttctctcaacaaattatcaaacatctgttacatcttgacaggcaacagataagcatgaataaggacatgggtcaccaatctcactgggggacagatgacaaagtaggaaacaaaacagcctggcattgtggcttgtgcctataatcccagctacttgggaggctgaggtgggaggatcacttgaacccaggagttcaaggctgcagtgaggtatgattgcatcatggcactccagcattggcgacacagcaaggctccgtctcttgaaaaaaaaaaagtgagaagtgctatatatcatatcacactgataagacagagtaactagggcatgggtacttcagctgggctgaggggaatgggattgttagggacatgacatttacactgaggtctgaaggatgagaaagagccagaatgtttgctgggaaagcacttcagacagagggaacagcaaatgtaaaggccccgaagcaggaatgagcttggttgtttgaggaaccacaagaaagccagtgtgggctgggcgcggtggctcatgcctgtaatcccagcattttgggaggctgaggcgggtggatcacctttcaggagtttgagaccagcctggccaatgtggtgaaaccccgtctctactaaaaatacaaaaattagctgggcttggtggtgggcgcctgtaatcccagctagtctggaggctggggcaggagaaacgcttgaacccgggaggtggaggttgcagtgagctgaggtgcagtaagccattgcactccagcctgggcaacaagagtgaaactccatctcaaaacaacaacaacaaaaagaaagccaatgtggctagaatacagggaggaagggggaagagaacacaaaatcctgggagccaggagtcctagtgatctctaataaatgcttaacaaataagagcttggcaacagatgaggccatggtgaggggtttggattttagtccatatttggtgggaaaaagacgtgaagagacacacctaatttgtgggtttttttttttttttttttggacaaatgtataaggacctccttaattccctctgcccggttcctaccttccaggtccaccccgtggcgctgggccaggtgaagaacattgtccccgactctgccactcactgggatccgctggcctgagcggtctacgaacaccacgttcaccctggggacagatggaagtgcgaatgccgaactggatgatgggctcagggcccgggtagaatctagggttaggaagtaggaattgaggcttgacgcacaggtactgaatagggcaaagcagaagggggacctcgagatgaagctacagggcaagatggggaccagaggaattccgtgggatgaggaatgggggacttggccccctgcactcacacgtccccgggccgctccgggccgcccgcgtcctcctctccagccgggcgcgagcctggaaaacacggttcggtgagcggctgcgccgagccccgccccgccggcatctgacggattaacgctgcccgccccgggcgccccaggtacctgtcgcttgaaactttctggttgtccccagcgccaccccctcccccgacccggaagtgcccccaggtctgttccaccaggtgcccctggcagcctgcagtagaaccctggcactcacgcctccccgggccatggaggcggccatgacatgcatcacgtgactcaccgactgagcatgcgccgcgccagggaggcgagggaaagcccataatcaatggaacataagcgcagatgtttgcttagggcctgcggtgaccaggtgggaagagcagggcggaatccatctcaggtaaacccgcggggccatcccagacctcccactcaagcccactgtttgtcccaagaaccagccaactctgatttctttaaaaccatttacttacaaactttaattcagcaaaggtccgtgtggggagactggggtggggtcgggggaatagtccccttggagtggatgtggacccccagagtcaagggagggaagctggtggcccagttggctgggggcaaggcccagggtcacctcaggtcgacaggtcctgctggtgggcgggcccagagtttatcttcatggagtgctggtttctggcactgggctggaaggaggccagctccagggatctggccgggggtgggcaggcagaattcaagaattcatcttcaacaagcgagtgacagcagaggctccgggagatgggcacaatgtccgactcccacagacagacagcaggggactggcagagaaagcccatctctgcacggaggcccgggtaggagggggtggtggggccggttcgccaagatgaaggctttccccttctactgtccccagggtggagatcctgggtagggtggcccaatccctaggccagagctgtttggtccatagtcaagctcccagagcttggcatctgtggctctggccagcagggcctggggcccagcttttaaggcatcagaaggggagggggctgcggcagggaccccgggccccacggctggggtataggccagatgggcaggcaggggcaggagacagccatgcctgcagcaaatgtgggaaaaacagctgtttcaaaccgcaaggtgtggaatggtggcccggacaggccgggccttgaaggaatcagagctgggggctgtccggggtggtttgaaaaataaaacttagaaaaggaaacagaagtcagttgtcaaagttaaaaaaaaaggagacagtctctgtatcttcacgggaggtcagggaaacctccaaggcactcgaaaggccaaaattacaggagcaatgaggcaggagggctccggagagacgggcacagcggaggaggagatggggggagggagggagagcaggccggggcccctctctcttaaggctgcagggtttcagcgtggggagcaagccagagacataatgaggcctccagactcccccacaccccttgggctcctggggctccggctgattggtcagtaaagtctttcagagatttttctattaccgaaagagagaaaatggtttaaaaaaaacacaaaacaaaacatcagaaaacccaaaagcgatttggtgcaggcccttgagttatctctggtgccagccacttagaaaatcctcttccgcttcaggtaggagtccgcgtagtggccgccgaggccctgggagtgctggcccacatagctgccttctgggctgggctcgggcgagggcagcaggtgggcaaagctgcgtttctggccgcccagtggggtctggagacagagggcagggcggggcgggtcaggggccgctggggggccggggcttcccagccctgcatgtccccaccccctgcccgtaccttcagcaggtggctgtgaccattaggcccggggctgaggcccaggagcccttctccggaccccagcggggaagagccgattgcctgggagaaatggagaggtggaacaggtcactccctgggggccagaggaagcacccaccccgcccccctgccactgccccccagccctgagggaaagcgaacagtttcaggttcaaatcttgcttctgctactttctagctataagacctagggccaattgctccattttatttgagcctcggttttctcatctgtcagatggggccagtagcacccacagcctgggctgtagagagaggaag

SEQ ID NO: 1560360 - DNA, 4001 bp, Homo sapiens
agcagctcgtaggccgtcttcttgaaggcattggtggcgtccatgtgggcccctgcttcgatcagggcattcatgatggccgggcagttgttctgggctgctatgtgtagcggggtgttgttgtcaaaatccctgctgtccgggtcggccccgcagtcgagcagcactttgaccacgtgcagggaggggaatctgcccacgggatagcggcccacgtttgtggtgtccttgtccacagccatgtgcagaggggtgaagccgttcttgcccctgggcgcgcacttgagcaggcggtagacggtctggtgcttcaggtgctcctggctgggggtgcactccactttctccagcaggtagagcaggtggaggatgatggccagcgccttggtgaactgggctgagtctccgggctccctgggcagctgcagggcccgttccacttcccggacccctttggtgagaacccccatgaggtctgcaaagccgatctgggtgcccaggctgcctttggcggcccggtcctgaagcacgtaggagaagagttccgcgaaggagaggaagctgctggcggtcatggggctcagaggctccaggttgctctgttgcatgtccagggcgtacttccacaagcggatgcagcgctcgaaattgcccgagtcggcgtacacggcacccctgtaacggatgtaataggaagtgtccgggtgcgagggaccgaggatgcgctcccggatcaacagggcctgcatgcgcatctcatccgggtcggtgatcagcgcctccagctcctcggtggtgttgacctccctggaatagtcataggccaggaccagctgtgggggctccggtttgggcaggtactcgcccccctggtgacgcagctccatggcccgcctccagtgtttaagggccccaagcagatctcgtttcttatccacatacgtagctcccagcaattccaaggcttccacggcagcttcccggctggtgggacagcagctttcgtaagattccccgttcagtggttcctctggggaggagctgcagcacggagccccctgaggctgcgcacacccctggctggtggaggggtcttcttggggcagcccaggctgagcctctccccctgcgacctgctcctggccgggctgctcctggatgaggtactccacgatgttggtgtggcccgtcacgctggccgcgagcagcggggtcatgccgtagccgtcacgttccatgcgggccttgcaccccagcagcagctgcaggatctccaggctgccggactcggcgcagtcatgcagggccgtgttgcccttggcgctgcgccggttcacctgggcgccctgctccagcaggtagcgggcgatctcacggtggcccttgtagcacgagatcatgaggcacgtgtggccgtgccggttggccacctccaggtcggcctggtgctcgccgaccaggtagcgcaccacctccaggtggccgtcgaagcaggcggcgcggagaggcgtggagttggtgcgcgtggtgcggttcaccgaggccccgcggcgcagcaggctccgcaccacgtccaggtggccggctgcggaggcggcccacagcggcggcgcgccctcgatggtctcgccatcgaagtgcaccgagccaccggcctccacgctcgcgccgcaccggtccaccaggtactccaccacgtccaggtggccgtagcgggcggcgatgagtagcggcgttcccccgccggccacctcgcccgtcagctcgtccagttcctcccggctccggccgctgagcagcttctggagcagctgcagcttgccatcacgggcggcgttgtacacggcggtgcggaggtccatggttcgggcctccgccaggccatgggccggccgccgggggacggggagacggaggatcagagcccggacgggcgggaggcaaccttcaccgtccccctcgccgccatcttagggtctcctcgggcggaacaaaatggctgccgcgacccgacggatggcagcacgccgggaaatggagtcctttgcgcgggcccactccatagaacagaaaaggaatcttgggggctcaagactacacttccccaaaggccacaggacagcccctgagagctgtgagcgcgcggcatggtgggaattggcgttccagtcgcagcgcatggcatcggaagctagcaatttgaggactacaattcccgtcatgcagcgtcacacgacctagcttgtgggaaccggcgaaatttggtgacgtacttcccgtggctatctctgcgtcagagcgtatagaaaaagcaggcgcgatacccttaaggactacatttcccaaaagggatcacgagcgactctgagccaatcaggaccgagaccgaaggctaaaagcgactagaggggacgcgtctgttttgggcttggagcacgggcaagcggcccaccggcagggggcgcccggaggaggccgaaaagctggacggggcgaaaacgttttgagctgggagaacggtaaaaaatgacgcgctcacttcttattctcacattcatatattcatttattcatttacatacatttatgtatattctagtatgtgtcagaatttccttcttttatttacgtatttatttttatttatttctttcaataactttgtggggttttttggttttggtttttgtttttgagacagcgtctcgctcttgttgcctaggctggagggcaatgccgcaatctcggctcactgcaacctctgcctcccgggttcaagtgattctcgtgcctcagcctcccgagtagctgggactacagacatccaccaccacgcccggctaatttttgtatttttggtagagacgggtttcgccatgttggccaggatggtctcgaactcctgaccttgggagatccgcccgcctcagcctcccaaagtgctagaattacaggcgtgagccactatgcccggcctgacgtgctgacttcaattcctttggataaagacccagaagtgggattcctggatcacctggtagttttatttttaaatttttctttggaacttccataccattttctataatggctatactaattaaaattaccatcagtagtgtataagtgttctcttcaaatccttgccaacgtttgttacctttcgtctttttgatgatagctattctagcagttgtaaggtgatccattccctggcattttttgacaacaatgaattatattatgaaaaagaaatctttggtgacccgaattctttatttttaaagtttattcgaggtgtaatatatatacaataaaatgcatttttaataaagaggacaggtttggccgggcaaggtgactcacacctgtaatctcagcactttgggaggctgaggtgggaggattgcttgaacccaggaattcgagaccagcctgggaaacatagcacatctctacaaaaatagaaaaattagccgggcgtggtagcgtgcacctgttgtctcagctactcgggaggctgaagtgggaggatcgcttgaacctaggaggtcaaggctgcagtgagccgtgattgcaccattgtacttcagcctgggtgacagagggagaccctgtctctaagataaataaataaaaataaataaagagaacaggtgtgacaaacatgcagctatgtagccagtatcacaaccaagatgttcaacagcgtcttcattcagaattgttatctcatgccggccgggcgcggtgtctcacgcctgtaatcccagcactttgggaggtcgagatgggtggatcacgaggtcaggagatcgagaccatcctggctaacacggtgaaaccccgtctctactaaaaatacaaaaaattagccgggcgtggtggcaggcgcctgtagtcccagctactcgggaggctgaggcaggagaatggcgtgaacacgggaggcagagcttgcagtgagccgagatcgcgccactgcactccagcctgggcga

SEQ ID NO: 1560361 - DNA, 4001 bp, Homo sapiens
agaatacagcacataatatatataacatacaaaatatgtcttttttcttttttttccagagacaggatcttgctctgtcacccaggctggagtgcagtggtgcgatcatggcattgcagcctcaatcctgggctcaagggatcctcccacctcagacccctgagtagctgggactacaggcacgcaccaccacgcccagctaattatttttatttttattatttgtagaggtgggggtctcactatcttgcccaggctgctcttgaactcctggcttcgagcagtcttcccgcctcggcctcctaaagtgctgggattacaggcataagccactgtgcctggcttcaaatatgtcttactcaattgtttatatactgggtaaagcttttggtcaacagtaggctattagtagttgaactttgggggagtcaaagtcatgcacagattttccactgcgtggggttcggcaccccatccccacgttgttcaagagtcaactccgtagcctttgcccatcactgcgggaccttgcattttccctccccggctgaagcatcttttcctgccagcctccgttccaagctccaaggctgcccccttgcgagtttcacatggtataacagcgtcattatcctgcctcctgcctcctctcctactcggaaatcaaatgttctctcctgggaactgatttcagagtagctgtcctcaagtgcatcaccggagtggcagttcctgtgggtcagaaacagactgcctcctccttcccgtaagtacaaggcctctgctcgcggcccacggaagacaggcaggtgaggacgtgcagaggggagagaaagataggcgaggaagggacaaacttcctcgacacgtgcaggggcaaacttacctccccctgccaccgtgctctggctcggtgctcctctcttgactggggtgctgccctcagcaggcgccgctctctgcttgagtggctccagggaggcctccgggccaggctgccctgcagttcctccgaagcagccccccgcaggggcctggagaagcagccgggccctcctgccccatgctccttcccccgagcagtggcgttacttctgggacttgcccccttgcgttcttgccgcacacactgtcttcaggccaggaccccttcccaagtaaccggtcaccagcggattaagcaccacactccaggcacccgtgatgagccccagcttccgccaggagcctcctagattggggtacaggaagctggccacgttggaggcgttgtagggtcctacgcagagcagcagcgtgaggagggccccgccggccacccaggcggcccgcagcttccgcctgtgcgtcaggccggagcgggccagtgcccggaggcagcccacgtagcagaaggctgtgatggccaagggcagaaaaaagagcaggagagagaggctgaagcgggccgggccggcagaggccgggtcccaggcctccaggcagaccggagagccgttgaccggtgtgttgatgcccagggaggtgttgctgtggtccagccagcctcctggagcctccaacccaaagaccagacccaggtgacacaggacgagggcccagatggccgcgcacaccccccaggaatagcacggcctccggaaggcttggtagcccaaggggaaggctgctcccaggtagcggcctgcactcagggcggccaggaagcccccgccggcatagagtgggaagaagtgggccaccgcgaagacggggcacagcgaggccggcagaggccaggccccggaggctagcgcctccaccgccttcaggggcagagagactgtcagcagcaggtcggagcagcccaggttcagggcgtagaccaggctaggggtgagacggagccgggcgtgggccgtcgcgcctcggatggccaggacgttgagcgggaagcccagcgcaaaggcggccacatagaggccgaaggagagctgcgggggcaggtccatggggccgccgtcctggcctgcacggctcctgtgtgcaacctggctccctgtcctcagatcttggggccccggagaggaggggctcctgggatcactcgcgggttccagccctgtgtggagaattacaattcacctggtgggatcagggaggaaacgaggcccacagagaaaggcagcagtcagggagcagcggagcctggatgagaagccaggacctgtggcccccagtcctgtgctttctctccaccatgtcacctcttaaaaccagggaagctcctgcagcgtcacaggagataggatgtggcgcacaggtcccagaggaagaaagcttctcgatttctgagactctgtggggaggaggggtggagagaattcagaacagggctgggcccacagcctgagccttccctgggaatgggagtttgactcctgagcccactgccctccctggttccctggcaaggcaggagctgcccccaccccccacccacattggaaagccggcggggcagcagggaggagaagggtgtggataaggtgagggtgtggccagggacaggaaaagggggtcccccagggagagcccaagggtcagccaggccccatccatgtcacggttgagcttagcagttctcaggggccacctgggcagggggtctgggggtctggggaacagtcaggtgaagagaggagccacagagagagggacccacctcctggtgctgccagatgtctctgaggctcagcagtcccctcagcgggctgatggaggatgcccgggatgggcagtgagccggaaggggaggagggcgggtgacagggccattagcctgaggttctagcagcttgggtgagcagctaatggggcatcccggctggaggtgaggccacgccagaggaggtgaggggctgggaagatgcaggaacacagaggggccagggaggaattggggtcctgtctgggtaggggccgagtgtgtagccagtgcctctcaagagcagggcttgggggctcggccacaacccagcgctattccctccccagccctcctgcctgttcacacctgcgctggggccaggtcttctccacccttgatgcacccctgggcaggtcccgggcctcactggctcacccctgacaacacagggtgccctgtgactgcagccatgaagccatctccaagtggcagtgggtgtgtggggtaaggagtgatcacacccgggtgcggttctgcacaggctgtgggcttgttttagtttttgcgaggagggcccctctgttctccctctgcttccgcactagccccatggtggtggcttccgaccttcccagggctggaggaaggagcgggaggaggaaggcaaggggcgggggcagcctctgctgaccagcactggagggcccaggttgtggcccccactctgcctgtcaaggggtggcacagatgtccaagccgactccccccagggtgcatggctggggacactgggggacactccccaaggcacagggaatgtggcaccggccggctgcgtagcttccttctctcagccctggaagtcctcccagcctttcatgtttcccactggggtcacctgagcctcccaggaggacctaaggaagatttctaacctctctggatgctctctcaggtgtgcccacgcctgctggtgagaagccagctctgctctgtgattctgtctctgtctctcaatgtgcccgtgtctttctgtctgtctgtcagtctgtctctatttcctgcctcagaatgacaacacagctctccacatcagttttctcaggcgtgtatgggtcacctgaccactctgccccttccgaattccaggtcccccatcataaacctctctctgtgtggcctcctggcagctctggtcaccaggcttcaggggggacagcaagggggtctcagcctatcactaactccctcaaagacaccatctcactgcttttcatacctcggagccactaaattggtccatgctcgcctt

SEQ ID NO: 1560362 - DNA, 4001 bp, Homo sapiens
ctgtatgagggagtgccaatctctgattgctgggtaccaaaccacatcctggcctgtgtggggtaccatggaggaaggagataagacccagacccctggcagctcccagtttagcaggggagacaagacaacacatgaaaacaaacagagcacatcaaaaaggcaacaggtcaaaccaatgcagggaaacccctatcattaaaggtctaagccctgaggcctccctgctcatctccaggctcagaacctttctgagtcttctttgacctcatttagtatttctcttccatctctctcttgttggtttatctccaggatcaaccgctagagcagtgtctaggtgttgctttgaagcttgtatcgagatttctctaggactctctgcttcagcctggccatccccaactaccagccacatcacaaggactggacttgtgttagctacgctgcttctccagcctgaaggtgcttctttttttttttttttttttttttaaatggagtcttgctctgtcgctaggctggagtgcagtggcgtgatctcagctcactgcaacctccaactcccgggttcaaggattctcctgcctcagcctccagagtagctgggattataggcatgtgccaccatgcccagctaatttttttgtatttttagtagagacggggttttcccatgttgaccaggatgttctcaatctcccgacctcaagtgatccacctgcctcagcctcccaaagttctgggattataggcatgagccaccacacccggcaggtgcttctatacctaactacttcttcgtgcatctctgacttatgctcctttgagtaggacaattcagtcaggaagggataccaagctggtgaaaggcatttttttcaaagtcgcagtcctgggctgggtctaaggatttctgaatctggatgggagccttcctgctccgcctctcccaggcttcccagctcctgtgtaacccaggcgacctctgaaggtccagggaaactgctactctgtagtgaagtccgaacttggcatcccttctccttgacccacacccctgtcctcatttgtcccctctgctgtgtctttgcctctgcgtcccaacagggaggagccctgattccgcagcacctgcagccctctcccaaatgccctgcgcaccactgaagaagagaaatagaagagcagggggtccagactggcgttgagtgaactgaacaccacggctattgaccgccaccaggggctttttctctggtgataccccaccaggtgggacacgttgtaaggtccgaagcacaccaggaaattgagcagcgtcaccacagccagccccacggctcggcgccgcctctgggcccccacaaggggctgggagagcatgatccacacaaaacgccagtagcagaagatggtgactgccatggggatgaagaagagcaccaggcacagctccagccgcacgggcagcaccacgtccaactggttatcggtgaagttctcgtagcaggtaatttcattgccacttctgacctgctcagtcgtgttcaagtattgaacgatgatcacgatggtgcagtgaccaaaggacataacccaggccaccagagctgcaatcactccatacagaggccggcgggagagcttgtactgcacggggaaagccactcccaggtagcgctcgatgctgatgcccgccaggagccacgtgctgcagtagatgctgctgtagaagccaaaactcgtgagggcgcagacgaccttgggcaggtaccagcggaagttcgacgcagcctcgatgatcttgaagggcagcagcagcagcaggaggaggtcggccagcgtcaggctcagcaggaggatgtgcacaggtgcaggctggggctggcggatccgccccacaaaggcccgcagggccaggaggttggcagggaggccagtgaggaagatgatgatgtaagccatgaggatcaaggagctcttccagtccggcagcatcctggaggggaacaaaaaagggcggggtcagggaggtctcactcacagcccgcgcagccagctctccttcaggatgcggacatcctccccggcaccgtccccttcccaggactgtgctttctgatgccaccacggcttgctcacaccacctgctcgaactacccagagcaattattgactttgcctggggcgggatattaagcagtagtgattatgtttgccatcatgtgtctctggaggagaccaactcgtggcttcccaagggaattccccctccagtttccctagcctttctcctcctgtcctcacagatacaggaagttactgttgccagtttctaactttactcaagtccctttctcagacagagacctgcaggagagaaaggcatcagtgccgggagagagctgtaagatgcttatcagtataaagaggctgtggcgccccaggcgcggatacccagtgccagctctccaaaggacccaagtgcccagccaccagcccagcttcctacttccgttcgtctgttttgcagagcacagattctcccccaccttgtcctctcctgtccaacaccaaactctgggactctctagaaaaggggaagctggggctgggcgcagtggctcacttctgtaatcccagcactttgggaggccgaggcgggcagatcacctgaagtcaggagttcgaaacaagcctggccaacgtggtgaaaccccatctccactaaaaaaaaaaaaaattagccgggtgatatggcgggcacctgtaatcccagctacttggtaggctgaggcaggagaatcgcttgaaccgggaagcagaggttgcagtgagtcaagattgcgccattgcactccaccctgggcggtaagagcaaaaactccgtctaaaaaaaaaaaaaaagaaaagaaaaggggaagctgggaggcttagaggagggtggaggggaagaaggatgaaccagcactagccttaggaggaaggcttgtccctagaagaccttagagaaatattcagaaaagcccacaggccttcactggcccttgagcgtggcattctgaccataaatagaactcgtcttcttcacggggtaactcagtttccacttggggtgtcacccttgctggccccaacccaggtcctgtccctctgtccactctccagccttgatttcctggctgtttccttgctcctcacactagctcctgtctctgggtatgagtcttccatttggttctgacatccttcctccagtctcccagaaccttcccctcaaacctgatcctggcctctcttcccagagcacaagcactacactagctgccttgccttgtgttgttccggataggtggcttcttgggattggttctgaagggaggtctgcaagcttccaggagagaggaacagagctttagcccctgcttctgtccatgccatgcaggaaaaaatggtgaggaacctggctggtagtaagcatttatactagcaccagccacgtgaccagagaaaggaaggtcagtctttaagcactatttcctctcaaacccaaaggaaaggcccagcatctttattctctccctagagaatcctcactcttgacttccaaattcagatttttctgtccttaattcctgatttaaaaaaaaaattcccaggcatttttctttttttacttcccaagtcagattattttcttttctctttcttaggcagtttcttctgtcattctgctcattctcagaaatgagctttcctccttcctttttatttttcctctttttttttggttttttttttcgaggctgaatcttgctctgttgtctaggctggagtgcagtggcgccatctcagctcactgcaacctctgcctcccgagtccaagcgattctcctgcgtcagcctccctgggatgacaggcacctgccaccacgcccagctaatttctgtatttttagtagagacagggtttcaccatgttggctggtcttgcactc

SEQ ID NO: 1560363 - DNA, 4001 bp, Homo sapiens
cctccagagtctggtgttttctccttccatccaccagtcccacccggcccaagcacaccaccagaacaaaacaggagaagaaggaaacactgttctcttttgcttgcttccacatttatttgggtaatttttcttctgtcattgttcataaatgtctctgatgatccacatttattgagcaatgggaactttctggaaaaggcgctgtgggagcagaatgcggcctcatccctggagccctgtctcccccgctcctgactcgctggctgggagcagctctgaggatggggttctcccctctcctgcccctgccactcactgggcagccccctcagaccctgggcactgctcttagctcctctgccaccctcaagaaaacacaggagctgcctgctgctatgaggacctcattgttctccagagcagcctctcaccctgaccccttcccagagcccaatccatagtgtgtgggtggatggggatggaggtgagatcgagagctgggctttagcgcgcatacccttagggaggctagatgtctactctgcccccaagccccatcgggccccagctcgccactccaagtccctcctggcgtgagcgaggaagcgccctgaggatgacatgccagctacaccctcctcccccggaggacctagctttcagcacaggccacctggccaccagttccacagccctgtgagtgttcactggtctttctttcagctggtcggtccgctctctgctcctcccctcccttctgctccttcagctccatgctgctctcctgctgccactggccccagagcccacacaacctcctcagcagctcatgaaagtcggcttggaacccggaggaggagaagtagtagacaaaggggtcgacacaggagttcagggtgctgagaagcgtcacgtagatcctccacgccgggctttcaccgcagatatagcccacgacatgggacacgttgtagggcccaaagcagacaaggaagttgagcagcgtggccgccaacagccccgccaccctcctctgccggcggtggctgccccctctgccgaggatccacaccaggcggctgtagcagtagctggtgatgatcagcgggaccacaaagaggaccacagccatctccagccgcacgggcaggaggatggctagctggtccttccggaactccaggtagcaggtcccattggtgccctggctgtgggagatgtcccctgagaattctatgacgtagaccacgctgcagtgagcagaggccaacagccagcaggccacactcaccagacctgcctgccccagcctcggccgggtcttgtaccacagtgggtgggccacactcaggaagcgttcaatgctcacagctgccaggaagagggcggtgagatagatggtggtgaagaagatgaatccagagagtgggcagaggatgaagggcaggggccagtgcatgccattggctgcctccaccatgcggaaaggcaggaacagcagcaggagcaggtccgaggcggtcaggttgagcaggagcacgtccacggccaccgggcggcgctgcagcttgcccacgaagaccaccagggccagcaggttgagggggagccccaccaggaaagtgagaaggtacaccgagaagacgaaccagtgattgccggagaagtaggactggtcggggcctgtatccatggtggtggccactggtgagagagagtaacatggagttggtagtgggggccctaacggcctctggccagcagcatctcccctaaaagggcacgaggtcactacgcccacccctcttgtctctgggtgccttccaggcggggtcagcctgcctgtcttcctgagcatgccctgtcccctgtcccttccccagcagagaagcaccaaggtgctcctccacccagcccctcgggcccaggctcacctgcttctttgagaccccaaatgctctgccgcacagcaccttgctgtctctccagacctagtgcagttggctatttatccggcagaactgataaagacctggccgtgcccatgacgtcactcactgttgagcagtggcacatagatgccttgagctccgttgccagggctggtcagcatgctaaaaggggaacaaattccacaactgcgtgcctccctcctcatgcagtctcagctgggatgctctaagcaggccccagccgacgtcttcctctccccttcttcacttgaattttgtctgcttctctagaatggcatttatccaatttgccttgtaagggcaggaagtgtgatgcaatgacagagagcgagctccgtgaggtctgtttcttcctgactttgtgatttgggggaaatgacttaaattctccatgtttctgctttctcccctgcagaacagagctcatcataatacccatctcatagatcaacgcattaacacatgcaaattaaaacaatatgtaggtcgattaaaagattactaatacatgttgagtggtttgacggaagcctggcgtgtggtcgtgagcaggcagcggatgccagctgctattttccctgtcactggtgcaggattatctctggggtgacaatgtaataataataacaataataatggtggtggcgatgatgacagcagctgccttttcatgggcacataatccatagcagacactgcttctagggcaacgcttttatgtcataaaatccttgtccttcaccgtagggaagtgacttgctccaggtgatacagcttgtgaaatgtcaccactagggttcaaacccaagtgctgtccagtttcacaggtgatctattagttcattcaaacaatcacagggcacaatgagatatgatttcacatccactagaatggccacaagcaaaaagtcagacaatgcctatggtcggcgagaatgtagagagataggggcctcattcactgctggtgagaataatgggaggtggtgtccctgctttggaaagcaggtggcagttgcttaaaaagttaaacataaattcaccatgcgatccaacaattccaccgtaggtatttacttaagagaagtggaaactcaggtctacttaaagactcagtcctaaatgttcacagcagtgttggtcatagtcaccaacagtggaaatgttacctggcagcccatcagctggtgagtgaataaaaaagtggcacatccatatactggaattctatttggcaaagaaaaggaatgagctacccatacacactacagccttatgttgagtgaaacaagccagacgtaaaagaccatgtacatatattgtcagatttcatttatttatatgatatgtccagaataggcaaagttatagagtcagaaagtagactcgtggttgtctgggggatggaggtagaaatgaagattaagttgtttttttttttttttttttttttttgagacagggtcttgttgtcgcccaggctggagtgcaatggtgcaatcttggctcactgcaaactctgcctcccgggttcaagaaattctcatgcctcagcttcctaagtagctaggattacaggtgcccgccaccacgcctggctaatttttgtatgtttagtagagatgaggtttcgccatgttggccaggctggtctcgaactactgacctcaggtgatccgtccaccccagcctcccaaaatgctgagattataggcgtgagccaccccgcctggcccaagattaagtttaaatgaacatgaagtaaaatcctttactagggtcatgaaaatgttctaaaactagctgatggtaatggactcacacctcagtaaatttactaaaaatcattgaattgtacacttaacattggtgaatttgatgatatgtacataatatctcaattaagctgttaaaagtgcagcagtaggctgggtacggtggctcaggtccgtaattttagcactttggcaggctgaggtgggaggattgcttgagcacaggttgtttgagactagcctgggcaac

SEQ ID NO: 1560364 - DNA, 4001 bp, Homo sapiens
ggcaggaagcgagctggtcctcggggtgcagggtcccggtgtggggacttgttccctggcaggtgcagcgggaggccgtgggcttcggactggtaaacattgtatccgtcctcaagaagcagctcccggaagctgcaggcctcagggtcaaagtggagctaggggacaaaaacaggatcagagacagggttcctctgttttcctgatgtaagacccaggatccaggccccagccctgcctccctcagacccaggggtccaggcccccagcgcctcctccctcagacccaggggtccagaccctagtttctcctccatccgacccaggagtccaggcccccagcgcctcctccctcagacccggggttccaggccccagcctctcctccctcagacccggggttccaggccccagcctctcctccctcagacccggggttccaggccccagcccctcctccctcagacccaggggtccaggcccccagcccctcctccctcagacccaggagtccaggcccccagcccctcctctaggaaacaaaacagcaaggcaggttttgttttttaccccagggctctcctgcagggacctgcctcccagttcagacttcacagagaacattccagccctcggagccatcagtgctctctcaggccaggcggggtgtctccctagcactcaaggtcctggtcactttactggccatggcttccccgagtgtccctgtgcccagcatgagccgtgcacacaggggccgtgtgggcaggagcaggggttactgaatcacgagactcccaataacctgagcctcaggccgctccagcatccacacatcacatgattgaggtcactggcgccccggcctgggcctcagtttcctcatcttgcaaacactgatgacaacttcaacctccaaatgttgcagctgggggcgtgcagagcaaatagaatcaagtctggctccgggggggatgagcaagacaaggcaccccaggctgtgagggcgacatataggaggagcatggtgggtggtgaggagggtcctggaaactcaccgatccatacagggccccatctggccgctggcacaggaacctggatgtcttgactcccaagatttgaataactcccggcttcaaggctttcagctgcaggagacctaaggggtgaaagcgataaggtggttcgaggacctctcccacccgggactgtcccaccacccgactctgtcccaccatccggctctgtcccagccctgggagtccaagcccacagcctacctcctccctcagacccaggagaagcccaagccaaagccccctcccaactcagacccaagagtccaggaccccagcccttcctccttcaaacccaagagtccagacccccagcccctcctccctcagacccaggggtccagacccagcccctcctccctcagacccaggggcccagatccccagcccctcctccctcagacccaggagtccagatccccagcccctcctccctcagacccaggggccaaggcccccagcccctcctccctcagacccaggaatccagacccacagcccctcctccctcagacccaggctctggcccacactcactttcggggctctggtcagcagcgccccccaccgtcccatcctccctgatctccaggtgggcttctgtctgctgggcatcatctgtgtagaggtaccgctgccggacttggcccccgaattgcaggagaggactggagtcagggatggggtgtgcctggcaggctcccagcagaagaccagccagcacagaaacccacagtcctgagtgctcgaacccggtctcgtccgagtccatcaatggctcgggtcctcaggtgatctccggggtgtgagctcggagaagctgagtggtttagaattggtgccagattccagttgtccaggtgagtagactcaggtggcctgagtgcctggctcctctttcggctggatcctcagctgacagaacacccttgttttttgggatagatgcagaagctccagaatttatacccagacaggcccgcccaatcaccctccctgcgcctgaaccatgatatttgacccatttggcaggagctacagaattccatcgtggcaagggcagcctgaatggatgatgtaacctggggtcctttcaatggagggccagactcctgggtctaggggatgagggaggggaggatcgggttagctgggacccaggtgaaaggggctgggggcccacattcctgagtctcagagagaaggatctggggtctcaagcacctgagtcggagggaggaggggtgctgggctcctggaaaaaccacctcttggaccatctatgcagatcacgcagaacaagagaaatttctgcgccccatctgaatttctaagtttggggggagggcgtgatctgacactgaggttccttgatcctcagcaaggcggcaattgctgtatgaaagaagcgaccgcatctgagacacaagtatcctgccttggaagcctctcacctggccgtgggccaacctcaacctcatctgtccctgctcagatgctcagaccctggacatcccagcctcctcctccctgatgcaatcctggtgtttctttcaccagagaagccatcccaggcccaggcaggtgctcctgaaataacctggggggaggggtggctgaaagtccctgactggagttggcagccaagccaggccctggagtgggcacccagagggaagacaggttggctaatttcctggagcccctaagggtgcaagggtaggccttctgtgtctgagggaggagggctggggctctggactcctgggtctgagggaggaggggtggggggcctggactcctgggtctgagggaggagggtctgggcctgtactcctggatctgagggaggaggggctggggaacttgggctcctgggtctgagggaggagggagctttggtctggactcctgggtctgagggagtaggggctagggatctggactcgtgggtgtgaggaaggaggggctggggtcctggactcctgggtctgaggaaggaggggcagggggcttggactcctgggtctgaggaaggaggggccgggagcctggactcctaagtctgagggaggagggtctgggggcctggactgctgggtgtgagcagaagggtctgggtgctgggagtcccgagcctggggagatgatggttaaacttctgggaatcaagtcaaactcctgagtctttgacattgatgtatcttgaatgggagggtcagtctgtggggaaggattacccaggtgccgaggcaagagactgaaggcacaaactgtttcagtataataaagaaaatagttagaataagaatagttatcatacaaattagatatagagatgatcatggacagtatcaatcattagtgtaaacattattaatcattagctattacttttattctttgttgtataactaatataaccaggaaacaaccggtgggtatagggtcaggtactgaagggacattgtgagaagtgacctagaaggcaagaggtgagccttctgtcacaccggcataagggcctcttgagggctccttggtcaagcgggaacgccagtgtctgggaaggcacccgttactcagcagaccacgaaagggaatctccttttcttggaggagtcagggaacactctgctccaccagcttcttgtgggaggctgggtattatctaggcctgcccgcagtcatcctgctgtgctgtgcttcaatggtcacgctccttgtcctcttgcattttcctcccgtactcctggttcctctttgaagttcgtagtagatagcggtagaagaaatagtgaaagcctttttttttttttttttgaggcggagtctcgctctgtcccccaggctggagtgcagtggcgtgatctcggctcactgcaatctccgcctcctgggttcacaccattctcctgcctc

SEQ ID NO: 1560365 - DNA, 4001 bp, Homo sapiens
cctcacccacactcgctcaccccggcctgggtgtctgccgctttgtcagctgggtgtacagttccctgcgtgcccggccagctccctgtcaaagtgaaagctcctcggggcagcctcccagcccgaccttccaggacacacaggaacgtctttgaggtggttgttctggggcgtctgtgtcacgatctcccctggccccttcctcgccctgcacctcccctcccctggcaaggtgcctcccaacaccgccgttcactgttctgcgcacccacctgcacccttgttcacgtcattcactgttctttttttttttttttttttgagacggagtctcgctctgtcgcccagggtggagggcagtggcgcgatctcagctcactgcaagctccacctcccggcttcacgtcattctcctgcctcagcctcccgagtagctgggactacaggcgcccgccaccacacccggctaatttttgtatttttggtagagacggggtttcaccgtgttagccgggatggtctcgatctcctgacctcgtgatctgcccgcctcggcctcccaaagtgctgggattaccgacgtgagccactgcacccggccaaccgttcactgttctgtgcacccacctgcgcccttgttcacgtgtctaactgctgcgcgcctctgctctgggagccccaggagggtgggcgtctctgtcaccactgggtcccccatgcggagcacagcacccacaaggtgcccgattagtgaccagcgaatgcacgaagggcaggagagccctcagctagccctcacccccatcaccgtccagctggggaaaccgaggcttggagagaggcagagactgttccaggtcaggcagcggagccaggcctctgccccggcccgaggccaccccgcctggccatgcccgccatggatggaccggcccagccagtcccctgtccgccctcgtcacgtgcggcctaatgagggccttggcgcccagatgaaagcggtgggaaggacagggggtgattacctgccctgatggtggtgattcaggcggcagccagcgggcccgggcccccttcccagtgccccccgcccggcggggacaccgactcccctggcctccaggtacccacatcccctgctgtgcccagcctctcctcttgctcctgacattccacaaacactgagggcctacctcagtgtgctcggcagaccctggggacagagacgcccgctccgtgacgtcctgggccctgtggggacccagctccgccacccctgtcagtgtgaccctgggcaggtcccatcccttctgtgtgcctccttgtcctcacctgccagatggggtgtctgggaagaagcagagggggccccgactcaggcagccctgactggattctgtgatgtcaggagtccggaggtcagccccccgccgcttccgccatgcagctgggcctgccccagcccctctggagcctcagtttcccacctgcagatgggtggccccacccacagggttgtaccacacggacgcttctctgcccctgagccgggtccgccgctgcagccttcgctttaacagtgcaaccctcccaccaggcaggctgcacccatctcacagaccacggaaactgaggccgaggctgcacagaggagcctccgggactcccccgcgggcgcaggtcaccgtgaagacggcggccgcgttgccgtcacccgccgcctccccaccccaggcccccgccgccccgcactcactgtcctggccgtggcgccagcgggtgccctgcacgcggccgccgggatccacgcgcaggaagaagtgagtggaggagaagaggcgccgccagcgcacgtcgccctccaggtgcgggtagctgcgcggtccccgcgacgcgctcggggttcccgcggcgtccggcgcccgcgccagcagcagccaggccaggcccagccacaggcggcggcgcatgacccggcacccggttcgctgcgcgctcgtcgctcccgggcgtccgcggctctgccttcgcgcggcggggccaatggggcgcctcgggggcggggccgggttcgctggggcggggacgccggccaatggggtgcctcggggcgggggcggggtccacttgggcgggaccaggctagggcgccggccaatgggacgtctcgggggcgggggccaggtgcacaggggcgcggccgtgcgggactccgcgctcggcctccgcgcgtttgttgtttgtctcgcggggcgtgtccgtgagtcagccgagtccccgggcgggctaggacctcgggttgcgggggcgggagtgtgagacgcgggccgcagagacctggagggagacagagacccggagggagacagagacagaaagacggcggcagtcaagagacacaaggaagatgaccgggagagacgagagagacacagagacagagaggggcagaggcggagatgcttggggacagagatggacacgggaggtcctgccgcgtgcgtcagccgtgggaccagccaggctccggggcatgccctcgtgggacttctctccccgcaaattgtagtttcccgaaagccaggcccacaagggtgtgggaatgcgcgggtgggtgggcaggtgacgactggggacgtgtgtttgggcaggtaggtgggcaggagggaggatagccacgtagacctgtcggtggccggctggcggggcacgtcggaggcggcaggaatggggcggccccattcgcacccacacttgctcctcccttagagccataccccaggccccacggggaaccacccagcaaggcggctggcccccacccttcctctgcctgccccatgcgctgggccccaaaaggtgagcacagtgaccctcacagactcacagccaagtggaggcattgacaactggggaaaccgaggcctgagaggggcggcgacctccgctgtggggacacagctcccagcagcccagtcctggccctgcggccacagccccaggtggcacccacctttaaatagcaccaggctgaagacatggcgaccagcctgtcctgccggggagccctctggagggataaccggtctggctggacgctgggatgccttcttggtggctcaggcatctcctgaccctctcttcctggcttaggcgggtcacacagagggtgtggcaggtgccacagtctcagggacaggggtccccatggctgaggtccagcctggcctggcttcccacactagagccctgtggccaacaccccaagcttcggttccgcctctgtaaaatgggccagtaaagagacgtctggaggaagacaatgagaccctccacggagcacgctgggcagagggcgcggcaccagacactgaagaaatgtccaccgccttctcgccagcaggagcccaggtcttcccttcttagagtgtccgccccccaccgcggaagggtgatctgagggccttgtgagaaatgatggggatgggacccacagcggtgagactggccccaccccaggcgtctgagtttctttaatgacacctcggaaacatcactcatataccacacaattcacccacttacactgtacagttcagtgattttattttattattatttctttgagacggagtctggctctgtcacccagactggagtgcagtggtgcgatctcggctcactgcaaactctgcctccctggttcaagcgattctcctgcctcagcctcctgagtagctgggattacaggcacctgccaccacacccagctaatttttgtatttttagtagagacagagttttaccatgttggccaggctggtctcaaactcctgacctcgtgatctacctgcttctgcctcccaaagtgctgggattacaggcatgagccactgcacccagccagttcagtgattttagtacctcgtagagttgtgcaaccaccacgactgtctagttccagaagattccatcaccgcaagaagaagccccatcagctg

SEQ ID NO: 1560366 - DNA, 4001 bp, Homo sapiens
tccagcaaggaccctggggccagccgccactcctcacccacactcgctcaccccggcctgggtgtctgccgctttgtcagctgggtgtacagttccctgcgtgcccggccagctccctgtcaaagtgaaagctcctcggggcagcctcccagcccgaccttccaggacacacaggaacgtctttgaggtggttgttctggggcgtctgtgtcacgatctcccctggccccttcctcgccctgcacctcccctcccctggcaaggtgcctcccaacaccgccgttcactgttctgcgcacccacctgcacccttgttcacgtcattcactgttctttttttttttttttttttgagacggagtctcgctctgtcgcccagggtggagggcagtggcgcgatctcagctcactgcaagctccacctcccggcttcacgtcattctcctgcctcagcctcccgagtagctgggactacaggcgcccgccaccacacccggctaatttttgtatttttggtagagacggggtttcaccgtgttagccgggatggtctcgatctcctgacctcgtgatctgcccgcctcggcctcccaaagtgctgggattaccgacgtgagccactgcacccggccaaccgttcactgttctgtgcacccacctgcgcccttgttcacgtgtctaactgctgcgcgcctctgctctgggagccccaggagggtgggcgtctctgtcaccactgggtcccccatgcggagcacagcacccacaaggtgcccgattagtgaccagcgaatgcacgaagggcaggagagccctcagctagccctcacccccatcaccgtccagctggggaaaccgaggcttggagagaggcagagactgttccaggtcaggcagcggagccaggcctctgccccggcccgaggccaccccgcctggccatgcccgccatggatggaccggcccagccagtcccctgtccgccctcgtcacgtgcggcctaatgagggccttggcgcccagatgaaagcggtgggaaggacagggggtgattacctgccctgatggtggtgattcaggcggcagccagcgggcccgggcccccttcccagtgccccccgcccggcggggacaccgactcccctggcctccaggtacccacatcccctgctgtgcccagcctctcctcttgctcctgacattccacaaacactgagggcctacctcagtgtgctcggcagaccctggggacagagacgcccgctccgtgacgtcctgggccctgtggggacccagctccgccacccctgtcagtgtgaccctgggcaggtcccatcccttctgtgtgcctccttgtcctcacctgccagatggggtgtctgggaagaagcagagggggccccgactcaggcagccctgactggattctgtgatgtcaggagtccggaggtcagccccccgccgcttccgccatgcagctgggcctgccccagcccctctggagcctcagtttcccacctgcagatgggtggccccacccacagggttgtaccacacggacgcttctctgcccctgagccgggtccgccgctgcagccttcgctttaacagtgcaaccctcccaccaggcaggctgcacccatctcacagaccacggaaactgaggccgaggctgcacagaggagcctccgggactcccccgcgggcgcaggtcaccgtgaagacggcggccgcgttgccgtcacccgccgcctccccaccccaggcccccgccgccccgcactcactgtcctggccgtggcgccagcgggtgccctgcacgcggccgccgggatccacgcgcaggaagaagtgagtggaggagaagaggcgccgccagcgcacgtcgccctccaggtgcgggtagctgcgcggtccccgcgacgcgctcggggttcccgcggcgtccggcgcccgcgccagcagcagccaggccaggcccagccacaggcggcggcgcatgacccggcacccggttcgctgcgcgctcgtcgctcccgggcgtccgcggctctgccttcgcgcggcggggccaatggggcgcctcgggggcggggccgggttcgctggggcggggacgccggccaatggggtgcctcggggcgggggcggggtccacttgggcgggaccaggctagggcgccggccaatgggacgtctcgggggcgggggccaggtgcacaggggcgcggccgtgcgggactccgcgctcggcctccgcgcgtttgttgtttgtctcgcggggcgtgtccgtgagtcagccgagtccccgggcgggctaggacctcgggttgcgggggcgggagtgtgagacgcgggccgcagagacctggagggagacagagacccggagggagacagagacagaaagacggcggcagtcaagagacacaaggaagatgaccgggagagacgagagagacacagagacagagaggggcagaggcggagatgcttggggacagagatggacacgggaggtcctgccgcgtgcgtcagccgtgggaccagccaggctccggggcatgccctcgtgggacttctctccccgcaaattgtagtttcccgaaagccaggcccacaagggtgtgggaatgcgcgggtgggtgggcaggtgacgactggggacgtgtgtttgggcaggtaggtgggcaggagggaggatagccacgtagacctgtcggtggccggctggcggggcacgtcggaggcggcaggaatggggcggccccattcgcacccacacttgctcctcccttagagccataccccaggccccacggggaaccacccagcaaggcggctggcccccacccttcctctgcctgccccatgcgctgggccccaaaaggtgagcacagtgaccctcacagactcacagccaagtggaggcattgacaactggggaaaccgaggcctgagaggggcggcgacctccgctgtggggacacagctcccagcagcccagtcctggccctgcggccacagccccaggtggcacccacctttaaatagcaccaggctgaagacatggcgaccagcctgtcctgccggggagccctctggagggataaccggtctggctggacgctgggatgccttcttggtggctcaggcatctcctgaccctctcttcctggcttaggcgggtcacacagagggtgtggcaggtgccacagtctcagggacaggggtccccatggctgaggtccagcctggcctggcttcccacactagagccctgtggccaacaccccaagcttcggttccgcctctgtaaaatgggccagtaaagagacgtctggaggaagacaatgagaccctccacggagcacgctgggcagagggcgcggcaccagacactgaagaaatgtccaccgccttctcgccagcaggagcccaggtcttcccttcttagagtgtccgccccccaccgcggaagggtgatctgagggccttgtgagaaatgatggggatgggacccacagcggtgagactggccccaccccaggcgtctgagtttctttaatgacacctcggaaacatcactcatataccacacaattcacccacttacactgtacagttcagtgattttattttattattatttctttgagacggagtctggctctgtcacccagactggagtgcagtggtgcgatctcggctcactgcaaactctgcctccctggttcaagcgattctcctgcctcagcctcctgagtagctgggattacaggcacctgccaccacacccagctaatttttgtatttttagtagagacagagttttaccatgttggccaggctggtctcaaactcctgacctcgtgatctacctgcttctgcctcccaaagtgctgggattacaggcatgagccactgcacccagccagttcagtgattttagtacctcgtagagttgtgcaaccaccacgactgtctagttccagaagatt

SEQ ID NO: 1560367 - DNA, 4001 bp, Homo sapiens
tcctgaccagggaggccagcctagggccggcctgtgggactcacctggtggtgcagcaggccggtggagtcgcggaaccccttggggcaggcagagcagcggtagggccgctccccggtgtgcgagcgcaggtggttggctaggttgaagctgtgcttgaaacccttgccgcagcgcggacatgcgtggggcttgagcgctgtgtgccgggcaaagtggcgccgcaggtctgagcggtagcggaagctcttgccacattcactgcagtgaaacgggaccctgggggcggcagcggcgggcggtgctggtgcaggggttggggcggggacgtcatccatggtggcggggaatacagtggtatgtgggggctctctctggagtagtggggagacagaggagcaggtgagggggtcggctccccatcagctctctcctcccaggttcccagacccaccacctgtcccctgggagaccctcccactgcccacctctctaagccactctcattgttctttaaaatcctcctactctcttagaaacccttctctcgcggctccacgcctgtggcaaaatcttcctaatcacttcatagtctcctcactccacggagtgtttttaagcctctcctcgctcttcgccaatgcgcggccactgctctctgtgcccctcccactgtaatttaagcctctcccactcttccttaagtcccacctactcccttcaaagtcccccacaatgttccctaaggatcttgtattctttgccaagcccttttccttccaaaaggccctcccactcccctctaagctcctcccactcctcttccaggatgaccacttagcgaatgggagggcaaagatttggggctaagcacactggagtcatccttgcagggagaccagaattactcctgtaacatcagataataaaaattcttcatctgtaaaatgggaatagtagtacctacctcatggagtggtggcgagaattaagtaaaattgtggcaataaatgctacgtgcccacttaagctggtgcacagcaaagacgcaacaagtaagctgtttggatgactattatcccgtaagttcctcctggattcctccttaagtcctaccatgattgctaagttatttgacttatctaagcccctctcgggtccactaagacccacttccaaaactccacccaatttttcctttaaagaagccacatcctttctaagactctccactggactcccgtcaccttctcaggccttctctacgaagtctattcccatcccctgcaagtcctttccacattcattataaagacctgatagttgcattaaacccctccaaattacacccttaaactccacccccctcactaggcctacctacttctctaagccacaccccagacaaactccatcccttctactctaaactcctccctcctgcttcctgggctccctttacccaaccagcctcaatgagtttccttccacccctcaatccagggcctacccaccattccttctgagccacgcccctttatcaaaccccacctctttgcctaagaccctcccattttctatccagactctccctcctccacgcccctcccacttccactctaagctccgcccaactcaggctcctcccagcccttgctccgccccagcagccactaggccccgcctcctcctccaccccgcagcctgaggagcgggcccccccacttgcccagtctgctccaggccccaggccccgagagccggccttttgtgcccctccccctgcccctaaaaggtgcagccctgggcgcccggttggggggcaggtcgggcaggccccggggccaggcgagtccacctcgctcgtacggagcgttggtcctggagacccggggcggccccgggaggccggggaagtccgtcggctttcctctttaattacttacacctccctctgggcgccgacattttgggcagcgggggcagcgtcacttccacccggggggcccctcgacttccgcctcagctcccttcccccgccgtactccccctttctcccgccctcttggctccccttcctcatccccgcccttctccctctttccctttcctttcccagccctggaggttgaagaagccaggcccgcgccatcttgggtgagggcagcgggaaggggcggggcttagggacacccacggcgccatacagactaagggcaaggagctgagagcgagggggcttctccgtggcgacactaggcgatgctaacgtaaatgagagcagatactatttctttttcacagcctcggactcctccgattaggatgtacagttggactagggaaaaaaaaagaaagcgaagtgcgccaactgcaatacagagctggaaaagaccggcaccatcttatccacttagcactccatgggcttcgaagcctgtccggtgccatgttaattacgggcactgggcagccattttcccgctcctcatcattcggtatctgtctttgggtcacccgactgtgggctttgtgagaggaaaggcgtttcgaggtggttggggatgtggtgctgggttatttcccactggggacacaccagggccgccggtgcgcaggcgcggcttccgggcgtggccgcgaccggtcgttaggacccagcgagtcccctttgtttcccgcgggcgcgcaggcgggcgggaagggcaggaagggaggggcccggcgcttctccgaggggcggggccggcaccgcgcgccgccgcccccgcctcgccgccgccgaggggcagggccccctcaccccctccccttcccacgcgccggccccgttgcccccgcgcgcgcgcacactcgcgagccccggcgacatgcaaatgaggtacccgagaggcggggggcgcaggcgggagggggggtgtgggggtaggggaggccgggccgcgcgctcccggagcgcgcctccaacacctgttcctgctcccgcgctcgcgccccgcgaagccgtccgggcgcgcgcgcgcagacccccttcctggcagcccccgccgcccgcttacccggcgccgctcattggccgtcgcccccgcagggcccgccccgcgcttgggcttcgcagctcgggggccgatgggcgcgtcagtaccggggcgaggggacggggagggtcgggggaccagtctccccctttccaccgttccaaagaccagactcctagactaggctaccccgtgggagcgaaccgtatggaaaggtggttgctcctctctggacagcagtctatgtggctgttaaaggggaggggggggtgcaggggggcacctgcagcacctgcttccagctgcacctgtgcctccccttcccctccgttacaccccaatcccatgctcccagtatctgagtgggcgccgggaagatggtggtggcgttggtgaagtttattgagtgcttactgtgcaccaggcagtgttcgaggggcattttaaagcccactgtcttattcgattctcctgacaaccctggtttattcacttttcagaggaggaaactggcaaagtcaattgctagttataggcagagctgaattcaaacccaggactgagccctcgtaatgtcccctttcctccttgggtttatttgttctccattctctgggacattcgggtcacaagacctgtttccagttttggccctgccatttactggcagaggaacttaggcaactgacttggctttcctgtgcctcagtttccccatctgcaaaatgggacagatatgccctattcagagggttgatgtgaggcttagctgctcctgataacaatggctaatgtgtcctgaaagcttctgtgtatgaacactttgtgggtattatgctcatggcatgtctgggcaagtacgtagaactatgtgtcccattttgcaaaagtcttgattaaggcttagagaagcgaacaccttgcccaaggccacgcagagagtaaagatttgaacgaatgatg

SEQ ID NO: 1560368 - DNA, 4001 bp, Homo sapiens
tggtgaccacgtgacttccaaccctcacagcacagatggggaaatgaggctcaggggacgagagggccagggccaagggcaccctgatccacctttgctccttacccagaatgtccagccactcttctggggccggggctggggcgggctcgggctccatggcagcaaggaactctcgggccagggccccaggctgctcagcctcctccgccgggggttgtcccatgtcctccagcggtggcagctcactcaggtcatcctcttcctcctcttcctcctcctcttcctcctcaccctctgcatcctcaaccccatccagtacctcgaagtcctcgagcggtgggaccccggcgggcagtggggcagagggctcagagggttcagcacacgatgccatgctgctggggggacaggaattggccctggaagtggggggcagagatgtgggtcagaatcctacacagcccctcaaagtctccactgtactgattccccacactgccgatcactttctgtgtaactcaagggctccaggcctcagtttcctcatctatacagtgggtgtaacaacaaccccagcttgttgggagaaattaacccatgcatcaagcccttggcatcaggctcaaatagtgttagccattattagagctaattattatttaatgtttacaaatactccaggaagtagggaagattcccctcaacattttgcagaacaggaaacaggccagaggggcaaaggcatttgcccaaggtcacagagaaagccaaaggccaaaggaggatttgaacctggggcttcaggccctgtggctttgcctgattataagctgagcgaagggtgctgggatttttgtggagaggacagcctccgaggccttagggaagccatttttagagcctctaaggccactgggggaaattgaatcttttaccagggcctcccacctccagcctcttctccaaaggggagaccctccccaaaagcaccaactgtaatcacccagaaaccccaagcgttttttccttccacactctgaatctaacactatcccccacaaccccaacatcagggaccctggcccaaatccttccccaggagaccatcctcctctcatcaggcctcggtcccaccccctcaaagcagcctcctttccaggagtggtcgaggtcccaccacattctacagcctcttccttgccccagacctcctgaaccaataaccaacccctccgtcccccaggccccaagctcagaagagtgtggcacagccatcaaaccagcccgccgcatcccctccctaaccctcacctgcctgctcctcccgggctcggagccccactttgagagaccctcccagcccccacccccataattccccgcgcccgcacaattcggcctcccctcccaccccccaccccaaccaccaccgcccccagcacgggccagctccccccacagccgctccgtctcgccgtaaacactccagtgtccccagacgcccccccctttccgatcccataacaccccacgctctcctgacgccccacagccccggccgggccctcagtcaagccgcgacccaggcccccaacgacccacgcctgtctgacgccaccagtctggggcacccgacccccgcacgcctcgggcgcccctggccctgcacgcctccatcgggacccccccactggatcccctttgcccccagtgacccccatccctggccacccccgcccggccgcgccccctcgggcacccccgacccccgtgcccccccggctcgccacccccgcggcccctcgccccgcccatcggccgcagcccccggcgcgctagcccccggaccagcctaggccagggcagcggcccggccggcacggcgcccccagcaccccaggacacttgcctctggctccgggacccccacttggggtcctgcgcccccctccccgcccccagccgcggccgccgcgcctcgggaaccaggttcggccgcttggccccgcccctgccgtgcccattggccgccgctgccgcgactgccgcacccgttggctcatgcagacgtccgtcccgggcgttggcacctcccccttcctgcttggccccgcggggcgttcttaaagggaccgaagcctcccggctgctggggctggggcgggggctggggcgggggctggggcgggggctggggcgggggcgggggaccctgggctggaccccaacacgggtcagtatcgcgcagcctgtgcgactcctgcctctcctctgagcttcatcctgaccatctgcgaaatggggataaacacccccatctatgcactctcaccttgggggctgctgggggcacagtccactctaaatgttatttccttaaagagttcaagcttgacgggcagggcagctctggggttgctgaatgacccatcctgaagccttagttacagaagtgaacctgagggcctgaggaggagtgacgtgcccaaaggcatacagaaacctccctcccatcccccacacagtttaatgtctagaaggttgcctggtgcatactggaggcgctcgattactgctgcgcaggcgactgagccagcagggccactgggaggagttcctcctctatgcactgtctgctggagggtgataaggtccccatggctcgggaagaaggtggcatccttgattagctaagtttttgtggatcttgttttgaaaccgggacacttctccctccttcactcagttttatttccttcctagcagttactccttccagaattatcttgtcattattttgcttgtggttggagggaccatccctcactctgcttcatcctggcagagatttttacctgatttgtacccagcacctccttgaaccatgcctggcatctatagaagctcaataaatgggtaggtggatggatggatggatggatggatggatggatggatggatgagtcagacaccagcttttggaggtagctatcatggaggtggtaactggctttttggagatcacttctaaggttggagttcccaggttacctcctacaggaagccctcccaacctccccaaggcaagaccaggtgccccctttagctgtcttggcacaatgaagttgatgaacgtccacttcataactagtttacttgggttttttgtttgtttgtttgtttttgttttttgagaagaagtttcactcttgttgcccaagctggagtgcaatggcgcaatctcagctcaccgcaaccgctgcctcccaggttcaagcgattctcctgcctcagccttccaagtagctgggagtagaggcatgcaccaccatgcctggctaactttgtatttttagtagacacgggatttcttcatgttggtcaggctggtctcaaactcccgacctcacgtgatccgcccacctcgatgtaccaaagattacaggcatgagccatcgtgcctggccttttttttttttttctttctcttttttttttgagacagagtctctctctgtcgccaggctggagtgcagtggcgcgatctcggctcactgcaacatccacctcctaagttccaacgattctcctgcttcagcctcctgagtagctgggactacaggcacccgccaccatgcccagctaatttgtatatttttagtagagacagggtttcaccatgttggccaggatggtctggaactcctgacctcatgatctgcctgcctcggcttcccaaactagtttacttatatctctgcctttttttttttgagatagggtcttactttgaaacccaggctggagtgcagtggcacgatctcagatcactgcaaccatgtctatctcctgggctcacgcaatcctcctgcctcagcctcctgagtagctgggcccacaggtgcaccatcatgtccagctaatttttttttttttttttgagacagagtctcgctgtgtagcccaggctagagtgcagtggcgcaatctcggctca

SEQ ID NO: 1560369 - DNA, 4001 bp, Homo sapiens
agcccagctgagctgcgctcctgagaggaggagaaccagaaaatcccaaatcagccatttccgtacaatagagcacaatttcatcttatccacaaaagtggcaagagaaaggtcagggaatcctttctcttgaagtcctataatctcgggcaccacctggggtgtctcaggagtggggtggggtgaatgggagggatgtcagttattatagcaacctataaccatccctctagcatgaatgtgtccagaaaaggtagggctagaagccaacagaagctgttaccatgacaaccccttccatagacacactctacctctgagagacattcttaaaacatcccctggccgggcgtgatggctcacacctgtaatcccagcactttgggaggccgaggcgggcctgaggcagatcacctgaggtcgggagttcaagaccagcgtgaccaacatggagaaaccccgtctttactaaaaataaaaaaaaaattagccgggcgtggtggcgcatgcctgtaatcccagctacttgggagggtgaggcaggagaacggcttgaaccggggaggcggaggttgtggtgagccgagattgggccattgcatcccagcctgggcaacaagagttacactctgtctcaaaaaaaaaaaaaaaaaaaaaaatcccctcctttgttgggcttggttcctagggtcactcgaagggggctgctctattatcatagtaaccaggccttgaacttgcctgtttctcaccttccggaggaaggtccaggccctgtaaccatagcaactgcccctcagcagagcatctcctctaaataaaaacacctggttagtttggtgcatgggcctcccacgatgggaaggggaagacggttaccatggtaatgccaactaggtggctatgggggaggggctggggaagaggtgcttctcttagagatcagtgtccttggggctggggtcctttctacctgaatgctaggtgggggggaggttgccatagtaatcaatgaggataggagcagaaggaccaccacggacacttaggttaccttagcaaccttctcctggtgcagagtcctaagaggtttggggctccataaccacaaaggtggaagcgaggggaaggctgctccccaccacctcgcccccaccgctggggaagggttaccatgacaaccaacctggccggcaatcagagaggatggggccactgctggtcgccctttctctcagagtaaaagtaattgtccaggagagtggtgtttgggtgtggaaggggtaaggctctttctctggggcgaagtgggaggaggggggcagaaagcggccccttcctcagtctcactccagcgagggggaccgtcgcgcggggcctgggtctccctcgccctcctcggggcgcgatctcccacccgccggcccccgcgcgggcacgctacccttcggtgtagacccgggtgggcgaggctcgcgctcgccgccggccccccttcctactgtcccccgccgggcgcgcgcgcggtggttgcggcgggggaggggggggggtgttggcgcggccgcgcaggcgcgcgaggcacagcgggcgcgcaggccggccccggggcctccatgatggaggagcgagcggccgccgcggtcgccgccgccgcctcctcctgccgtccgctcggctcaggcgcgggccctggccccactggggcggccccggtctccgcccctgcccccgggccgggcccggcaggtaagggaggcggcggcggaggcagccccgggcccacggcgggcccggagcccctgagcctgccggggatcctgcactttatccagcacgagtgggcgcgcttcgaagccgagaaagcccgctgggaggccgagcgcgccgagttacaggtgagcgctgtcccgggacccccgacccccaacccggcccggcccggcccggcctcacccgctgccgccgccgccgccatcttggagcaatggccgccgggacggccggcgggggggcgggaggggaccgcgacggtcccggagggcgagtgaggggccgtccgaggggtgtcctgagggcactccggggtgggacgggaccgggacggcccgaggtgggagtggagggaccgggggtgggagggatcaccgggaccggccgagagaaaggggcggagggaccacaaccagctgggagtgggactgggactgggactgagcacgctggccgcggggctcctgagagaggcgactcgagccctggaggggaggctaagagaactcgggaaagggtgtggagaggagctggaggggtctgggagacctgagtggtctcctgtgggagtaagcagaagcttgccgggcgccgagggactcccgaccccgaccccgaccatggccctagccaggtgcaggttggaggtgggagcgtccaaggggggaacttgggacccgctgggaaagagcgggtccagatggggaaccgggaggatttagggagaggaagtcgggaacctgggatcggtgtgtttcggggcgactggacggtgggcacggaaggagggctgtgtaaggacccgaggggtgggaggagggtttcaaggggtccaggatgaaggtgtgtgccttcccctctgaggagaaactttggggatcccgggcatgtgtggctgcacagtgcagggaagggttctttggagtggaagtgtggacagagcagggaatgtaccctaggagcctggatgggagagcttaagagtggaagttccactttgggggtgtgcaggagtgggcgcgatggcactgagatggcacgtgtgttgtaggatgtaggtagagagccctgaactggagtgtggggtgttgggcatgtccagtatggaggtgagggtcctgggatggtgccaatgaggacgagttaggggttaccctggggtgatgctttaggggggagaattttgtagagcccgaaggcaacatgaggaggcatctcggaacgggggtagactggggttggggggaaggggatatgtttgtggaagtcttgggaaaagaccccgtggtttttggggtagcttgggacagggatgttgaatggaagagtctgaggagttgggctagggtttgtgacctcgtggagcgtcaggtccattggcagtgactggaggaccatggagatgtccggatttgaagggatcaggaatggcccgctggaagtctgaagattcttggactgggttattattagcagaaattgtcattacctgcttgtagcagcccacctttccccttccgatttgccgtttgctatctagtaggaagctggtacccaaataaatagctgatgagaattgtgtcggtagggatggggtgcggtggctcacgcctgtaatcccaacacttggggaggttgaggtgggagaatcccttgagcccaggagttcgaggccagcctggccaacatagcaagacctcatctctacaaaaaagtacaaaaattagccgggtgtggtgacatgcgcctgtagtcccagctactcaggaggctgaggtgggaggattgcttaaaccccggaggttgaggctgcggtgagccatgattgcaccactgcactccagcctgggcaaaagagtgagatcctgtctcaaaaaaaagcattttgttcataggatgagtaaagaccctccagtaactctccccctgccctcacttgtggtggctgaggcttggggctgggatgggagcagaatccttatgtaactgctctcacttctgtcccactctctacttccgaagctctttcccagcatacatctcatcagatcttcacaatgccctgtgatgtaggcagaggcagtgtcattacctcactcagcaataacggtaccagctgcaatttagtgagcacataccatgtctggggcgctgtatcaagtactgtagatacgagctgtcatttaattcttgcagcattctgggaggataaaggatattccccctac

SEQ ID NO: 1560370 - DNA, 4001 bp, Homo sapiens
acatgacttacgtcctgcaggttggaggccacggtgactgggtaatcttgaagcaggtagtcagactgcgggagaaaacaggatcaggcctggctgaaaacagcgagaaacagaactgtggggacccagaggtggcagcagagatccagagagagagggacaagaccaagagagggggagcccagaagaagccacagaaccttgcccttaaaaagggatgacacccctaagcacagtggctcacgcctgtaattccagcactttgggaggccaaggtgggaggatcgcttgagcccaggagttcaagaccaccctgggaaacacagggagagagaccccatctctacttaaaaaaaaaagtggggggaagggggatcacatgagggggtccggggcagcgccgctcaccagctcacggattttgacagcgaagtcggaggagatggggctgtgttggaaggagcagtcctgggtcccactgagtcccgagctcagcagcagcagcaggaggagataggtctgcaggggagcgggtgctgggggagccctctgctgttccacacacagccccctcctccgggcttcccacctgtactgttctgtcttccccgctcctccttccctgggtgtccttctgcctcttccacactttctggagacatggccccatctctgcctgtctttcccggtttctctctgcctctggtccaatgctgtccagtttgcatccccctctgccccacccctctctctccccatctcccccactctgctggtctctctccaaccacctcatcttcacgtctggtttcctcgcccgggttcctccagctctgtccctccctctgccttctacaccactgttgcctgcttctctcttgatcttggtccacgtcctcttcatttgttcttggctctgtccaccttccctctcctctgtccatctccccccttttctgtccatctccccctcctctgtccatctcccccctcctctgtctctcttcctctcctctgtccgtctccctcctcctgtccacctccccctcctcttcatctccctctcctctgtccatctccccctcctgtccatctcccctctcctctgtccataccccctcctctccatcttccctcctgtccatctcccccacctctgtccatctcccccttctctgtccatctccctcctcctgtccacctccctcctctttatctccctctcctctgttcatctgccctctcctctgtccatctccccctcctctgtccatctccccgctcctgtccatctcccactcctctctatctccctctcctctatctccccctcctctgtccatctccccatcctctgtccatctccccctcctctgtccgtctcctctcctatccatctcccctcacatctgtccatctcccctcctatttcctcgtcatctgtccatctgttctcccgtccatctcccctcatctctgccccatcctgacattgtgcctcccctctcccctgatcttgtccctggggtttacgcactgttgggctccaggctggcgccagcactgtcatttcggccgggggcccctcatgcctcctgtcgccgggtcttggaagggacagaagaacaagtctcggaccctcatgccccagcccctgccctgcccgcccctttgcctccccgcccctcccgcgtcccattgatgtggctgagtttccgccccttcctcccccaggcttcctgcgtctgccccagttacggtgaaaactcttcatctccacttctaagaacctcgacgtctggtccccagaaccctccccaggttagggacccgggaacccagccccccaccctctgctccccctgccccaggagtggggaccctggctccgccccttggggacctagagtccaagtctcctcacgcaccaggcttgccccagttgggtgtggaaggggccaagccgggtgacagccagagaccgaaagtgaaaggaaatttttggggggagacagtcaaggggtggaatctgggcccaggcggagcgcgccccctggtggtgagaggcggccgctcacgccgcagatggcgcgttctccggacgccccgcagcgggggctgcagtggggctgactccctgggtggcacgcccagtgcatggtgagctggggctggaacccggatctgtctctgggaactcgcagttgctgtgtcttaccgtcctccgggccccaactttgccccgccaaggcttggcacacaggactcaggatgcatcttgtcacattgggcctggcaggtgtcgccctagcactagctttatcactgtgggagcttggccagccccttgacctctctaagcctcggcttctccaactccaaactgaggggtgaggtggtacatgagacaaaatagaagctctcttccacatctgtggatctctgaatctctgaagcattttttttttttagatggggtctcactctgttgcccaggctggagtgcagtggcacagtctcggctcacggcaacctccgcctcctgggcttaagcaattcttgtgcctcaggctcccaagtagctggaattgcaggtgcgtgccaccatgcccggctaatttttgtatttttagtagagacgaggtttcactatgttggccaggctgatctcgaactcctgacctcaggtgatcagcctgcctcggcctcccaaaatgctgggattacaggtgtgacccatcacgcccatcctgaatctcttgctcacccatctgatccgtggcagactgtcctgaaacatctgctgcccccacccccccagcaggaggattcgaggtcccatcctggggaactcggacatggccacactcactttggccagtcacatgagggtggaggtgacaggtgtcacttctgaatggaagtctaagggaccggggagtggatggtggaggatgcatggagagagcgcctctatcagccaagtttcctgtgccactcggaggagcacagggatcctgccagccccggatgagcacagggagtgtaagcaacaaactaatgttgtggttgtggcccacgcagattcgggggttatgtgttactgcagcaaagcctcgcccgtcctggccttcatcatccatttcccttccctgatccctctgcctgcctcacttcctgttcagcctgggttagctgccttgtcgcacccaatggtcagaccttccatctggctagaaagatttaaatgaagcagagaggcagagatacaagccccaatagctcatgtggcccatggacaaaggacctgctctagctccttcctgaccaagtcctggggcccctcaatgtgtgtcctgccctatcgccctattgcctctagggaatctctgtagccttccagaagactcctctctctctctcttttttttttgagaccgagtctcgctgtgttgcccaggctggagtgcagtggcacgatcttggctcactgcaagctccccctctgcctcccaggttcaagcaattctcctgcctcccagatagctgggatttcaggtgccgccaccacgcctggctaatttttataattttagtagagacgggatttcaccatggtgcccaggctggtctcaaacttctgacaagtgatccacccacctcggcctcccaaagtgctgggattacaggtgtgaactgccacacctagtccggaaaactctcattttttttttctttgagatggagccttgctctgttgcccagactagagtgaagtgtgtgctctcagctcactgcaacctctgcctcctgggttcgagtgattcttctgcctcagcctcctgagtaattgggattacaggtgcccgccaccacacccagctaatttttgtatttttagtacagacagggtttcactgtgttggccaggctgctctcaaactcctgacctcaggtgatccgcctacttcggcctcccaaagtgttgggattacaggcct

SEQ ID NO: 1560371 - DNA, 4001 bp, Homo sapiens
aggcacatttggtgacaaagtgtatctccgtgttcacgcgctccagcaagccttgcatcttggacccagcgacagtcttgagccgctccatccagcgctgtgccaggaccagccgccagaggcccccgcagagctcctcctagaggggagaacccacgggtctgagggaggagctgggcacggggctgctgggtctgagggaggaggggctgggccggggctcctgggtctgagggaggaggggctgaggactctgattcctgggtttggggaggggagggcctggttatccactcgcctcggtggagcatcttgagtctgtggtccccacctccatcccaggtccctcccaacatgacttacgtcctgcaggttggaggccacggtgactgggtaatcttgaagcaggtagtcagactgcgggagaaaacaggatcaggcctggctgaaaacagcgagaaacagaactgtggggacccagaggtggcagcagagatccagagagagagggacaagaccaagagagggggagcccagaagaagccacagaaccttgcccttaaaaagggatgacacccctaagcacagtggctcacgcctgtaattccagcactttgggaggccaaggtgggaggatcgcttgagcccaggagttcaagaccaccctgggaaacacagggagagagaccccatctctacttaaaaaaaaaagtggggggaagggggatcacatgagggggtccggggcagcgccgctcaccagctcacggattttgacagcgaagtcggaggagatggggctgtgttggaaggagcagtcctgggtcccactgagtcccgagctcagcagcagcagcaggaggagataggtctgcaggggagcgggtgctgggggagccctctgctgttccacacacagccccctcctccgggcttcccacctgtactgttctgtcttccccgctcctccttccctgggtgtccttctgcctcttccacactttctggagacatggccccatctctgcctgtctttcccggtttctctctgcctctggtccaatgctgtccagtttgcatccccctctgccccacccctctctctccccatctcccccactctgctggtctctctccaaccacctcatcttcacgtctggtttcctcgcccgggttcctccagctctgtccctccctctgccttctacaccactgttgcctgcttctctcttgatcttggtccacgtcctcttcatttgttcttggctctgtccaccttccctctcctctgtccatctccccccttttctgtccatctccccctcctctgtccatctcccccctcctctgtctctcttcctctcctctgtccgtctccctcctcctgtccacctccccctcctcttcatctccctctcctctgtccatctccccctcctgtccatctcccctctcctctgtccataccccctcctctccatcttccctcctgtccatctcccccacctctgtccatctcccccttctctgtccatctccctcctcctgtccacctccctcctctttatctccctctcctctgttcatctgccctctcctctgtccatctccccctcctctgtccatctccccgctcctgtccatctcccactcctctctatctccctctcctctatctccccctcctctgtccatctccccatcctctgtccatctccccctcctctgtccgtctcctctcctatccatctcccctcacatctgtccatctcccctcctatttcctcgtcatctgtccatctgttctcccgtccatctcccctcatctctgccccatcctgacattgtgcctcccctctcccctgatcttgtccctggggtttacgcactgttgggctccaggctggcgccagcactgtcatttcggccgggggcccctcatgcctcctgtcgccgggtcttggaagggacagaagaacaagtctcggaccctcatgccccagcccctgccctgcccgcccctttgcctccccgcccctcccgcgtcccattgatgtggctgagtttccgccccttcctcccccaggcttcctgcgtctgccccagttacggtgaaaactcttcatctccacttctaagaacctcgacgtctggtccccagaaccctccccaggttagggacccgggaacccagccccccaccctctgctccccctgccccaggagtggggaccctggctccgccccttggggacctagagtccaagtctcctcacgcaccaggcttgccccagttgggtgtggaaggggccaagccgggtgacagccagagaccgaaagtgaaaggaaatttttggggggagacagtcaaggggtggaatctgggcccaggcggagcgcgccccctggtggtgagaggcggccgctcacgccgcagatggcgcgttctccggacgccccgcagcgggggctgcagtggggctgactccctgggtggcacgcccagtgcatggtgagctggggctggaacccggatctgtctctgggaactcgcagttgctgtgtcttaccgtcctccgggccccaactttgccccgccaaggcttggcacacaggactcaggatgcatcttgtcacattgggcctggcaggtgtcgccctagcactagctttatcactgtgggagcttggccagccccttgacctctctaagcctcggcttctccaactccaaactgaggggtgaggtggtacatgagacaaaatagaagctctcttccacatctgtggatctctgaatctctgaagcattttttttttttagatggggtctcactctgttgcccaggctggagtgcagtggcacagtctcggctcacggcaacctccgcctcctgggcttaagcaattcttgtgcctcaggctcccaagtagctggaattgcaggtgcgtgccaccatgcccggctaatttttgtatttttagtagagacgaggtttcactatgttggccaggctgatctcgaactcctgacctcaggtgatcagcctgcctcggcctcccaaaatgctgggattacaggtgtgacccatcacgcccatcctgaatctcttgctcacccatctgatccgtggcagactgtcctgaaacatctgctgcccccacccccccagcaggaggattcgaggtcccatcctggggaactcggacatggccacactcactttggccagtcacatgagggtggaggtgacaggtgtcacttctgaatggaagtctaagggaccggggagtggatggtggaggatgcatggagagagcgcctctatcagccaagtttcctgtgccactcggaggagcacagggatcctgccagccccggatgagcacagggagtgtaagcaacaaactaatgttgtggttgtggcccacgcagattcgggggttatgtgttactgcagcaaagcctcgcccgtcctggccttcatcatccatttcccttccctgatccctctgcctgcctcacttcctgttcagcctgggttagctgccttgtcgcacccaatggtcagaccttccatctggctagaaagatttaaatgaagcagagaggcagagatacaagccccaatagctcatgtggcccatggacaaaggacctgctctagctccttcctgaccaagtcctggggcccctcaatgtgtgtcctgccctatcgccctattgcctctagggaatctctgtagccttccagaagactcctctctctctctcttttttttttgagaccgagtctcgctgtgttgcccaggctggagtgcagtggcacgatcttggctcactgcaagctccccctctgcctcccaggttcaagcaattctcctgcctcccagatagctgggatttcaggtgccgccaccacgcctggctaatttttataattttagtagagacgggatttcaccatggtgcccaggctggtctcaaacttctgacaagt

SEQ ID NO: 1560372 - DNA, 4001 bp, Homo sapiens
tctcagattgtcgcggagggggaatggtgcgggacctgagcccccaagcctcagcagcgctcatctcccccctcccgtaaatggactcctggaactgctctgaaggcttaactactctctcggggggcgtggtgagggaagggctggctcgccgaccaatcagagtcctgggaacccagagggggcggagctcctggagaccacctggctggttgcccttcggttcgcggttctagtcctgtcttgggacacaccggaggaaccgggcatgaggagcagagggagtgggaatgtgtctgtgtgtgcctggagaagagggtgacagccaccgtatctctccaagaaacgccagcacacaagcagacacccccttctcctgagagcccagggactagatccccgcaagggcctcgcagatccattgggtcgcagacaggcgctcttgtcacgacagggatcccctccctctgcctctagaggcgccgaaaagagacccagccgccaaggaaccacgggttccggggacagagaggggggaaggaaaatgcaccctacaaataggaagggaaagctgattggccaaggcgtgcgccccggcggccaatcgaaacgccgggctgccccctcccttagcaacgtggccccggcgttccaaaatagaacgctcccgggacgtcaggggcggggcggacgaagggggcgccgcgcgccgtgcgtgccccgcgtcagacggaggattccagcgcgtcagccgttacgcacgggtcccccgttacgtctccgcgcaggaggcggaggcagcgcggctgagggttcgaggcccctcttcccgatgggtggagggcgacccggcaccgaagtgggcgctccgaaggaggaggaaaggaaaagagactgctggaagcttccccgggatttcccccacctgcctaactgcgctagcttcaggtctgggacccgagcagggggcagtcccggggccggctcaaagttctcagccccgctaccgcatacacgttgcattgagcagcgcattacccaccccacccccacctcgccccaaagcctaccctccctgccgcgttccctccttgcgctccacgcacgcaaccaattgcaaacatctcccgactctttgcagtttgcaaagtgcgctgtgagccttttccatctcagatctagggttctgatgcgcctttttgtgggggttggggtttattcttttcacccttgacttaaaaaataaaacctacaaagcagcacccctactatcaaaaacttacctgggaggcggcggcggtgggtggactgccgaaggagtccaccgaagacagatattgagactcggcagagggtgaggagctgcaccgggagccggagtcgtagtctccggggaaagcctgaaacatttccctgggcacaggggggcccctgtgaccacgctgaggtcgccgggaagccaaggctatggccgggttggggaagtaaggtgcaagtccggggtgagccgtgggagtccccggtgagctgagcgagtcctcaaagtacgctgtccggggaagctcggggaaggagcaacgtcccgttccaacaatggcaaagtttctgtgcagtcttcctgcggtgcccaggcccccacaggatgccgctgtacctcttgaaagtgcaggctccgtaggacccaggggcgagggaggggttgctcccccaggggcagaaagcgctgtcccgctgtacagaatcagcttcagctacggtctcctccacgcgtccggcgggtcccacggggggaggggagtaataaagaagaccaaaaaaagtaagtcggtcctccaaaagaaaatgaagaaatatctggaagaatctttccaaaaactttctccccggaaaaaaaaagattaatgaaatttcataacccccaagaagaaccacaacaatcaagtttccaagtcttggttccgcgtgtccctgccgtggccgtagctctgagtcttatgaatgaagcacagacccgccagcctgtatttatatgcccgggacccgcccccctgcttacgtcacccgccccttgctggacaaacttccccaaatctccggccccgccaaatcgagtcccgcactgtccagcaagaggtctgttctagactcgatctggtcacttgcatgaccctcggggccctgggggtctcgggggttgcgttccgggccactcggcgggaggggatcccggccccgccttcccggagttcctgtgacgcaattagccatataaggagctcggccggcgcggcggagtgtttgtttggtatcctagcaatgacgtcagagggaatccctcgctcgctcgcgcgcgcgcccgcgccccgcccgcgcctgcgcagtgcaacgccgccccgggggctggtaataataggcgcttagactagccccgcagggaccccgctgacccgggcggggaagaccccagcctgcaggtccccttcacctctggcgcccccacctaccctgttctaccgatggtgcagcgcccccattcgagaagaagagcagatctccaaaaggagaccctgattagtgtggtgtggtcacgtaggtggggaaactgagtcccgagcgggctgtgatgctcaggtgaaagtggaggtaatggagggattccgaggctcgtcctggtttctgtcctgattcgctgtgcgagcttaggaaatgttttccctctctgagctttagctttaatcttccccgctgggcaaaggatgtgtgtcttggaccctgctggccttacaggtccggcgtttgggagggatgcggatttggaggagatgggaaatgaaacttagagagaagcctctcttctgatggtgttggtagcctctccttccaccttttaatccacccggagacaaagaatgtgtaagagggaggggatattattattaattctaataataataattaatgccttgtatttggcacttgccaagcacagctcctgtgctacgcctttcagtagaagatttgtaatccttaaaacagctctggaaggttaagagagaaaaatcttcattttataaaagaaaaaaatgatactcagggaggttaaatgacttgcccaagatcccatcacaagaaattcaaactcagaattgtcaaactccagatttcctaccctttccatttcttttctgatttctgagacctgcctggttggatgaaactccctgaaaaacctgtgtctggggtttttttaaatgataatggcaatattagtagctttcacttgtcaggtctttttttttttttttttttttttttttttgagacggagtcttgctctgccgccaggctggagtgcagtggcgatctcggctcactgcaacctccgcctcaccttagcctctcgagttgctggactacaggcgcgggccaccacgtcaagctaatttttatatgtttagtacagacggggtttcaccatattggtcaggatggtcttgaactcctgacctggtgatccgcctgcctcggcctcccgaagtgtcgagattacaggcgtgagccacagcgcctggcctgtcaggtctttctaagctttacaatctccttcttactgctcttagcatgtactgttgcaatcttggctcacaggggtacaggtgactacctgagcaaatcttcttagcaaatggggttcatgaatctgacgttttttttttttttttttgacagagtctcactctgttgcccaggctggagtgcagtgccacaatctcggctcactgcagcctacatctcctgggttcaagtgattctcctgcctcagcctcccgagtagctgggattacaggtgtgcgccaccacacctggctaatttttgttttgttctgttttgttttttgagacagagttttgctcttgttgcccaggctggagtgcaatggcacgatctcggctcaccgcaacctccgcctcccgggttgaagtgcttctcctgcctcagc

SEQ ID NO: 1560373 - DNA, 4001 bp, Homo sapiens
aaaattttttttttaaagacaaggtctccctatgttgcccaggctggcctcaaactcctgggctcaagagatcctcccacttcgacctcccaaagtgctgggattacaagtgtgagccactgtgccggctttccttcaatttctgacacaatttccatacaaattgtcccctaaacttggatctattcagactgtgccccaaatatcaactcctcctgcctagacccccatcatttacttaagatgtgcccccaaaacaactgtagttggtttgtacaattggtctgtaggtggttcccttaaatcaggtccccagactgagttctgcagaggtccagctgggatcacccccactacctggaaccctccatttcccacctgggtctctgccttccgcatctcacaactgatacctccagccaccctgcctccacctctcaacactcccagtccctttccctgttggccctgccccaccccacgtgcacctcacacctccccaaacccaggactggcccttcccaggcaccttgcccagccctgaaggcctggggatccaggagtcccaccctacagtttcgagccccagacccaagactcaggcacactggggcccccgcagtcaccagatcttgactccttggagaacctagccattcctgccccacaccccacctcaagcccacagtccccttccaggttagaagtccaagtgtccagacccccataattctcagaccaagaacccaacccccagccccaacaacctcacaacgttgattacagagtgaggtagctaaggtgtaggggtcgttgcagcaagacgaatgggggtcagacttgaggaaggactttctgtctgtccaggtgaggggattagaatatgccgccaccccccactccagggaagccttgtctgaggtgagactggatgggaattttagcaatagctggaggttgctggactggcggggagcaggggaaggtgcacaatctaaaactctccatcttccgacttggggagtccctgcggagggtcatgggtagggatgggggggtggagatcggcccctctcctgccaatgctgatggctacatcttctgctcccagatgcccaactctaagccacctgttatttcagactccaaaaacgaagcttcatctctgagcacccccatctctgacccctgagcaccaatccctatgtctgaccctaccttagattaccagctgatccttagccccgaaccccggttctttaacactgtgtgctggccctgagctcccacctcagtcttccccttaatggtgactcctcctccatcttttagtctttctttccctccaactttgaacctcacatcctgaaaccccctagtctgtcccctaccctggaactctgattcctatctttggtttgtacatataaatcccttgctttttggggctccaacacccggctcccaagtttaaggtgtgacccgacccttggctaaattttcctgacttccatttttaagccctggccgcggcgaggctgcccaaacagcgctcccatccatgcctcgtccccggtccccgacttccacacctggtctccgtgttcccagttcctcagctgcccaagtagacgcctttgcctccatttgaacccacaaccagtccctgctccatgtgagcccacaccccgatacctgcccccaacttcccgctccgccatccccgaggacacacctcgcccgcctccgggtagtagctccactcggccaggtcatgggcctccatcttcactgagcccagcatcccccgggcttacgcccccacccgcccccgctccggccccgggggaacggagcgctctggatctctcagcgggcacggcccgagctcccaccggcgcccgcccgtccgaccgcccggggtacggctgtcccgagcgccgcgggaggcggccacgctttatagccgggacacccccgccctcgcccgccccgggctcccctcccgcctccccgagggcggcgcgctcggactggggcgccccctgcgggatcgccaggagacagacctcaggcgccgggggccgcagccccaggacgcgacagctgggggtgattcaggagtgagggagctgcccgcagcgacgctgcagataccaagggccccgaggtcagaactctggagcctttctacctcagggggcttcatcatctcggcaggagaggacgaagagccagagccctgcatgaccgtggcggaagaaaggggaatcagaacgctagggccactatgcgactacaaggacccgtaaaaggtccccgaaatcacatccccattggacagacaggaagactgaggcttccgacggctagaaatgcttaacttggccgggcgcggtggctcacgcctgtaattccagcactgcaggaggccgaggcgggcggacgaatcacttgaggtcaggagtttgagaccagcctggccaacagggtgaaaccccatctctattaaaaatacaacaactagctaggcgtgatggtgcgtgcctgttatcccagctattcgggaggctgaggcaggagaatcgtttgaacctaggaagcggaggttgcagtgagccgagatcgcgccactgcagtccagcctgggagagagagcgggactccgtttccaaaaaaaaagaaagaaagaaaagaaaagaaaaagaaatgcttcagactgttgaaagggtcaagaacaaagatggaggggatcggggcctctccgcagaccccactagggcaacagaccacctcccctccaagacccaggagcttcgctgcccgaactccgcactctccaagaccagccagccgtccagggactcagcaccactgagaactccatttcccagaatgctctagctccctttccgcccggtgcctccgaagggactacatttcccagaaggcctagccggacccagagccggaaatgaagggtctgctcgccgtagtatggaggcgggcagaatgccgctcgcacgggacgaggcatgggcggggtcgggctgtgctctggactccatttcccggcggccctgggtgtgtggcgcgtgcgcaccgttcccggcgacgaacggaagatggcggcggcggcggcggcggagtgtaggaagaggcactgctgagggggcgcgaggggaacggaggccagagctgcggtgagcgggaggcggcgtttgggcccggagacgaaaggaggaggctcctaaagaagcaggggctcgggcggggagggcatcgccgtggggagaggggaacagtggctttcgcgacccatgtttcttcccttgctcaggacccttccttggctccctagtgccctcgaggcaaagttccaacgtggccccccgggcgccaccgccccgcagacctcgcttgcttcgactcggcctctttgctttttcccccacctctaacagccgccctggcctttcggttccttaaacttgccatgcgctttcccgcttcggggattttgcacaggctgtcccttctgcctgcaacatccttttacccattcggcttggctaactcccatttcatccttcgggtctcggcaccaacgtcacttcctctgcgaagccctccttccctgccctccatccagaaatccgcctgttaaatgcttttgtcggtccgtgttccttcatgtcacgtgtggtctaatttgttatccgactcttatctgtgtgctgttttatgatgtctatgaccgtgtgttccatgaaggtagggactaggtttgtctctgtcgccactgtgttctcagcacagcgccaatcacgccggagacgcccagctaatgttcgttgaaggaataaaagatactcctagagccagtttggggaaacagggtagtcatcagattcctaggtagcagtggggcagggtaccacttcttaacgagtacatcgagagggaaggggaaacagtgatactgttcatcatagcaaaag

SEQ ID NO: 1560374 - DNA, 4001 bp, Homo sapiens
tgagctcaggcagtccacctgcctcagcctcccaaagtgctaggattacaggtgtgagccactgcgcccggcctggtcttctcttctaatgcttgcagcagccttcctcaaaattgttactatgagggtcactgtctttatggtacccattttgcagacgaggaaagtgcgacttagagcatttcagttaattccttaaagtcacccaacagcccaggctgtcgaattccagcaaaagtctctttctgcctctgccctgccacgctactggcacagaagagctgtctaatgcactagtcactcaccacatgtggttttcaagcacttgaattgtggctagtccaactggagacaggctgtaggagtaaaatacccatcagatttcaaagacttagtatgaaaaaaatattgtgaccatctcattaatagtttttatattgactacatgttaaaatgataataatttggctatttaagtttaggttagatattttattaaaattaagttcgcatgtttctcttcacctttttaaagtgcctacttgacactttgaaattacatatgtgtctcacatttctaatgaactttgatactctacaatctcagaaacaactcagagatgtctccctcccctaccacccatccaaccaccaaaataccctgaggactctttgtcctcaagaatctctaaggcaaccagttcagaagattgttgcaatgaatgatgaggattctgcaataatgagctggaacataccagagaggaaaacctgtgcaattttgtccaattatggttcaagggaaaaatcctgtgatttgcaatgaacacaggccttggtggctgccatcgatgaaggactttatgcttgataatcattgtaccacatcctcaactttcttgcctctgatctcaacaaactcagcattgattatacatcatcatccctgtgtgacggaagaggaaactaggagcttgatgagaaatgacagccaatgtctgcagattcatgagagggcagggctgtattccgctactgggtcctatgcaccatgcagaaccagtgtcttcacgtggagactcatcactgatccgaaaggtgactgcttctgtattacactcatttccccatgacccatcataaagtcgttagggctcttttgctttctcctgaaagcttcaaaccaaacatcctttcccatcccgactcaagccctcaagctgatgcccttgcctcttgctccaccagattctcctcctgctggctcctgcatcactgttctctgccctcatctctgtaaccagaaaacaagtgtttccatccaagaattaccctctactggtcccataaaactcattcccccatttactcaagaacttccctccttcacttatcccttctctctcctgcagcctcatagtgtctctatattccatcattcccatcaggaccccaataaagtctagagcctatttgtttatttatttatttacttatttatttgagatggagtctcactctgtcacctaggctggagtacagtggtgcaatctgagctcactgcaacctccacctcccagattcaagcaattctcctgcctcagcctcccaagtagcttgaattacagacgcccaccaccacgcctggctaatttttgtatttttaatagaagtgaggtttcaacatgttggccaggctggtctcgaactcctgacctcaagttatccacctgccttggcctcccaaagtgctgggattacaagcatgagtcaccgtgcccggcctgtttagaacctctttaaaaaaattattcttcaactccacatccttcttcaaacaaagagtctattgtgttcaccagtgtattaagtgtgtctatgtcaagctacccagtcccccagaatatgtttcttacctggactgttcaccagctgtggtcttgctctgggtagttctaggtctgggtctcctggggagagtgactcaggctctaatgattgcagcaaaacatacaccaaggaacaggaggaggggtaaaggaactaaaaccagctgggtagcaggaaataggaagtctgagcttcttctgatttttgatggccccaagaatacaccaatatactgtctgctttaatggcattaggacagtgggctgggcctgtttagaaactcatgtacctgactgtatttctcagcctcagtctctgtgggatgcagaggttcagtgctctcaacaacaagggccaagaaatccaagtgtccgggcccctgctccctccaagggtcaaggtaaagaaagcagcaagcactgtggtgagaagaatcagagggaggcaatgaaaggaagagaagaagtcatgagggatggagaccagaaacacagagagaggtaagggagtgggggaagttgagacagttggcaggacagcgcgtccacacccatgcacaccaccaagattaaccccataatcctctgatcttgtggaagctcatttgtagtcttctagcccaaagaaataaccgtttttctgaaatgttaagcatccttccaagggtatcagagtgatatggagaaatatggtaagacagttacagaatcagagataacgacactgattctaaaagcattattaccaaggcattgttgcattaagactgttttttcttttcttttagagacagtatcctgctacgttgcccaggcatgtctcagacccctgggtttagtgatcctcctgcctcagcctccccaaatgctgggattacaggcatgagccgggctgtttttaattctaagtaatttataatttacaattacacctaacaatggcttcaacaaggggtgtccaatcttttgccttccctgggccacactggaagaagaagaattgtcttgggccacacataaaatacactaacactaacgatacctgatgagctaaaaaaaaaaaaaaaaaaaaaaatcccccaaaaatctgataatgttttaagaaagtttatgaatttgtgttgggctgcattcaaagccatcttaggccatgggctggacaagcttagcttagaaccaagacgaaatttatggtttactttacaagaattttgcaagagggtaatactaggttaggttatatctggaaaatatcatcaagaactacattcattttaatcttttctcttttttatccctaatatggtgactttttttcctggggattgccacttcatggctccaagaaagctaccacagctcctgacttcacattacagcaggggtccccaacctccaggccatagaccaatacacagaccgataccggtctgtggcctgttaggaagtgggctgcacagcaggtgactggcaggtgagcaagagaagcttcatctgtatttatagccactccccattgctggcattactgcctgagctctgcctcctgtcagattagtggcggcattagattctcataacagtgtgaaccctactgtgaactgtgcatgccagggatctgggttgtgtgctccttatgagaatctaatgcctgatgatctgtcactgtctcccatcactcccagatgggactgtctagttgcgggaaagcaagctcagggctcccacggattctacatcattgtgagttgtataattatttcattgtgtattacaatgtaataataataatagaaataaagtctacaataaatgcaatgtgcttaaatcatcctgaaaccatctaccccgccaccccatggagaaattgttttttatgaaactggtccctggtgccaaaaatgttggggactgctacactccagcatcccacaccaggaggatggggatgagatggagaatcactgaagatctttaatcagaagggtgatatgttcatttgtactttataaacatttgtgtttgtattttataaacattttcttgggatcataacaacagatgcattttagaagattcccaaggtatgaagggtaacaaatgaagacgtgc

SEQ ID NO: 1560375 - DNA, 4001 bp, Homo sapiens
atctctatatagtctttctataggtgatattatccagtctcagggcttaaaatatcatgctctcttttcatctaaactatcagccttggcctctctctggtgctccagtctgatataacctctccccacgggagtcccgtagacatttcaaacctaacgtggctcaaccaaacagttgattgtctcatcctcccaaacctgccactcttccaatattttgtgtctatttgagtttaaacattcagttgttaaaacttccaaactagaacttatctttcatttcactttctctcaccacaatcccatccaagtcctattaattctatctacagaatctgctgaatgcacagccagagccatctctatctctacaacctgtgtccatggtcctgtcaggcaggaatgtttgcgccaactttgcaaataggttgttcctggtcctactttcccctgccctacaatccaatctccagaaggaaaccaaatgagcttttaaaaagttcaataagggccaggtgcagtggctcacacctgtaatcccagcactttgggaggccgaggcaggtgggtcaccagaggtcaggagttcgagaccaacctggccaacatgaagaaaccccatctctactaaaaatacaaaattagctgggcgtggtggcacgtgcctgtaattccagatgctcgggaggctgacgcaggagaatcgcttgaaccagggaggcggaggttgcagtgagctgagatcgtgccattgcactccagcctgggcaacaagagcaaaactctgtctcaaaaaaaaaaaaaaagtccaataagggccgggagtggctcatgcctgtaatcccagcactttgggaggctgaggtgggtggatcacctgaggtcaggagttcaagaccaacctgcccaacatgatgaaaccccgtctctactaaaaaaacacaaaaattagctgggcgtgatggcgggtgcctgtaatcccagctacttgggaggctgaggcaggagaatcgcttgaccctgagaggcagagtttgcagtgagccgagactgcgccactgcacttcagcctgggcgacagagcaagattctgtctcaaaaaaaaaaaaaaaaaaggtccaataaaatggtgatgctattttcaacaccttctaatggcttccaaacttctaacttatccttatcttaagttccctcaagtacccctggacctgccctgtgcattcctcagacctcatctctgcactctcgtgggacacactgggctccacccataacgggctctgattccttgaacatgcagctcattgtcatctcggggcttctgccttctctgttccttctgcctaccatgctcttcctcttaagctcctcacacttggctccttcacatgtttatttatctttgagttagagtttcactcttcttgcccaggctggagtgcaatggcacgatatcggctcactgcaacctcggcctcctaggttcaagcgattctcctgcctcagcctcctgagtagctgggattacaggctcccaccactacgcctggctagtttgttgtttgcatttttagtagagacagggtaatgcaagccctaaatgccagccacacacgtgacttacaactttctagtagccatgttaaaaaagtaaaatcattgggagaaattaattataataatatgtttcatttaaccccgcaaataaaaaaaatcattggaacacgttaccaaaatgaaagttattaacgagataaattgtattattttgatcatactaatgattaaactacactaagtatattttacacttaagcacatttcagatcaagatagaaacataggcactcaaaagccacctgtggcaagtggatgctccattacagcactgctctagaatttaggaggtgtttgtcagagagcaggagttccattgataaattttaaattgtcagtccccaacttaccagcagctaagctccttttcctgtgtgcttcttggcttcctgtggagcaacaccggctctaagggctttcgcggagactactgaatgatgggggagggacaatggagctggagccaatcccctaacagaaactcaggatttcttataattttcagaagacaccttgggtatgttgtcagcggactcttcttagaaaccaatgtgtctgaatgttccttcacctctagccttctgtgagagactggagttcatgcttccaaatgtcaagggtcaaggaatctgaatgtccagcccttccttcttcagagtttcatgaaaatgaaagaaacaattactgaagtgggaagagtttcagccacgcaatcaagcccaaatatgatgattaagtcaaactcaattctcgacttatgcagtacttctggcatcaaatgtgtgggtcttttccatatcaagcaattctccagttctctggggacaccactgggtatctcacaattcaattcagctccgacgctgtctacctggagttagtgtcagatcccacaagttaaagggctcactctcccaaaactgtcctcacttcagacaccaatccaagtcccaggtggccacctgtacttctgactgactggctataaatcgggggtggggggatgtttataaccccttcctctgttctgataatttgttagaatggctcacagaacttaagaaggcacattactggctgggcgctgtggctcacacctgtaatcctagcactttgggaggccgaggtgggtggatcacttgaggtcaggagttgaaaaccatcctagccaacatcatgaaaccccacctctactaaaaatacaaaaaaaattagctgggcgtggtggtgggcacctgtaatcccaactacttggtaggctgaggcggcagaatcgcttgaacctgggaggcggaggttacagtgagccgagattgtgccactaaactccagcctgggcaacagagcgagactccatctaaaaaaaaaaagaaaagaaaagaaaagaagaaggcacattacctacatttactcgtttgttctcaatggagttcacatatcgagaaataaaaggtggtaggtattgtataggtgcaggtctctaaagaggtgcttccttgctggctgctggagacatagagatcaatcagacatgggctctgcggaccacctgaatagagaggtgagaatgcagtgcttagttacaatagggtgggggcacgtagtgatagacagatgcctggctccttgtgaggtcctctaaaaggaaccactaactcagattcacggatctagagtcaatatccggaggagggaacatgtaggctgagtcttaaagactcagataaaggagaaaaaataatgcattcttgtcagaggggagtaaaaatacccacgaaaggggtcacaaaaaagcaggttacttttgtttaccagagcatagatgataaggcagacagcaataagcattaagtatgtagagggcggcagaggcaatttcttggttggtcttgaatgctgtaaaaagaacttagaatttcttcttaaaatttctttcttatatatatatatatttttattattatactttaagttttagggtacatgtgcacaatgtgcaggttagttacatatgtatacatgtgccatgctggtgtgctgcacccattaactcgtcatttagcattaggtatatctcccaatgctatccctcccccctccccccaccccacaacagtccccagagtgtgatgttccccttcctgtgtccatgtttcctcattgttcaattcccatctatgagtgagaacatgcggtgtttggttttttgtccttgtgatagtttactgagaatgatgatttccaatttcatccatgtccctacaaaggacatgaactcatcattttttatggctgcatagtattccatggtgtatatgtgccacattttcttaatccagtctatcattgttggacatttgggttggttccaagtctttgct

SEQ ID NO: 1560376 - DNA, 4001 bp, Homo sapiens
aattagtataaccattgtacagatgaggaagttaagacttagatgggctgcgttaattgttcaacgttaccaggtagaaagagtagagacagaattggagctcagccagattgattacaacagaattgtgctgttaacccttttccaccccatagttcctcaacagactcagattttctctatccacactccaaacattctacaagacacttagaagacatgatctatccataatttcaaattcattttaaaatgttgatacaggctgggcgcagtggctcacgcctgtaatcctagcactttgggaggccaagacaggtggatcacttgaggccaggaatttgaaaccagcctggccaacatggtgaaaccctgtctctactaaaaatacaaaaattagctgggcatggtggtgggtgcctgtaatcccagttacttgggaggctgaggcaggagaatcacttgagtctgggaggcagaggttgcagtgagccaagatcgtgccacagcactccagcctgggtgaaagagcgagactctgtctcagaaaaaaaaaaatgttgatgcaacaaggaaggatgattgtgcaatgacaggtgaggacaaattaacaaggcaaaaattgcaaagttttgggtccaccctagttgtaatgtaaggaggagaactgcgaaccacagatgatacctgtactgattatgaggtctgctatttggtgagtccttaatatgtgccagtcactatatattttatcatctctgattacaatacccttgctttgggacaagtgctgtccttgtgtaacaggtaggaaagtacggctcagagagcggaagtgactttcacaattatcgagggttgcaattgaatttatgaccacagatttcaaatgaaaactcagcagttcctcattaggttactctacttctccagcgcactcgctatcccacaccttaattatttcagtcctgctttctccaaaaagtacctcatttactctgtttttcccactctcagcagatgcccttgactgacattataatgagaaaatggtaataactagatgtgaaattttcagccggtcctcccctgaccctcagtctacctgcctctgtcactgtgaataaagacttcttgttctttccaataatttccctccctgcattggcccaggatgccctctcatcttcccacaaactttccccctgcatttgtccttccattttctgccaaaaacaaaccctcaagattttatttctactagatcattctcactattacataaacattacataaatcatatcccctccctttaaaaagaaaccatccttggccaggtgccgtggctcacacctgtaatcccaacatttagggaagctgaggcaagtggatcacttgaggccaggagtttgagaccagactggccaacatggtgaaacctcatctctactaaaaatacaaaaattagctggacgtgatggcacgcgcttgcaatcccagctacttgggaagctgaggcaggaagacctcttgaacaccggaaggcggaggttgcagtgagctgagatcgcaccactgcactccagcctgggcaacagtgactccgtctcaaaaacaaacaaacaaacaacaacaaaactaaacaaaaacaaaataaaaaccaccccaaaaaacaaaacaaaaaacaaccaaaaagatcttggactatattcctttctggtgttaaccctatttctcctgagagaattctttctatgaaaagaatttgcagccagattttggaaggagttttctgtgtttgctccctttgattccctgcctcactttttctcctgaatccagtctgtattgactccagtccttagcactgacctggtgcattttcctgaggatgcttatgacctcaaggctgcaaatgcagtgggtgcaaatccatattggttcttatctcaatatcttcgtgatagaggatccattggatctcttcttcccattggatcgcttccttctccttaaatcacgtttttcctgtgccatgagatgataaatgtacacacaacacactttcacttgcatttgaagctcaattggccaccgcttttcagtcccctttgctagtattttctgctctaaatttgactctaaatttaggagtgtcccgcagcttttacttgttccccacctctcttatctctatatagtctttctataggtgatattatccagtctcagggcttaaaatatcatgctctcttttcatctaaactatcagccttggcctctctctggtgctccagtctgatataacctctccccacgggagtcccgtagacatttcaaacctaacgtggctcaaccaaacagttgattgtctcatcctcccaaacctgccactcttccaatattttgtgtctatttgagtttaaacattcagttgttaaaacttccaaactagaacttatctttcatttcactttctctcaccacaatcccatccaagtcctattaattctatctacagaatctgctgaatgcacagccagagccatctctatctctacaacctgtgtccatggtcctgtcaggcaggaatgtttgcgccaactttgcaaataggttgttcctggtcctactttcccctgccctacaatccaatctccagaaggaaaccaaatgagcttttaaaaagttcaataagggccaggtgcagtggctcacacctgtaatcccagcactttgggaggccgaggcaggtgggtcaccagaggtcaggagttcgagaccaacctggccaacatgaagaaaccccatctctactaaaaatacaaaattagctgggcgtggtggcacgtgcctgtaattccagatgctcgggaggctgacgcaggagaatcgcttgaaccagggaggcggaggttgcagtgagctgagatcgtgccattgcactccagcctgggcaacaagagcaaaactctgtctcaaaaaaaaaaaaaaagtccaataagggccgggagtggctcatgcctgtaatcccagcactttgggaggctgaggtgggtggatcacctgaggtcaggagttcaagaccaacctgcccaacatgatgaaaccccgtctctactaaaaaaacacaaaaattagctgggcgtgatggcgggtgcctgtaatcccagctacttgggaggctgaggcaggagaatcgcttgaccctgagaggcagagtttgcagtgagccgagactgcgccactgcacttcagcctgggcgacagagcaagattctgtctcaaaaaaaaaaaaaaaaaaggtccaataaaatggtgatgctattttcaacaccttctaatggcttccaaacttctaacttatccttatcttaagttccctcaagtacccctggacctgccctgtgcattcctcagacctcatctctgcactctcgtgggacacactgggctccacccataacgggctctgattccttgaacatgcagctcattgtcatctcggggcttctgccttctctgttccttctgcctaccatgctcttcctcttaagctcctcacacttggctccttcacatgtttatttatctttgagttagagtttcactcttcttgcccaggctggagtgcaatggcacgatatcggctcactgcaacctcggcctcctaggttcaagcgattctcctgcctcagcctcctgagtagctgggattacaggctcccaccactacgcctggctagtttgttgtttgcatttttagtagagacagggtaatgcaagccctaaatgccagccacacacgtgacttacaactttctagtagccatgttaaaaaagtaaaatcattgggagaaattaattataataatatgtttcatttaaccccgcaaataaaaaaaatcattggaacacgttaccaaaatgaaagttattaacgagataaattgtattattttgatcatactaatgattaaactacactaagtatattttac

SEQ ID NO: 1560377 - DNA, 4001 bp, Homo sapiens
agtttttaagacctgatatcccaatgacacaggacccattggatcactttctcccttttcaaacacatttttcctatgccatgagatatatccaagagatatgtgcacacaatacactcttggtcgtctctacagctcgattctcttcctctttttagtccaatttacggtgttttctattctaaatttgactctaaatgttggggtatctcacattctataaatgatatcatccagtctctgggattaaaccattatgctgtcttttcatctaaattatcagccgtggcctctccctggcactcaagtctgataaaacctctccccgtgggagtcccatagactccaaacctcacatggttttaccaaactgttgatgttctctgcctcccagacctgccactcttccaatattctgtatctatttggagattaaatattcagttgttaaagctccagatctagaactcacctttcatttctcttttcctcaccacccaacgccatccacgtcttactcattctatctacagaacatgctgaatgcacagccagagccattgccatctccacgaccggtgtccatggccctgtcaggcttggatatttgcacaagccttgcaaatagctttttcctggtcctgctgccccctcccctaagatccattctccagacagaaaccaaatgagctttaaaaaggtccaataagatggtgatgttattcgcaataccttccgatggcttccagacttctaagttacccttatcttaggttcccttatcctaggttcccttatccactgccacatgtgccctgtgcatccctcagacctcatctctgcactctcatcagacacactgggctccacccactgggctctaattccttgaacttgcagctctttgtcatctcagggcttctgctttctctattccttctgcctaccgtgctcttcgtcttgagcttcctgcacctggctcatcctgaatattcatatttcaggtcaaatattatttcagagagatcccacctcacccactctgcaaagcagaatgctcaggtacagcctatctcaccagatacttttctcctttatttgtttgttcatttatcttctctcttaaataccctccacactagtacgtaagctccacaggactatcaagatccttcaatgctacatctctacaatgctacatgtccagtagaaatataatgtgttaactttagctacatatgggactcaaaatttttttgtagccactgtttttaaaaaagtaaaacacctttggggaaattattttagtaataaattttatttaattacatatatgataaagaattggccagtcacattggctcacgcctgtaatcccagcactttgggaggccgaggtgggcagatcacgaggtcaggagttgaagaccagcctggccaacatattgaaaccccgtctctactaaaaatacaaaaaattagccaggcgtggtggcaggtgcctgtaatcccagctactcaggaggctgaggcaggagaatcgcttgaacctgggaggcagaggttgcagtgggctgagattgtgccactgcactccagcctgggtgacagcgcaagactccatcaaaaaaaaaaaaaaaaaaaaaaaaaaaaagaatgttactggaacatgtaaccaaattaaacactgttaatgaaatagttaacattgttttcatactaacgaagtggattcttcactggactacgctactccagagttagaagggctctgtcatatagcaggcatttcaacaataactttaaaattttcagaccccaacttaccaccagcttagatccttttcctgtgcccagttcctggattcctgtggagcaactcaggctctaagtacttgtaaaaagatgaagttatatgtttggttttaagatcttaattggctttggttataaagatggaatcagacagcctgtcatgctataaaacaaaatgagtgttttgatagttagagccaaggaagttggttttacagggataggagggctaaagaaagcagaaacagagaacaaaaacctgattggtcatctggatgttgcattttttttgtgcagcaggaatagagagacagcaataaggaacaactgattgattgaagtcaagttaccacagattgctttttttttttttttgtaaagatgaaagcagacagaacttcatgttcatgcccactgaaactggcctgttttaggaatttgtccattttctctctctcctgatttctcaaaagttcagatacattagttttggtttggtgatgtggagttttagtatgactgactccatttggtttgctttgtcgaacctagtacaataggtcagtccaaaccacttacttgctgtttttatagaacaggcttcagcagagacttagttgaaggacacggggacaatggagctggaatcaatccagtgacacaaactcagggtttcttaccattcccagaagacaccttggagatgttctcagacgatttatcttggaaacttatgtgtctgaatgttccttcacctctagccttctgtgggagactggagttcatccttccaaatatcaaaggccaagaaatctgagagtccaggccctttcttttcagagattcaggaaaatgaaagaaacaattaccaaggtgagaagaatgagaggaaaaacaataaaaaaacaaagatgcacggtgaaacaaaaactcgattctctactttcacaatccttctgaccaaatatactttttctctacaccaagaaattctccaattctctggggacaccacctgggccacctgcaattaaaaattcggttatgatgctgtctacctggattcagctcagatccgaaaagctaaagggctcactcccacaaactgttctcagatcagatcagacatctgttgcaagtcccaggtggctacttgtacttctgactgacaggctataaattgggtgttccaatgacaccaataaattgctagaatggcacacagaactcaggaaagcactttgtttgcatctgttgctttatataaggaatatacctcaggaatagtccattggaaagaggcatatggcaggtatatggcagggaaggggttgggtggtgcatggagcttccatgctctcttcaggcagccactctcccagcactcctgagtgttcaccaatgtggaagctcatcaaatctcattgttcaagagtttttatggaactcaatctccagtccctgcctccccttcctggagatcagtaggtggggctgacagctccaaccctctaatcccttggtctttctggtgaccagtcccatcctaaggccatgatctccttagcataaactcagctatgatcaaaaggggctgtttatgaataacaaataatactcctatcactcagggaattccaagggttttaagagccctgtgccagaaatctgtgacaaaatcaaatatgctttgaggtatttcatacctcagagttacaaagagaagcagtaactaggagcatgtagagaggtaaggaaggtaaatgagagacactgtacactccacaccattgccgagattaaccccctaaccttctgcccctagggagatgctctatggactactgatctaaggagatgggctctttctgagtttttaaacaccatcagaatgttgttctcaagcccaaggaatagaaccatgaaaaacagtggagagccacaaaacaagagtcaactattttctattttctctctgattcactggatgttttcagtgataaggtagagtaaaccaatgaagcacataagccatggagaaatttattattaaaaaaagttttggaaggggatagatctggagtttgaacaaaaattgagtttaatgtcacccttccactccatcatcatattggttttcttctagggctttcttgaaagtgaccacagaatggctgccactgttc

SEQ ID NO: 1560378 - DNA, 4001 bp, Homo sapiens
ttgggaggctgaggtaggagaattgcttgaacccaggaggcggaggttgcagtgagccgatatcatgccactgcactccagcctgggcgacagagcgagacctccgtctcaaaaaaaaaaaagagagagtgtacaggtggatggaggggtcaggggagagatcagaaactcgagagcacccagtttttggaggaaggtgccgaggtcagctacgttctgttgagtaggaggggcggggggagaggaagatgccctcagccctcacctgcagctcgtaggtacggctggcacggtcctgttttatcttcataagcatgccttctttcagctcctccaggagggagaagagggactggaactctgcttcgaggtcctcctgcaccttcgccgagttcgcctgggtcggaacagccagaatcggccaaagcccgtgttcagagagggaacctgagacctcccacaggcatcaacagcaatgggccagttcctaaggctgcaccctccagcttcctcccctccccttacctccccaggactgccccaccgccttcacctccacgttcagcagcatctgtttcagggagtagataaagctctgaatttcttcattcttcacagccagtgttttgatgatcttcctcagggcctcctgcaccaccagaagtgtggacacacacaggtgcacacacacatgtgcgcacacaggtacacacacgtgtacgcacatgtacacacgtgcacacacatgcacacacgtacataaatgcacacgcgtgcgcacacacatgcacacacatgcgcacacacacacggcaggcaggtgagcccgtcagcctggccaggctccctgacccgcgctcccctccagggatccagagaggagatgtgggggctgccacgctattgagcttgggcaccagccaggaggtaaagctccgggctgatacaattcacccatagcagctgggcgccctaagctaccccatattacaggagaggaaactgaggctcacagagaacctctcaggaagggacagaccctggccccgaaccaggcgtgcttgagcacaaaggctacaacccgatacctacatcctgaaggtggggcgtgaggggctagcctgaggacagaaaaccccagaggagaaggatgtctgctggaaaatgggctaacctggggaaagggttctcggtggaaggaaaaaccccagggaggtgggatagcctgggataggggctagcctcggaacaggggtggggcctacctgggggagaaagataagcaaggagaaagaaattacctgggcaaaggtggaacctgggggccagggatgcgggggcgccaggtaagcggggagggggcagggaggtcttggggaagggcaggggattctgggagggaggatcccgctcgggagcctcttgctctgacccaggctccaacctgctcctttttcctggggcagggtcggtggggtccgcactgcggagctggcggggcgtcttccaggggtggggcggggggccgggacgcctggtccgcggccaggagggagggcgtgggggatgggggtcagggatgggactgggatactgggcagggtgggggggcgtagaaggcacgtgcctggccccaagccaagatgtgggggggctgcgtcccaaactggggtaggggggctagatccgggcggggtcgcgaatggggtggggcctcagccgcagagcagctggggtggaggcggggagggagtgggggcgctgcggcaacacctggtccccttccccgcccccgacgcccctgcgggcccgccctgccccaccccgtcctaccctctgttcttccatggctgcagcccaggtcaccccggcccggcccgcgggccccgcgcacgctgggtccccaagctgcctttgccgcggccggtagccaatggcccgccgagccctcgccgccgccgcgcccccggttagcgctccatcaccgcgcgcattgcgcaggcgcacccgccgcggccgcctgggaaatgtagttccgcgctggcctcgcccagagccctcacatccagcgcctggggctcactgggcggtgttggtggtgatatgtgagctggagagagccttggatgagaagacaaggggctcgacccctggccctgccgtgggacctcagaatcatctctaatgctcccgtgcctcagtttccccacttgttcactcacacaggttatccgttgctactcaaattgtctagcccgcctggcatttactgaaaatctaaggcttttgcccaagagggtgtttagcctccagtgccttctttccatttgtccctatgtcacaactgaactcctatacaccccacaaagccccaggctccaacagctcctccagaagtctccgtgccagcccaggtgcggaagctaagaatgtctgggtccagctttggaaggacctgggggctaatctatccagggtccctcagcagacggtggggggaagggtggagcttcagaatgttctggggaggggaaggagtgggtaggggaggctgggcgggtgtacgtgtctgcaggggaggtgcaggcatagccaccgcagaacctccctgtggtggaggggaacgctgtgtacgatgcaggccttctaggtccgagtgagaaaggaggtcactctgcagttgggtctgagacattgaggtctgtgggttcgccacctcctcccagaatgcactacagaatcaggggtgagggatgcagggctgggaggaactcgagagcccatgaacctcctccacgggacccccaagcaggtcatgtaataggacccaaagttatcaacagaaatctatttctctgaacctcaaaggaagattttttaaattattattattatttttttttagagacggactcactctgttgcccaggctggagtaacggggcgcaatcatggcttactgcagcctccaactcctgggctcaagcggttctcctgcctcagcctcccgagtggctgggactataggcatgcaccatcaccctgggttggttttgtatctttttttttttttttgagacacagtctcactctgtcgcccaggctggagtgcagtggcaggatctcggctccctgtaatctccatctccccagttctggcgattctcctgcctcaaccccactgagtagctgggactacaggcgcccaccactaggcccagctaatttttgtatttttagtagagaccgggttttgccatgttggctaggctggtcttgaactcctgacctcaggtgatccacccgccttggcctcccaaagtgctgggattacaggcctgggccaccatgcccagcctgtatctttttttttttttttttttttttaatagagattggatctcgctgtgttaccccaggttgatcttaaactcggctcaagtgatcctcccacctcagcctcacaaagtgctgggattacaggtgtgagctacagcgcccagcaaaagaaagacattttgggagcaaaataattgaggcagggaccctgtcatttaactcactgctcaggcctatgtcgcctgcccctcccccacggagccacctgctctcgcactgtgtcttcctgtacctagatgtgtttatgtagagccttccagaaagctcacaggggtggattcctcccactcacttgcatacactgcctttcttttctttttttctgagacggagtttcactcttgtcgcccaggctggagtgcagtggcgtgatcttggctcactgcaacctccgcctcccgggtttaagccattctcctgcctcagcctcccaagtagctgggattataggcgcccatcaccatgtccagctaatttctgtatttttagtagaaattagtaggggtttcatcatgttggccaagctggtctcgaactcctgacctcaggtgatccacctgcctcggcctcccaaagtgctgggattacagacatgagccatg

SEQ ID NO: 1560379 - DNA, 4001 bp, Homo sapiens
aatgcttgttaaacatgcagctgtaaccccaccgcagaccctggagtctgcagtgaaggtccctggtgtggacatttggggtcacaggccagaatggcaaacccaccttcccaggagctaggtgcaagccagacatttatcgaccaggtgggaagagccacccaggcagagagctcagccccagcaaaggctggagccacgtggtctcttcctgagtcctgagctgcaagaggctggagcctgggaaccgggaagtccccccagtccctctctgaggctgggatccccctgcagcctcctacatacccctgtgacgggctcagtccctggacgttcggccctcgaccaccatgactgtttgtggctggtcctgagctgagacgtctgccctgcttctggcctgaggtctcacctttgcagggaaggcagtggacaaggcccaagaagccgaggaggttgatcttgttccccgggtgggtgaggttggaccaggcggtgtcaatgttgccggaggcacagcactcggcccgggtgacatcagtctggagcaccaggctgcaggtggcctcctggccctgctggagccagcaaacaccacctgcgggccggggaacggggtgctctcctgggccactcctgacacccagcttctggcccgcccacagatgcatgcaggtggtgctgagtagttacgcacggaatgatctacccccacccaggaagaaggggcagaaaaccacatgggtgtccccaccctggctccagaaccctggaaatgtctcctcccctctgagctccacgtgcccccccccacagcctcaccaccaacccccacccaccccaggaggtcccttcccgtaccctccaagcccccaggccaggggctggcaccctgcccaacccctcaaacaccaccaaacaccaggcactgggcatgtcagggtcagcaggccctggagccgcttctcccgcctctgccctctgtctagacagcacccgagggcgagggcacgcggagccccgcgcctggcagcccccccaccgcctggcccgcctcttactcactccaacttgggaacattccccttgcatgagctcactgtctccccagggacgtggccttcggggagggggctctgctctccctttggcgcagggctggggtggggtggggctgcagggatggggggtggggagccagagagccccccatttcttcccccgtccctgggggcaggaacggccacagcccccatcccagagcgcttgctggttcacagacactgccagggaccagcttgtggaacgcagcaccttggcacccatcataggaggggaaactgaggccaggagtggggccgtctcctgcctggcacctcccggcaagtcccaggtgtgagactccatgccccgtctacccaggacccgggaaagctctcagccccagctggagggcctggctcccgacacccagcactacctctcggcaccaggaccgacccggacggtcgcggctagaaccctggctttgcctgctacaggctgtgtgaccctgagcctcagtttccccatctggaagacggagatgaagagagctccggcactatcgggatggcacaggttcagggaggggagaggtagacactaagcgctcaataaatgtcagcggtcattgtgattagaaacctctgctctgctgacctcttggtgaccctccttcagaccttcccggctccagcttgcgccggacaccgccctcgcccccgccgccgccgccgcgccccccgacgtccccccggccgcattccgcgcagccccacgtgggtggcccgccccgcccgcccctctggccgccccactcaccgggcgcggggttccccgagcccatggagctcacgaagcccacggcccaagccagggccccccagggcagaggccagagtggccctggcgccccgggacgcatggcgaacgcagagacggcagcggcaccgacttcccagcgcgcggccggcgctccctataaaggtcccgcgggccgcgggcggggcggggcgcggggcggggcgcggcgcgggagtggcgggggcgaggccgtgtcccgcgcggggtgggcaggcgccgggcccggccgctgcggggggcagttgggggcgagcgcccgggtccccttccggagccagagaatgcatttggggagatgtggctggacccagggcggaaccgggacaggggtgtgggttcgaggtggtggcagccttttgggtggatcgaggggccgtctccaggaattaaagtgggtttgggggtcttcagtttcaggggtggcggtgaggtaacggggacccaagaggagcacgtctgtggatccctgcatcccgtttctgtgatttgcatgtggtcactttcatggtccaagtgtggtctgagccccccaacccggcctccttgttcccgacccgccccacacacccaaaacctcagctggatatggttccctgctcacagcgcgggccgcgcacccgtccacctggccgctggagccggcctgtgggtggggagtggttgggtgtgggacagaacggggtgcggccgggacagacccagagacacagctccttccagcatctcggacaacagcaggcctcgcccagccacggcccccagggaggccactgcgtgtgtgtgtgtgtgtgtgtgtgtgtgtgcgcgcgcacgcctggcctttgtcctgggcccctgggcagctctgccccatcagccctccaagcctttgcagacattcccccagatcacctcaacaagaatgtttactaggttttttcctctccctccaagattcagcaaacactgtttccagcagaggcgtttccaacaatgtatgacagcgacatctgcgtgggcctggaggcgctgcgcccgagggggctttcgtgcagccagacacatttcctactctggagctgattctgtcatgggggcctccagatttgtcaggcgcccttggcgagcgcaggggagcccctctgttcctgcttctagggcatcagtgaacatctcttttggccagagggaccctgcggggtgctggggtgccacggtgaccaaggcagaccccatcacaccctcaccgagctcctggtttggacaacaaaatgcagagacaaattaatctataacttcaaggagtggtaaatgctttcaggaaaatacagaaggttgaggtggtggagagcggttgggtgtctgctgggcatgcctgtgtctggccactcgctgtgccggcattgcccaccccgcaggtggaaacggacgtgtccagcagccccacggcacagccccttctctggcctgagtgagatctgtgcccacagaagacacacctgtaccctttcctccaccttagctgcccagcctgtgtcccccagcagccagtggccaggggccaagttctgccttagtggcactgaggggggacaccccgccgtcttgacctggccttggcctctggcatttcccccgggaatctccccggcttggggagcagggcagggacgggaccctgtattctcactgaggggggacaccccgccgtctcgacctggccttggcctctggcatttcccccgggaatctccccggcttggggagcagggcagggacgggaccctgtgttctcactgaggggggacaccccgccgtctcgacctggccttggcctctggcatttcccccgggaatctccccggcttggggagtggggcaggcacaggaccctgtgttctcactgacgggggacaccccgccgtctcgacctggccttggcctctggcattcccccgggactctcccgggattggggagtggggcagggatgggaccctgtgttctcactgaggatgtgcgggggctggacagtgtgaccttggccaagacctgaccccgccgtggcttggccactccggcctgggctgtgcgaatcaaagggtcattgtctggct

SEQ ID NO: 1560380 - DNA, 4001 bp, Homo sapiens
ctgactagctgggattacaggtatgagccaccacacccagctaattttgtattttagtagagacggggtttcttcatgttggtcaggctggtctcgaactcctgacatcaggtgagcgacccacctggccccataatcactcgttaaatagggctgtttctggctgagacctaacatctgtttctagataccaacctaggtcttaattcaactccctggagtctatctctaccatctgggagggacagttaacagccaggcaagcagagaaccctcaggttcaacactacccagatagcctcttgtcttaggacagttaagaaaatgggagatggggccaactcctctttcactggcatcccaacccagccagaagctttatgagaacagatcccacctcatcttccacaccacacacaaaaccaccagctgcatcaaaaagctttatttccatttggtccaaggcttgttaggatagttaagaaagctgcctattggctggagggagaggcttaggcagaagccctattactttgcaaggggcccttcagaagtcgctgggctcagaaggctcttagtcgtgcttgagagtgagcctttcgaagagatactcgcccagcccagcctccgggccacccagcctgtggaggttggtcaggtggtcacccatcttcttgataagcttcacttcctcatctaggaagtgagtctccaggaagtcacagagctgagagagaagagggagaaattagaaacccaatccctggaaaagagggggagagagcagccagttgcagattaaaatgtgacaggtgtgaaatgaggctctgaaggaaatttgcccaaagggagcagaggcttgaggggtatggttgggtagccatggatgcagcgggtacgtacatgggggtccgtgcgggcagaacccagggcatgaagatccaaaagggcctggttcagctttttctccagggccatggcagctttcatggcgtctggggttttaccccactcatcttcagctggcttctatatagaagggagaaatggctcagaatacacacactcggcacatagaactaaacctacatttcccaagagtcgttgggggtcagaggcccaggccacaaagacatgtgacagcttgtatttatcactctccgcaccctgtcctagctcttacagctatacgtccctaagaccacgcagcggtgtggactgccgcgtgttgtgggcactgcacgaggtgcgcctctatttccagcggttaagagggctcacaagaccgaactcaatctcccagaagcccacgcgacacctacgccctcaaatcaaggctcctcgcgcgcacggcctgctgggagatgtagtccattacccacacactagttaccttgatgtcctggaagagagcgcggccgccacgctggttttgcatcttcaggagacgctcgtagccctcgcgcttctcctcggccaattcgcggaagaagtggctcacgccttccagagccacatcatcgcggtcgaaatagaagccctacgggaagagatggaggcaacaatggttagcgggaggcgaggccaaggggactccgccctctgtttacccgaccgcacaaagaaggctggcgcgtgcagtgagggccggaggtgcgcagctggaggaaattagggccaggggcgtcctggggactcaccagagagaggtaggtgtaggaggcctgcaggtacaaattgaccaggctgttgacggctgcctccacgtcggtggaataattctgacgaatctgggagctcatggttggttggcaagaaggagctaaccacaaaaacggtgctggcaggtcccagaagcaggagatggccgagaagatggtcccggaggttgcaagcggagaggaaatcggagggcggtcggaggctggaagagagtccccggatctgttccgtccaaacactgttgaagcaagagacagacccgcgggaccgccgaactgcgaggggacgtggctagggcggcttcttttatggtgcgccggccctcggaggcagggcgctcggggagggctagcggccaatctgcggtggcaggaggcggggccgaaggccgtgcctgaccaatccggagcacataggagtctcagccccccgccccaaagcaaggggaagtcacgcgcctgtagcgccagcgtgttgtgaaatgggggcttgggggggttggggccctggggctgattctggaaatgcaggggttcgtgggcgggagggtgggggctggggtccctctgggaggctagagttttatgggagcactaacagccctgtgaactgatgaccctggggtcctggggtgcctcgggaaagtaagattctggggtttccgagggcatggatttttctggaaccttgagtggggggaggggcacctcaaaggtgcagggaggacctgtagttgcctgaggtttgcgctgcgagataaggagtctccggatccttgggaagcttggaaggctgtgaggtgttatttctggacccctggagatctctggaagatggagtgttgcggggactggagtcctgggatttacaggggtgggggttcacgatgcaaactctctatattttggagccctccccggggaaatctttaggttcttgaggtgctctgcaagttggaaagggcagttattctggagccgtgggtttcacccagtgcgggaagcccaggaggagcattgtatgaggtagggtgacttctggaaccctggacagccctctggaaccctccaaagatgggctgggactttggggataccttggagctctttcaggggcccaggctttttctgggagtggaaatggggaggaatgaaaagtctgttttgagctttgcggtgtctctgggattgcatttcctggaggctgttttggagacaactcacagacttcgagaattctccgtggccctgaacagtgtctctgaagttgccctcgtgtcttgcctgacgtgtgctccttcaggcccacaaagagaagccctgcgttgtggacaaacagtctggggacctatggacgagacgtctgtcttcgactaatgcatattttttaagtgggcctggtccacgttgatttctgggagacggagtcggcgcaaaccttgactctacttaagtgccctgatggaggcagcccgtgcgctgggcagggagctgaagccactggggtgtggggtgaggtcaggccctgccctacagaggagctgctccgaacagcccaggcggggcagcccctgaccgaggggatctgcagatgccccgccaggccggtatctggggtccttgttgcaggcagcgactgctgagtcatgctgagctcagcgcgggaaggggcccccgcggggacggatgggggtggggccactcgctgacctcatccccttggcactccccgacttttttggtgggaccctcagaactagacctggctcagacccaaatcgggccccctaccccaaggtccccccttgttggaagccggctgtgtgctttgtctccgtgtctttttggttcccataatttttttttttctgggatcctgcctgtggccatattgtcccctcactctgggtggtggctcagtgtacactcattgatcctctgcccctctctctcccctgacttggggtctctgggaagagtccatggaggaggggcagccgtccaaagcaccccgttgactgtggggcccgagttactcatttaccaaatgtcatacctcagcccagagacctttagtcggccgagaggggccttggggcccataggtggagggagaggaggggctgagagagacaggatctgaagaccatagagaacgtggggtggggagacagaggcccagagaaaaagagactcagacagagaccctgagagagagggggacagagacccagagagaggggaaaacagacccggagacagaggggtacagagaccctg

SEQ ID NO: 1560381 - DNA, 4001 bp, Homo sapiens
ccgtcagcgggggccgtggctgccggcgccagagacaaaggcctctgcccgcttgtcacctaattaaagcattttctctggtccaaggcccacctccagcatcgccaaccccgagcagggcaggctaacgtagggtccagccctacggggctttgcgggtgggtgttcttcccctgtgaggagaggagagattgtaagaaataaagacacaagacaaagagataaagagaaaacagctgggcccgggggaccactaccatcaagacgcagagaccggtagtggccccgaatggctgggcgcgctgatatttattgtatacaagacaagggggggcaggataaggagggtgagtcgtccaaatgactgataaggtcaagcaagtcacgtgatcatgggacagggggcccttcccttttaggcagccgaagcagaaagagaaggcagcatatgtcagcgttttcttctctgcacttataagaaagatcaaagactttaagactttcactatttcgggcgggcgcggtggctcacgcctgtaatcccagcactttgggaggctgaggcgggcggatcacaaggtcaggaggtggaggccatcctggctaacacggtgaaaccctgtctctactaaaaatacaaaaaattatccgggcgcgtggtggagggcgcctgtagtcctagctatttgggagggtgaggcaggagaatggtgtgaacccaggaggcggagattgcagtgagccgagatcacgccactgcactccagcctgggggacagagcgagactccgcctcaaaaaaaaaaaaaaaaaggctttcactatttcttctaccgctatctactacgaacttcaaagaggaaccaggagtacgggaggaaaatgcaagaggacaaggagcgtgaccattgaagcacagcacagcaggatgactgcgggcaggcctagataatacccagcctcccacaagaagctggtggagcagagtgttccctgactcctccaagaaaaggagattccctttcgtggtctgctgagtaacgggtgccttcccagacactggcgttcccgcttgaccaaggagccctcaagaggcccttatgccggtgtgacagaaggctcacctcttgccttctaggtcacttctcacaatgtcccttcagtacctgaccctatacccaccggttgtttcctggttatattagttatacaacaaagaataaaagtaatagctaatgattaataatgtttacactaatgattgatactgtccatgatcatctctatatctaatttgtatgataactattcttattctaactattttctttattatactgaaacagtttgtgccttcagtctcttgcctcggcacctgggtaatccttccccacagactgaccctcccattcaagatacatcaatgtcaaagactcaggagtttgacttgattcccagaagtttaaccatcatctccccaggctcgggactcccagcacccagacccttctgctcacacccagcagtccaggcccccagaccctcctccctcagacttaggagtccaggctcccggcccctccttcctcagacccaggagtccaagccccctgcccctccttcctcagacccaggagtccaggaccccagcccctccttcctcacacccacgagtccagatccctagcccctactccctcagacccaggagtccagaccaaagctccctcctccctcagacccaggagcccaagttccccagcccctcctccctcagatccaggagtacaggcccagaccctcctccctcagacccaggagtccaggccccccacccctcctccctcagacccaggagtccagagccccagccctcctccctcagacacagaaggcctacccttgcacccttaggggctccaggaaattagccaacctgtcttccctctgggtgcccactccagggcctggcttggctgccaactccagtcagggactttcagccacccctccccccaggttatttcaggagcacctgcctgggcctgggatggcttctctggtgaaagaaacaccaggattgcatcagggaggaggaggctgggatgtccagggtctgagcatctgagcagggacagatgaggttgaggttggcccacggccaggtgagaggcttccaaggcaggatacttgtgtctcagatgcggtcgcttctttcatacagcaattgccgccttgctgaggatcaaggaacctcagtgtcagatcacgccctccccccaaacttagaaattcagatggggcgcagaaatttctcttgttctgcgtgatctgcatagatggtccaagaggtggtttttccaggagcccagcacccctcctccctccgactcaggtgcttgagaccccagatccttctctctgagactcaggaatgtgggcccccagcccctttcacctgggtcccagctaacccgatcctcccctccctcatcccctagacccaggagtctggccctccattgaaaggaccccaggttacatcatccattcaggctgcccttgccacgatggaattctgtagctcctgccaaatgggtcaaatatcatggttcaggcgcagggagggtgattgggcgggcctgtctgggtataaattctggagcttctgcatctatcccaaaaaacaagggtgttctgtcagctgaggatccagccgaaagaggagccaggcactcaggccacctgagtctactcacctggacaactggaatctggcaccaattctaaaccactcagcttctccgagctcacaccccggagatcacctgaggacccgagccattgatggactcggacgagaccgggttcgagcactcaggactgtgggtttctgtgctggctggtcttctgctgggagcctgccaggcacaccccatccctgactccagtcctctcctgcaattcgggggccaagtccggcagcggtacctctacacagatgatgcccagcagacagaagcccacctggagatcagggaggatgggacggtggggggcgctgctgaccagagccccgaaagtgagtgtgggccagagcctgggtctgagggaggaggggctgtgggtctggattcctgggtctgagggaggaggggctgggggccttggcccctgggtctgagggaggaggggctggggatctggactcctgggtctgagggaggaggggctggggatctgggcccctgggtctgagggaggaggggctgggtctggacccctgggtctgagggaggaggggctgggggtctggactcttgggtttgaaggaggaagggctggggtcctggactcttgggtctgagttgggagggggctttggcttgggcttctcctgggtctgagggaggaggtaggctgtgggcttggactcccagggctgggacagagccggatggtgggacagagtcgggtggtgggacagtcccgggtgggagaggtcctcgaaccaccttatcgctttcaccccttaggtctcctgcagctgaaagccttgaagccgggagttattcaaatcttgggagtcaagacatccaggttcctgtgccagcggccagatggggccctgtatggatcggtgagtttccaggaccctcctcaccacccaccatgctcctcctatatgtcgccctcacagcctggggtgccttgtcttgctcatcccccccggagccagacttgattctatttgctctgcacgcccccagctgcaacatttggaggttgaagttgtcatcagtgtttgcaagatgaggaaactgaggcccaggccggggcgccagtgacctcaatcatgtgatgtgtggatgctggagcggcctgaggctcaggttattgggagtctcgtgattcagtaacccctgctcctgcccacacggcccctgtgtgcacggctcatgctgggcacagggacactcggggaagccatggccagtaaag

SEQ ID NO: 1560382 - DNA, 4001 bp, Homo sapiens
ctgtaatcccagcactttggtaggctgaggcgggtggatcacctgaggtcaggagttcgagaccagcctgactaatatggtgaaaccccatttctactaaatacaaaaaattagccaggcatggtggctcatgactgtaatctcagctacttgggaggctgaggaaggagaatcgcttgaacctgggaggcggaggttgcagtgagccgagattgtaccattgcatgccagcctgggcaacaagagcaaaaatccatctcaaaaagatacaacaacaacaacaaaccacacctcccttagggctgcgtgggcacaaagggaaatgctgtattacatgggctgtccctggtattcagagcagaatttgtgccccaaactcacacttatgtcaggcttgaaccaagcaccactcccattctgcctgaaggcattattttttttgaattgctttttttgtagggatggtggggagggggtcttgctatgtggcccacactgatctcaaactcctggcctcaggaggtcctctgttctccttcctcagcctcccaaagtgctgggattacaggcatgagacaccacacctggtctatcttactgagatttttttttttttttttttttttgagacggagttttgctcttgttccccaggctggagtgcaatggcacaatctcggctcaccacaacctccgcctcccgggttcaaacgattctcctgcctcagcctcccgagtagctgggattacaggcatgcaccaccacgcctggctaattttgtatttttagtagagacggggtttctccatgttggccagactggtctcgaactcctgacctcaagtgatccgcctgtctcggcctcccaaagtgctgggattacaggcgtcagccaccacgtccagccccgtccacgtctttctattgcggcccggcttcctcctctcccctctgtcccctacacccagcgccggccctgccccttcccagctcgcagccccttcagggctccctatgcctcttaagacacaatcccagtctctcgccggccccgcacacccctccggctttgtcaccagctgttcccgtgaaataacccagctctccgctcacccggggccccgtcctgtcccccagctctgaaagcctttctctaccccaaccgccccgtgccccgggcagctcagcacatccggctcagtcgcaccccactgcctcgagctcgctgtcttcctgcacctccccgggattcccggattcccggcattatcacttccaccctggggaggagaagggagcttcagacaataacgtagggccatcacttggaaaccccacctttattctccgacccagaacagaagcggtgattcagagcgggattagggagtgcaggagggacggagccgccctccctgggcgacggcagggctcggaggtgagaccagcagtttgggttccatgaagcctctgaggagccccagggtggaggcaggaaagtcgggtcaccaccagctgtgcgcgagccatctgcaccattactgccagggtggttcatagaaactgctgaggggaaggagacaaggaaggacctggtggcccggggtggagaaggggagggagctggtggttggagctctagaaacagatccacctggaaggaagtggggagggagctaaggagggcggctggctggggaggggggtcctggctgccgagggagggaccctcctctcctggaggtcctgagttgggggtgcctcccagagggcaccagggacccacgagggcacacaggtccacgtcccaaatccctgctctccgcctgggcgtgtgtgcagaggtgtgcgtgttgtagggtgggagaggagccccctcaccttctctcacctggtcctgctgaaggaaaccgggacagagtggttgggcaggcacctcagtgttccctctgggtctctcttcactcagggccaaagaaacccttccagcatcggtgactggcaaaccccgcccaggagctacagggctttccagagcaggtgtggctgggctgcgggagggaggtgagcccgtagcccctcctccctccccattgccggccacaaagtccatcttgttatctacccttagctcctccacctgcaccaggcaccccaagcctggccataagggtgggggagagaggcaggacaaggtcgcatcccccatccgggtccccgagggtcttccttggggaactgttgtgatgccccaacagaaaggggcccccactctgctccgctcctccaggcagccaggaaggcctccaggaaggcagcatggaggcgggggacagagtcctgctaggccaggctctcgctgactctgagtcccctcagagtcttatatttatttattaattaattattagtagtattactttttgagagagttttgctcttgttgcccaggctggagtgcaatggcgtgatctcagctcactgcaaccgccgcctcacaagttcaagggattctcctgcctcagcttcccaaagtgctgggattacagacgtgagccacctcgccctgcctatttcaaaaaaatttttaaatacaaatgggcccggtgtggtgactcacacctgtaattctagcactttgggaggccgaggcaggcggatcaactgaggtcaggagtcagagaccagcctggccaacaaggtgaaaccccgtccttataagaatacagaaattagccatggcccagcacagtggctcatgcctgtaatcccagcactttgggaggccgaggcaggtggatcacctgaggtcaggagtttgagaccagtctggccaacatggtgaaaccctgtctctactaaaaatgcaaaaatcagtggggcgtggtggcatgcacctgtaatcccagctacttgggaggctgaggcaggagaatcgcttgaacttgggaggcggaggttgcagtaaactgagattacaccattgcactccagcctgggaaacaagagcaaaactctgtctcaaaaaaaaaaaagatggatgaggaattttactgagagaagaggcaggcaccaccagagctcccagcagtcctaacaggaggaaagagaaaccagcagccactccccagcttcagctaagcagcaggaggctacctaccagctacggagctcccttcaaacaaacaaacaaaaaaatcagatcaagcttcccactctaaccaccagtttgcagaaaacaggaggacaaagttcccagtgaaacgacaccatgaggcagcaatcagcccagtccagaatgtgagcccgtccacaggacaaacgacctgtttccctgtgattcagcgacaaggaaaaaagaaacagggtggggcggggaagtggggaggtgagctgtcataaaatatgcaaaacaggccaggtgtggtggctcacgcctgtaatcccagcactttgggaggctgagtcgggcggatcacgaggtcaggagattgagaccatcctggctaatacagtgaaaccccgtctctactaaaaatatatataaaaaaaaaattagccgggcgtggtggtgggtgcctgtagtcccagctacttgggaggctgaggcaggagaatggcgtgaaccccgggggcggagcttgcagtgagccgaggtcacaccactgcactccagcctgggcgacagagcaagactccctctcaaaaaaaaaaaaaaaaaaaaaacgcaaaacagatttggggctcagaggcttagactttccaactccatgaatgtcccacagatgttccaaagtcatgggaatgacctgggcgcagtggctcatgcctgcaatcccagcactttgggaggccgaggcaggaggatcacctgaggtcaggagtttgagaccagcctagccaacatttttttttagtgaaactccatctctactaaaaatacaaaattagctgggcatggtggtgcacgcctgtaatcccagctactcaggaggctagg

SEQ ID NO: 1560383 - DNA, 4001 bp, Homo sapiens
cacctggcagccactcttttgtttagtttctcagttcatacaaaaccgcatccaggccatcaccaataattctatacgacaaacactccttctaacaaccccacaatatcaccccttaccccaaaatcttccttcagcttaatctctcccactctaggttcccacaccaacccctaatcccgctcgaagcagccctgagaaacatcgcccattatctctccataccaccccaaaaaattgttgccaccccaacactttaccactatttcgttttatttttcttattaatataagaagacaggaatgtcaggcctctgagcccaagctaagccatcatatccccagtgacctgctcgtatacatctagatggcctgaagcaactgaagatccacaaaaaaagtgaaaatagccttaactgatgacattccaccattgatttgtttctgccctaccctaactgatcaatgtactttgtaatctccccccaacccttaagaaggttctctgtaattctccccacccttgagaatgtactttatgagattcaccctctgcctgcaaaacattgctcctaactccactgcctatcccaaaacctataagaacaatgataatcccaccaccgttgctgactcctttttcggactcagcctgcctgcacccaggtgaaataaacagccttgttgctcacacaaagcctgtttggtggtctcttcacacagacatgtgagatcgcgatgaggactgagatcccaccccagttgaacccaagatattttttcctagaaaaagattaaaaaatgctactctgctgagacatcacaaagatcaggaagcaaaaagcaaaaaaatagctgggcgtggtggctcatgcctgtaatcccagtagtttcggagagtgaggtgggcagatctcttgagcccaggaattcaagacctgcctgattggccgggtgcaatggctcatggctgtaatgccagtacttgcggaggctgaggtgggcaggtcacctgaggtcaagagtttgagaccacccttggcaacatggtgaaatcttgtctctactaaaaataaaaaattagccaggtgtggtggcaggcaccttaatcccagctactcaggaggctgaggcacaagaattgcttgaacgagggaggcagaggttgcaataagccgagatcatgccactgtaccccagcctgggcgacacagcaagactctgtctcaaaaaaaaaaaaaaaaaaaaaaaaaaaagtcctgcctgagcaacatagtgagaccccatctctacaaaagaaaaaaaaattaaaaagtatccaggtgaggtggcacacacctgtagtcccagctactccagagcctgaggcaggagggtcactcgagcccaggagtctgaggctgcagtgagccatgattgcatcactgcactccagcctgggcaacagaccaagattctgtctcaaagaaaaagaaaaaaaaaatgcatcttaagtccaccccaggcagggcagggccagagagaatccaaggccagaaaagatgagtggggggaggctgttgatggggttggggtgcagaggggactccactccagagctctgccagagagagagacaaacgtcactctttccttccggtttggcaaatcacccagaaccttccatgtcctccccaacggtggtgcatgccacacccagaaagacccctgcctgtgactagggggtgctggccacattccaggtcatggacagtttggtgactctccaccgggattttgtgccagcccagccacatcatgaatcagggcccataggatgggggccgaggggaggagggacggagccaggaagcctttcctgggaggtctcccaggcattctgggtggggggaaaaggtagaatgggataacttacctggagaggcagcgagcagtggatgaggacagctcaccaggaggccatggcaggtttcctggggcggggaggaagtgggaacagagaagaggaggaacaagtacgtgtacattgcagcacacacctgtcaccaggtgacctagggtgttctcccctgcagcagggatattgtctggaagccagtttccggggtgtcctaatctcgcctgtgagaccggataagggtgcaggaacttggaggcccgggacgtgacccgggctccatctgtagcctgaaggctgcctggctttgggtgcacagctggtccatccataaagtgaaaacgctggtctaaagctttgattctcaaagtgggtcccacgggggccccatgggtttctcgggagatggtaaagggagagaagtgagcagaattttaaccatcccacccattcagtcagtcaatcaacaaacattgcttatgcacctattgcataccagacccagggagagtgcagggagcaagtgggtgaatcagacaatacatgacttttgtaagggaacaattcttcaggcctctgagcccaagctaagccaccatctcccctgtgacctgcacgtgtacatccagatggcctgaagcaactgaagatccagaaaaaaagtgaaaatagccagttcctgccttaactgatgacattccaccattgcgatttgttcctgcctcaccctaactgatcaattgactttgtgacaatacaccacccccttgcaataatgtactttgtgatattcccccgcccttgtgaacatactttgtacaatataccctcgtcacccttgagaaggtgctttgtaatatcctcctccctgcccttaagaaggcactttgtaatattctccccctccagcccttaagaagatactttgtaatattctcctcacccttgagaatgtactttgtaagatctaccacctgcccgcaaaaaattgctcctaactccactgcctatcccaaacctataagaactaatgataatcccaccaccctttgctaactctcttttcggactcagcccgcctgcacccaggtgattaaaaagctttattgctcacacgaagcctgtttggtagactctcttcacacgggcgagtgtgacatttggtgccgaagacccaggacaggaggactcctttgggagaccggtctcctgtcctcgccctcactccgtgaggagatccacctgcaacctcaggtcctcagaccaaccagccgaaggaacatctcaccaatttcaaatggggtaagcagtcttttcactctcttctccagcctctctcgctacgcttcaatctccctgtccttccaattccagttatttttcctctgtagtagagacaaaggagacacattttatccgtgaacccaaaactccggcgctggtcacggacttggaaagacggtcttcccttggtgtttaatcactgcagggacgcctgccctgatcattcacccacattccattggtgtctgatcaccgcgggggacgcctgccttgctcatcacccacattcccttggtggcaagtcaattgcggggacacctgctttggctgctcaccccccaaagccccacttctccgtgtctctacctttctacgggcaaccttccgccctccattcccccttctcccttagcctgtgttctcaagaacttaaaacctgttcaactcacacctgacctaaaaacctaactgccttattttgcaatactgctaggccccaatacaaactcgacaacggttccaaatggccagaaaacggcacttttgatttctccactttacaagacctagatgatttttgttgaaacatgggcaaatggtccgaggtgcctgacgtccaggcattcttttttttttttttgagacggagtctcgctctgtcacccaggctggagtgcagtggcgcgatctcggctcactgcaagctccgcctcccgggttcacgccattctcctgcctcagcctcctgagtagctgggactacaggcgcccgccaccatgcccagctaattttttttatttttagtagagacggggtttc

SEQ ID NO: 1560384 - DNA, 4001 bp, Homo sapiens
aaaaattttataggccaggcgtgagggctcatgcctgtaatcccagcattttgggaggccaaggcgggcagatcacctgaggtcaggagttcaagaccagcctggccaacatggcaagactctgtctctactaaaaaatacaaaaattagccggatgtggtggtggtgcctgtaatcccagctacttgggaggctgaggcaggaaaatcacttgaaatgagcggagatcacaccactgaacgccagcctgggtgacagaatgagactctgtctcaaataataacaataataaatttataacacagcatcttcctctgtcacccaggctggagtgcagtagcatgatctcagcttactgaagcctcaacctcccaggttcaaatgatcctcccacctcagcctccagaagagctgggattacaggcaagcgccaccatgcccagctaatttttttttttttagacggagtctccctctgtcgcccaggctagagtgcagtggcatgatctcggctcactgcaagctccacctcccgggttcatgccattctcctgcctcagcctcccaagtagctgggactacaggtgcccgctaccatgcccggctaatttttttttgtttttagtagagatggggtttcaccatgttagccaggatagtctccatctgacctcgtgatccgcctgcctgggcctcccaaagtgctgggattacaggtgtgagccaccatgcccagccttttttttttttttttttttttaaatttacttttgagacttggctcactgcaacctctgcctcccagattcaagtgattcttgtccctcagcctcctgagtagctgggatgacaggtgggtaccaccatgcccggctaatttttgtatttttagtagagacagggtttcactatgttggtcagactggtcttgaactcctggcctcaaatgatccacctgcctcggcctcccaaagtgctgggattacaggtgtgagccaccacacccggcctaaataaatttttttttcccaccaaacacaacagtattgttttggtagaaaccatgtcaccattgctacccaaaatttagtgcctaaaaagagaggtgcttatggtgtcaaatttccatacgattgttatttcttagtatgaaagaaaggatgtgaagtagctcattaatgattttctacattaattacatattgaaataacgctttggatgtattgggtgaaataaaatatatcattaaaattaaattggccggatgtggtgcctcacgtctgtaataccagcaatattgggtggatcacctgaggtcaggagttcgaggccagcctggctaacatggcgaaaccctgtttctactaaaaatacaaaaaattagccaggtgctggcacatgcctataatcccagctactcgggaggctgaggcagaattgcttgaacccgggaggcgggggttgcagtgagctgagattgcgccactgcactccagcttggacaacaaaagctaaactccatctcaaaaaaaaaaaaaaaaaaaaagaaaaagaaaaacattaaatttcctggtattcttttttaatgtggttgctgggaagttttctttctttctttctttttaaaattattattattttttgagatggagtcaccgtgagccactgtgcctggcctattgctgggaaattgtaaattacattcggggtagaaaacagtttggtgcttccttgaaaagcctgagagatacttatcacatcaccagcaatctccctcctaggtagaagccccaaagaattaacaacaaaaggacgcaaacagatacttgtacacccatggtcacagcagcctgactcacaacagaacaaacagcccaaaggtagaaactacccagatgtccatcaatagaagaacaaatatacctagtgtgatccatccacacaatggaatatcactcagccatgaaaaggctgggcgaggtggctcatgtctgtaatcccagcactttgggaggccgaggcaggtagatcacgaggtcaggagatcaagaccatcctggctaacacggtgaaacccagtctctatggaaaatacaaaaaaattagctgggcatggtggtgggcgccagtagtcccagctacttgggaagctgaggcaggagaatggtgtgaacccaggaggcggaactggcagtgggccgagattgtgccactgcactccagcctgggtgacagagtgaggctccgtctcaaaaaaaaagagaaaacctgtctctactaaagatataaaaaaaagagccggcatggtggcacatgcctgtaatcccagctacttgggaggctgaggcaggagaattgcttgaacccgggaggcagagcttatagtgaaccaagattgcgccactgcactccagcctgggcaacagggcaagactctgtctcaaaaaaaagaaaaggagcgaggctcccacacaggccacagcgtggatgaaggctgaggacatcacattcaatgacagaagccagacacaaaatgccacacagtgtgtgatcccatttctgggaaatgtccaggacgagccgatccacagagacaggaagtagaacagaggtgactggaggctggagaggggagaatgtttgtttaacgggtccagagtttctgtttggggtgatgaaagttttggaaagatgctggagtgatggttgcacaacactgcacgcgatgccactgaattgtatgcttaaaaatgcctaaatgcgccaggtgcggtggctcacgcctgtcatcccagcactttgggaggctgaggcgggaggatcacctgaggtcaggagttcgagacaagcctggccaacatggtgaaaccccgtctctactaaaaatataaaaattagctgggcatggtggtgcacacctgtaatcccagctactcaagaggctgaggcagaagactcacttcaacccaggaggcagaggctgcagtgagcaacaagagcaaaactctctctcataaaaaaaaaaaaaaagcctaaatggtgaagtttatgttatacatatatgtatggatatatggaattacaatttaaaaataaggtggctgggcgcggtggctcacacctgtaatcccagcactttgggaggccaaggcgggcggatcaccaggtcaggagattgagaccatcctgactaacatggtgaaaccccacctctactaaaaatacaaaaagaaattagccaggcgtggtggcgggcgcctgtagtcccagctacttgagaggctgaggcaggagaatggtgtgaacccgggaggcggagcttgcagtgagctgagatagcaccactgcactccagcctgggcgacagagtgagactccgtctcaaaaaaaaaaaaaggtaacacaccaaaaaccattgacttatttacttgtacaccttaagttggctcactgtatggtatgtgaattacatcctgatgaaaccgtttatttatttttgagactgagtcttgctctgttgcccaggctggagtgcagtggcacaatctcagttcactgcaacctccacctctgcgttcaagtgattctcctgccttagcctctcaagtagctgggattacagacacacaccacaatgcccagctaatttttgtatttttagtagagacggggtttcaccacgttagccaggctggtctcgaactcctgacctaaagtgatccacccgccttggcctcccaaagtgctgggattacaggcataagccaccacgcccagccgatgaagctgttttaaaatgatgtagggttgccagctttctctgttgggccaagttggtcttaaccttgcagcaggtgacctgggtgtgatgaagtgatccagacacccagtcccaagctcatgccaaggttctggaaagagattcaaaacacaagccctcagggcacagtccgagcccagagtgggagggaggttgaactttgaccaattactgctttgt

SEQ ID NO: 1560385 - DNA, 4001 bp, Homo sapiens
ctccagcctgggcaacagagcgagactctgtctcaaaaaaataaaataaaataaaataaaataaataaactgagttggtctaaaccttatggtgcatagcggagctccaggcatggtgacctaggtgtgatgagaagggattgagagcacaagcgcataccaaagttctggaaaaagactcaagagacagccctcgagggacactcagagcccggactgggagggaggttgaattttaaccaagtattcctttgtgctgtcgggctcttgggctgccagtgaaaggttaatgtttagagatacatttaatattaatatattatcatgtggcccctgggtttatggcgacctcttcctaggagacagtgaagtctttgccggtgaccttcaggaggggagattgggggaaacggggaacgggagtccaggagagagatctcacccaaggtactttccctggaaaatgatcgatccacgccacaaagatcaggatgcaaaaaaacaaagccagaaagcaaaccgcattctaagccctcttttaccaccgggagtggcagaggcagagaaaatccggggccaggaaggatgaaggggtgtaggctgctgatggggtcggggggcacgggattctaccgcagagctctgcaagagagacagacagacacccacttcctcctggtttggcaaatcagccagacctcccatatcctcagcccacctcggtgcatccagaaagacccctgcctgcgactaggggctgctggccaaatgccaggccactgcacagcctgcagaccctcccccagggatcttgtgccagcccacccgcactctgaattacagcagacaggactgaggctgaggggaggaggctcggagccaggaggcctttccctggacccatgcgatccgggttgggggtgaaagtgggacaagaggccttacctgggggggccagtgtgcagagggccctagagctgagaggccgcggacggagtaacagctggattctgaggacgtggaagaggccacaccacgcagcagaaggaaggaggaagtgtacccggagctgaaaccaggccctttccaaccaccacacctgtcatcaggtgacccagggcatcctgtcctggagcccggacatcctttgaaaacaaatcgtggggctcccctaatccccgttgcagaaccaaacagggtgaagggatttggagactcaggtcatgcatgaccttgccccacctgtggcttcaatgcgatgtggctttgagtacaaagtgaaaaggctgacctgaaccaccggttcccaaagcgggttccacagggacaccaggggttccttgggaggtgggaatgaggaagtgagcagaatttctacctttccgctttccttcccaccagatcccaccttctcactcagttggcccatcaccaaatatttcctgagcactaagtgccaggccaagggatcttgcaggaaaccggtgggcaagtcaggcaactcatgaaccttggaagggaactttcttcaattaaaattgcagccttttgaataaaaaagggatggaagggcattccagttacaaggaacaaccttcgcaaaggccctgaggcagcagaaatgcaggcatgttgaggaactgcaggaggagtctcagcaggctgggtcttcaccactggagaggaggcagagctgttgcagaggctgggccacggtcagccatagggtgttcagcaccaaggcaatagggagccatgtgaggcttcaagcagaggggttaccatgtcgatacatgttttcagatgctctcttctggtaggctgggcacaggtcccatattggtggcagaagcttcctccggtggcctcaacaagcccctctgtgtgcctcaaagccacttcctttccccacccactcctgcagggcagtgcaaagcagaagtccagggagctatgcaaacttcctggaatggagagaaatgatctggaatactggttttgagggaggatgaccttaaactctctcactcccaagctgggtgcaaaggtgaccgagctcaaagcccagcctccaagtatcacgactgccctgttctagaaatcatttctgggaggctgcatcatgctgcctgagttctactatctcagtgcccagccacgcccagaccagtgaggttctgggaggtagggatgggccagggggttggggtctcccagagctccagaagtggcaacctaattccactcatgtctcattccttgactggtgaggttgactgtaacttattaaaaaaatgacttctgggggccgggcgtggtggctcacgcctgtaatcccaacactttgggaggccgaggtgggcagatcacgagatcagaagatcaagaccatccatcctgactaacatggtgaaaccctgtctctactaaaaatacaaaaaaattagccaggcgtggtagtgggtgcctgtagtcccagctacttgggaggctgaggcaggagaatggtgtgaacccgggaggcggagcttgcagtgagcctagattgagccactgcactccagcctgggcgacagtgcaagactctgtctcaaaaaaaaaaaaaaaaaaaaaaaagacttctgaggccatgcacagtgactcacacctgtaatcccaacagtttgggaaggagaggcaggaagatcgcttgagcccaggagtctgagaccagcctagggaaaacagagatacccctatctctctcttttttttgagatggaatcttgctctgtcactcgggctggagtgcagtggcacagtctcagtttactgtaacctatgcctcccgggctcaagcgattctcatgccccagcctcccgagtagctgggactacaggcgcgtgacacggcactgggtaactttcgtatttttttaatagagctggttttcgccatgttagccaggctgatcttgacctcctgacttcaggtgatctgtctgcctcagcctcctaaagtactgggattagaggccaggcatgagccactccgcccagctgggttttttttcttttttttttttgagacagagtctcgctctgtggcccaggctggagtgcagtggcacgatctcggctcatggcaagctctgcctcctgggttcacgccattctcctgccccaagtagctgggactacaggcgtccgccatcacgcccagctaatttttttttttttttttgtatttttagtagagacatgttagccaggatggtctcgatctcctgaccttgtgatccgcccgcctcggcctcccaaagtgctgggattacaggcgtgagccaccacgccccgcccccagctgggttgtttcttaaggattcaaaatccaaaggtaggtctctagtgagggacagtagggctctagtcattccatcgatgtgatcgctgggcaaagggagggtggaggaccttgggctgacctcagggatggtgccagagagaacgtgtgctcatcctgaaactgctgtgtgacttgagaggtttcctggtcctctctgagcagggctcaccataccagtgccaggtgggacctccctgccaaggagctgagcccagagcccagagtagggtatcatgaggacctcttccctcaggctcagggcaagctaggacctgcttgaggcttgcaggggcagttaggccatctgtgcacctcgttggggtcttggccctcattggaccctccagtgccttccctggccagggctgggtgggagatggagctgccagcctgctggaaatttttctccccctggggcccagggctgggagccaagggcagctggtgcccaggaggagggagaaggccccacgggctgggcgtgccatgaaccacatgtgagatccggggcatacagggaggcaatgggggtttgagggcagtgctggggttccagagggggcaggccagagccccccaacatcggccaggtggctgggcctctgccctcgtggga

SEQ ID NO: 1560386 - DNA, 4001 bp, Homo sapiens
tgagccagggccagcagaacaggtgtaagagtttccatagcatccccagtacctgcaagagggacccctctggaggaatcacgcagtccacacactgggtcaggtccccgatgagctccgagtcccccaggaagctgtcgatgaggcaataactggcctaggagaggaagaagggaccagcctaggattcaagtgggcccagggtcagacaaccaagaacctgtgggaccaggctgccccaggggctgctgggaactgtagttcccaaatggcagtgcccaggtatcctaacttcccaccctcatgtcctgcaacctcaccctcaagtccttcttcagtctctccacgttgcggatattggtcagttcttcaagtcccacaagaaggacctagaagaatcatataggagaggatgggcgaggggctgggacttgaactcctgggtctgaaggaagagggggctgggactcccacttctgggtctggggactggggagtcaagattcctgggttctggccgggcgcggaggctcatgcctgtaattccagcactttgggaggccaaggtgggtggatcacttgaggtcaggagtttgagaccagcctggccaatatggtgaaaccccgtctctacaaaaaatacaaaaattagctgggcatggtggcacgtgcctgtaatcccagctacttgggaagctgaggcacgagaatcgcttgaacctgggaggcagaggttgcagtgagccgagatcaagccactgcactccagcctgggcaacagagcgagactccgtctcaaaacaaaacaaacaaacaaacaaaagattcctgggttctgaggaaggaagtgttggtggtctgcactcctaggtctgagggaaaaggatgctgagatctcagattcctggtctggggagaaaagaggactggtgagtctcaccatggctccaaacaccatttggagtagtctctccagcctcagctcagagatgcccacctcagatgacagaacaatgagggtgatgctgtggaatggaagtgagaagaatgagtcaaggcctggggaatcaggaaggggtatgttggagtccgcccattgatcctagaacaccagatacatcctctctcagaccaacctgcctttcttatagagaacatcagggatcaaagagggtaactggcttgctaaagatcccatagccaaattaacagctgcttttagagagctggaaggcctccggggtcatcttcaacagggactatcacccaggccctgtccctgtcccacgttccctcctggggacctgtcatggaagcttttccacaccacagtcgtgttctcggtcctcgcagagctcagctgcacctccagattctgcccaaacatgtggactccattgagggaaccgatgacagagaacgggagctaaggaggggttagggacatcagacaagagcacccccccatccccttcccccttaggacccaagtgtgccagctcccagccccatcctctttccatatgacctggcagtgcctctttggggaaccaggcttattggtccattgcctcctcggtcctacaaattcaacactgaaacttccccagcccctactgccttgaagacccagagtcaaaacaccgaacccccttcggtttagatacaggcgtccaaggccccacctgctgacgggcgggggcgccgccgcgactgctcctgcagaatagggggaccccgctggaggccgcgaggcacagcagatgcacagtgccgcccgtcccctcctcccccatttaggactcccaccgcggtccctcacgtggggactgtcagtgcgggtcttggagcatggcggtaatcagagtaactcggcctgtggtccggagccgccagagggcgagatggggagctgattggaagaggattaacttcccgccttcttcacccaactcaaacagaccctcaaaccctattcaggcacctcccccaaacccattaggttctcttccgccctagccggaagtcacggtacccctaacaaagatggcggcaaattgaatttgcaaagctttctagtttctccgaggaggtaaagagaaccaagaagccggattgaagatgatgactgcgccaaggcgttgcctagccaccatcctgtaggctttgatgatttacattctaaacggaaaaaacagctgtgcccggatcaaagattgcgatggtcccaaagcattgcctagcaaccacattccctgtaggtttccagtatatagtagtaaacaatgtgccctactcaaagatggcgaccgtggcggggcgttgccaagcaaccaccattcagcctgatatccattccaaggctgtaaacagctgtgccctgctcaaagatggcggcacgtcgaagtccgagcaccctccttggggcgaaatcgagaaaaacaccatctcccctacaaccttcgagggtggttgagtccagcgatcgttgcctagtaaccactaaaaaaaaggttgtttttgttattagaaaaaagaaaacaaggaaatcctttattttccagaataataaaaataatatcatttctgtaatgaatttatacatgatagcataccatgtaaaatgtgaaaaatcccttccccaatttttttcctaaaatacagtttaacgtagactattcatacgttttcacaaagatgatcaatatactaacatttccacactttcttttttgccatgaaaaagtatgtctatttcatcttaataatgtatttttataatctattttatggatgtgacaaattgatttgaccaattctgtattgatgtacattaggttgttgaactcctccagactagccaactagtgctgggacagcattttactgactttttaaaatgcccttatgaatatttttattattttacacaggcagcatttacttgtaatgacaaaagtatttatgattcatttttcccttcctcttccttcttgcagatcagcccatctttctagcataatttttaattttcctacttcctaaagtacatctttttctcttttttttttttttgggagaggggacagggtctcgttctgtcgcccaaggtggagtgcagtggaaccatctcggctaactgcaacctccgcctccaggattcaagcgattctcctgcctcagcctcctgagtagctgggattacaggtgtgcccccaccacgtccagctaatttttgtagtttttgtggagacagggtgtcgccatgttgcccaagctggtctcaaactctttggctcaaatgatccacccacctcagcctctcaaagtgctgggactacaggcaggagccaccatgcctggcctaggtaccattttaatcttccttcttgcctattgatattttttttcctttctctggattacttttatcttccttacaactttattaaaatgttagttacacaggcataaaagagggggctgctctagatgaaaagaaacttgagacataatgtctaaatatgtgtgtggtctttgtttggatcctgatacaaataaaccaactgtaaaaacacattttgagacaattggaacgtttgattacacacttactgttggatgatactaagaagttaattttgttacaggtaacaatggcatactagtaatgtaagaaagtgttcataaaattggaaagatgcctgccaagcacacaggagtaaaatcatatgattgtatggatttgaaggcttcagcaggccaggcgcggcggcttacgcctgtaatcccagcactttgggaggccaaggtgggcgggtcacctgaggtctggagttcgagaccagcctgaccaacatggagaaaccccggctctactaaaaatacaaaattagctgggcgtggtggcgcatgcctgtaaactcagctactcgggaggctgaggcaggataatcgcttgaacccaggaggtggaggctgccgtgagccgagactgtgcc

SEQ ID NO: 1560387 - DNA, 4001 bp, Homo sapiens
atatgggaggaggaaagtggggtaccagggagaggaaaggggtgtataggaaagggagggaggggacagggaggaggaggacaggggggagagaagacgggaagaagcagaggatgggccacgagatgctgagacagacgcaggcaagagaaagagaaccagagaggtatcacatagacagtgacacagatagacacagacaggaaaagatgcagacaggtggaatcagagaggaaggacaaaatagagggaaggagaatgacagagatatcaatactgggactctgggggagggcgagggggaatcaaaggaccagcaaagccaggctctcccccaggactcaaaattagaccccccgctcaccgtaagtgaacgggtcgtgttcctttggactttctggaaagagagagaaatcaggggttgaatgcttcctggggtcctggcagggaggggcatgaggagaccactggaggctctgccttgctgggcttagagtctgagggtgtctgggcaggctgcccacactctctgggtcccagctgccccctctgcactgtcccagatggggcaggtggcacctaactgccccagctccctgactcacggcaggctgtctgtgacccagttatcccatcggggattcagccccatcccaccccatctttgcctgatctggggcttcctctcccctcccccaaataccagcctgtgactggaccccacgtggagacccccaaacttcttggtaccccagccgacttagtctaggttggggtctccaacttggttcttcggtccccaccgccacccctggggctgaggtgggtagcgggcagcctcccctgcactcacctgccttggccatggtgaggagacccacacagaaaaccaagatgtggccaagagacgccattgtcctgggggggacaccacggattaggcagtgtgtgcccttgctctcccacatagggcttgaacccaagggattaagtcagagacagtctggggactgaatcacagaagtgtttgtcctctatcttggtggctccaagctagagaaacgggtatccccagcttcgtggggacacagtgtcaccaaaacaacctccacgatgggatcacacaacaacacaacgtagcagggacgggggtgagacacacagtccccggggggcctcccttgggcctccacctcccgcagcaggcccccgattcccagacctaccctggcagggcagaggaggcgctgcctcacacaaacacagagcaggagacagcagggcacgcccaagtcccacctgcctacatgcccggcctcactgtgccccgcgaaatcccagctccctgccctctccgcccgcccgctcgcggcctgaccccgggtataaatatctcccacttcaccctggaggaattctgctcgctcaggccaccatggcaacagcctgccttcccccactcagggggtcacgcacagccctgccggggtgaggcccagctgccacatcgccacaggctgcccctgtgggaaaggtcaccccgtctcctccctgggcagcaacgagaaaaggaaaagacagcccctctgcccgcctctgggtgacatctttcacaatcggatgtcaggcaagtgacatgaggcccagcccagtgggccttagagatagaaaacacatgctggggcagggatacacacacacacacacacacacacacacacacacacacacagtggggccggaatggacatgaacaacaacctctccccaaactgctggttggagcaggacgtggggtgtaaacaccgtcaggcatccaatactcctcctctgggcctccggtgcccccacgcagtgacgcaaccagccctacacacgtgtgtgtcccaactccacaccctgccagggtgcacacgcaccagcagggcagggaggagtcacccacatcccaccctgcagaacccactgcctcaaccacactccctccctcttgggttggcctgcctgggaagcctcgggctggccactcctgctcccaaaataggcggcccagccagaccaggggtgaggcctggagggaaggagtgggggacgctcaccccaatcgggctgtcccctgctgaaagaaggcccccaaacgtcctgctgtgccccgggggctgagcactttggaccccctggcccagagctggacgcgccgcccccagcagcctcccctcccagccccaccccacccatgccctccccaaccagcagctgaaactggagctggggctggaggggggccagggggcggcccccagcccagactgccctggcccgcttggttaactctctcagttcagagagagcagcagcaggcagccagcaggcaggctggagaggctaggaggattgtggaggacagggttgtgaacacacacacacacaaacacacacgcctccaagagcttttgggctgaggcggctgccccctgggaactgggtccagccagggccgaaggtcacccagcctgactgcccaggagcccactgacccccgatcccagtgctccgtgaggtccttaacagggctgttttagaggacgggagggaggtgtgtgtgtgtgtgtgtgtgtgcgcgcgcatgtgcgctatctgctgtggtgagatccccagaaatgcaccacacacacacacccacacacaatcccaaagacccagatatacaggtacaaaaccagacaaaaccatgtatgtatgtacatccatagaagcagacacacacagaatgacacactgatagagaaacccaaagacccggacacacagccaacaccttttatgccagtcacaaaataccagaacaagcacatttatgtctacacagacccacgcacgctcatgtagatggatggccacacagagatacagtcaaagacatagccacatcaccatctacactcacaaactggccacaaaaatgcatgtttatgtgaagacccacccacaaatggccatacagaaacacacaagtatgtgcacaccgcacataaatgcattctaagatgcatggccaaacatggccaggtacggtggctcacacctgtactcccagcactttgggaggccaaggcgggaggatcacttgaggccaggagttcaacaccagcctggccaacccgacgagagctcgtctctactaaaaaaatatacaaaaattagctgggtgtggtggcgtgcgcctgtaatcacggctactccggaggctgaggcaggagagtcacttgagcccgggaggcagagcttgcagtgagctgagatcatgccactgcactctagcctgggcaacagagcgagactctgtctcaaaaacaaaaacaaaacaaaaaaaccccaaaggtacagacatgcagccagcactcctacatggtcccaaagataggaaggccaacaagcttgtgtacacacagacagatttccatgggcacagatacacaagcagaaacaccatcaaggacaacccgccgctctcacacatacccacaaaagcagaaacacacacactggttcacaccctatgcttgagcaaacaggcacatggttggccacggtgacagatgcgcaggctgacacacttgcatgttcacacattccaaaaccacagatatgtatttaaccccacactttccttcccctgagctcttgtcggggacaacacacctggcgtccccatgggcaggccaggtttacaggtcctggtgacagggaaacctggaatggcccaggcactgcactcctggttgtgtgaacttgagcagctctgtgcctcattttcacatgctccaaaatggaaaaatcactaagatcacgtgtataatcctggacagggctcagaggtctctgaacttgacattgtcttatgattaacttcattttttgtttgtttgtttgagaccgggtcttgctctgtcacccaggctgaagtgcaatggcacaatcatagctcactgtagcctcaa

SEQ ID NO: 1560388 - DNA, 4001 bp, Homo sapiens
cctcacccgcggcgccctccagagcaggagcgggcgaaggagggcggggaggggcgtcttacctctgctgctggttgaacttgcaccggcatcttctgcctgtgggcgtggagaggtaggagaagctgaggctccctcccggcgggcgccaagcggcgctgtagctccagctcgccctcgcgaggggcggggcttgggggacggggcggggctagaggcgagaccgggggccggggaaccaaggcagggtaggcggggcaaggcctgggaggggttggggcggggcggggccagggaggggcgggaccagggagaagcggggccagggagaggggggctagggagaggcggggccagggagaggcggggccagagagaggtggggccagggagaggcggggtagagggcgggagctaggggcactcactcagcacgatgaggatgcccaggatgaagaggatcccggcgatgacgaggcctccgatctgcagggactggtagtctgtgagcagcagagcagggaaggtgagggcagggaagacaggagggagaataggagaggggtaaattgggaaggagggaacagggagaaaggaccagcaggcagaaggggggaagtaagataattaagggggagcagatatgggaggaggaaagtggggtaccagggagaggaaaggggtgtataggaaagggagggaggggacagggaggaggaggacaggggggagagaagacgggaagaagcagaggatgggccacgagatgctgagacagacgcaggcaagagaaagagaaccagagaggtatcacatagacagtgacacagatagacacagacaggaaaagatgcagacaggtggaatcagagaggaaggacaaaatagagggaaggagaatgacagagatatcaatactgggactctgggggagggcgagggggaatcaaaggaccagcaaagccaggctctcccccaggactcaaaattagaccccccgctcaccgtaagtgaacgggtcgtgttcctttggactttctggaaagagagagaaatcaggggttgaatgcttcctggggtcctggcagggaggggcatgaggagaccactggaggctctgccttgctgggcttagagtctgagggtgtctgggcaggctgcccacactctctgggtcccagctgccccctctgcactgtcccagatggggcaggtggcacctaactgccccagctccctgactcacggcaggctgtctgtgacccagttatcccatcggggattcagccccatcccaccccatctttgcctgatctggggcttcctctcccctcccccaaataccagcctgtgactggaccccacgtggagacccccaaacttcttggtaccccagccgacttagtctaggttggggtctccaacttggttcttcggtccccaccgccacccctggggctgaggtgggtagcgggcagcctcccctgcactcacctgccttggccatggtgaggagacccacacagaaaaccaagatgtggccaagagacgccattgtcctgggggggacaccacggattaggcagtgtgtgcccttgctctcccacatagggcttgaacccaagggattaagtcagagacagtctggggactgaatcacagaagtgtttgtcctctatcttggtggctccaagctagagaaacgggtatccccagcttcgtggggacacagtgtcaccaaaacaacctccacgatgggatcacacaacaacacaacgtagcagggacgggggtgagacacacagtccccggggggcctcccttgggcctccacctcccgcagcaggcccccgattcccagacctaccctggcagggcagaggaggcgctgcctcacacaaacacagagcaggagacagcagggcacgcccaagtcccacctgcctacatgcccggcctcactgtgccccgcgaaatcccagctccctgccctctccgcccgcccgctcgcggcctgaccccgggtataaatatctcccacttcaccctggaggaattctgctcgctcaggccaccatggcaacagcctgccttcccccactcagggggtcacgcacagccctgccggggtgaggcccagctgccacatcgccacaggctgcccctgtgggaaaggtcaccccgtctcctccctgggcagcaacgagaaaaggaaaagacagcccctctgcccgcctctgggtgacatctttcacaatcggatgtcaggcaagtgacatgaggcccagcccagtgggccttagagatagaaaacacatgctggggcagggatacacacacacacacacacacacacacacacacacacacacagtggggccggaatggacatgaacaacaacctctccccaaactgctggttggagcaggacgtggggtgtaaacaccgtcaggcatccaatactcctcctctgggcctccggtgcccccacgcagtgacgcaaccagccctacacacgtgtgtgtcccaactccacaccctgccagggtgcacacgcaccagcagggcagggaggagtcacccacatcccaccctgcagaacccactgcctcaaccacactccctccctcttgggttggcctgcctgggaagcctcgggctggccactcctgctcccaaaataggcggcccagccagaccaggggtgaggcctggagggaaggagtgggggacgctcaccccaatcgggctgtcccctgctgaaagaaggcccccaaacgtcctgctgtgccccgggggctgagcactttggaccccctggcccagagctggacgcgccgcccccagcagcctcccctcccagccccaccccacccatgccctccccaaccagcagctgaaactggagctggggctggaggggggccagggggcggcccccagcccagactgccctggcccgcttggttaactctctcagttcagagagagcagcagcaggcagccagcaggcaggctggagaggctaggaggattgtggaggacagggttgtgaacacacacacacacaaacacacacgcctccaagagcttttgggctgaggcggctgccccctgggaactgggtccagccagggccgaaggtcacccagcctgactgcccaggagcccactgacccccgatcccagtgctccgtgaggtccttaacagggctgttttagaggacgggagggaggtgtgtgtgtgtgtgtgtgtgtgcgcgcgcatgtgcgctatctgctgtggtgagatccccagaaatgcaccacacacacacacccacacacaatcccaaagacccagatatacaggtacaaaaccagacaaaaccatgtatgtatgtacatccatagaagcagacacacacagaatgacacactgatagagaaacccaaagacccggacacacagccaacaccttttatgccagtcacaaaataccagaacaagcacatttatgtctacacagacccacgcacgctcatgtagatggatggccacacagagatacagtcaaagacatagccacatcaccatctacactcacaaactggccacaaaaatgcatgtttatgtgaagacccacccacaaatggccatacagaaacacacaagtatgtgcacaccgcacataaatgcattctaagatgcatggccaaacatggccaggtacggtggctcacacctgtactcccagcactttgggaggccaaggcgggaggatcacttgaggccaggagttcaacaccagcctggccaacccgacgagagctcgtctctactaaaaaaatatacaaaaattagctgggtgtggtggcgtgcgcctgtaatcacggctactccggaggctgaggcaggagagtcacttgagcccgggaggcagagcttgcagtgagctgagatcatgccactgcactctagcctgggcaacagagcgagactctgtctcaaaaacaaaaa

SEQ ID NO: 1560389 - DNA, 4001 bp, Homo sapiens
cctcgcgaggggcggggcttgggggacggggcggggctagaggcgagaccgggggccggggaaccaaggcagggtaggcggggcaaggcctgggaggggttggggcggggcggggccagggaggggcgggaccagggagaagcggggccagggagaggggggctagggagaggcggggccagggagaggcggggccagagagaggtggggccagggagaggcggggtagagggcgggagctaggggcactcactcagcacgatgaggatgcccaggatgaagaggatcccggcgatgacgaggcctccgatctgcagggactggtagtctgtgagcagcagagcagggaaggtgagggcagggaagacaggagggagaataggagaggggtaaattgggaaggagggaacagggagaaaggaccagcaggcagaaggggggaagtaagataattaagggggagcagatatgggaggaggaaagtggggtaccagggagaggaaaggggtgtataggaaagggagggaggggacagggaggaggaggacaggggggagagaagacgggaagaagcagaggatgggccacgagatgctgagacagacgcaggcaagagaaagagaaccagagaggtatcacatagacagtgacacagatagacacagacaggaaaagatgcagacaggtggaatcagagaggaaggacaaaatagagggaaggagaatgacagagatatcaatactgggactctgggggagggcgagggggaatcaaaggaccagcaaagccaggctctcccccaggactcaaaattagaccccccgctcaccgtaagtgaacgggtcgtgttcctttggactttctggaaagagagagaaatcaggggttgaatgcttcctggggtcctggcagggaggggcatgaggagaccactggaggctctgccttgctgggcttagagtctgagggtgtctgggcaggctgcccacactctctgggtcccagctgccccctctgcactgtcccagatggggcaggtggcacctaactgccccagctccctgactcacggcaggctgtctgtgacccagttatcccatcggggattcagccccatcccaccccatctttgcctgatctggggcttcctctcccctcccccaaataccagcctgtgactggaccccacgtggagacccccaaacttcttggtaccccagccgacttagtctaggttggggtctccaacttggttcttcggtccccaccgccacccctggggctgaggtgggtagcgggcagcctcccctgcactcacctgccttggccatggtgaggagacccacacagaaaaccaagatgtggccaagagacgccattgtcctgggggggacaccacggattaggcagtgtgtgcccttgctctcccacatagggcttgaacccaagggattaagtcagagacagtctggggactgaatcacagaagtgtttgtcctctatcttggtggctccaagctagagaaacgggtatccccagcttcgtggggacacagtgtcaccaaaacaacctccacgatgggatcacacaacaacacaacgtagcagggacgggggtgagacacacagtccccggggggcctcccttgggcctccacctcccgcagcaggcccccgattcccagacctaccctggcagggcagaggaggcgctgcctcacacaaacacagagcaggagacagcagggcacgcccaagtcccacctgcctacatgcccggcctcactgtgccccgcgaaatcccagctccctgccctctccgcccgcccgctcgcggcctgaccccgggtataaatatctcccacttcaccctggaggaattctgctcgctcaggccaccatggcaacagcctgccttcccccactcagggggtcacgcacagccctgccggggtgaggcccagctgccacatcgccacaggctgcccctgtgggaaaggtcaccccgtctcctccctgggcagcaacgagaaaaggaaaagacagcccctctgcccgcctctgggtgacatctttcacaatcggatgtcaggcaagtgacatgaggcccagcccagtgggccttagagatagaaaacacatgctggggcagggatacacacacacacacacacacacacacacacacacacacacagtggggccggaatggacatgaacaacaacctctccccaaactgctggttggagcaggacgtggggtgtaaacaccgtcaggcatccaatactcctcctctgggcctccggtgcccccacgcagtgacgcaaccagccctacacacgtgtgtgtcccaactccacaccctgccagggtgcacacgcaccagcagggcagggaggagtcacccacatcccaccctgcagaacccactgcctcaaccacactccctccctcttgggttggcctgcctgggaagcctcgggctggccactcctgctcccaaaataggcggcccagccagaccaggggtgaggcctggagggaaggagtgggggacgctcaccccaatcgggctgtcccctgctgaaagaaggcccccaaacgtcctgctgtgccccgggggctgagcactttggaccccctggcccagagctggacgcgccgcccccagcagcctcccctcccagccccaccccacccatgccctccccaaccagcagctgaaactggagctggggctggaggggggccagggggcggcccccagcccagactgccctggcccgcttggttaactctctcagttcagagagagcagcagcaggcagccagcaggcaggctggagaggctaggaggattgtggaggacagggttgtgaacacacacacacacaaacacacacgcctccaagagcttttgggctgaggcggctgccccctgggaactgggtccagccagggccgaaggtcacccagcctgactgcccaggagcccactgacccccgatcccagtgctccgtgaggtccttaacagggctgttttagaggacgggagggaggtgtgtgtgtgtgtgtgtgtgtgcgcgcgcatgtgcgctatctgctgtggtgagatccccagaaatgcaccacacacacacacccacacacaatcccaaagacccagatatacaggtacaaaaccagacaaaaccatgtatgtatgtacatccatagaagcagacacacacagaatgacacactgatagagaaacccaaagacccggacacacagccaacaccttttatgccagtcacaaaataccagaacaagcacatttatgtctacacagacccacgcacgctcatgtagatggatggccacacagagatacagtcaaagacatagccacatcaccatctacactcacaaactggccacaaaaatgcatgtttatgtgaagacccacccacaaatggccatacagaaacacacaagtatgtgcacaccgcacataaatgcattctaagatgcatggccaaacatggccaggtacggtggctcacacctgtactcccagcactttgggaggccaaggcgggaggatcacttgaggccaggagttcaacaccagcctggccaacccgacgagagctcgtctctactaaaaaaatatacaaaaattagctgggtgtggtggcgtgcgcctgtaatcacggctactccggaggctgaggcaggagagtcacttgagcccgggaggcagagcttgcagtgagctgagatcatgccactgcactctagcctgggcaacagagcgagactctgtctcaaaaacaaaaacaaaacaaaaaaaccccaaaggtacagacatgcagccagcactcctacatggtcccaaagataggaaggccaacaagcttgtgtacacacagacagatttccatgggcacagatacacaagcagaaacaccatcaaggacaacccgccgctctcacacatacccacaaaagcaga

SEQ ID NO: 1560390 - DNA, 4001 bp, Homo sapiens
aaaagatgcagacaggtggaatcagagaggaaggacaaaatagagggaaggagaatgacagagatatcaatactgggactctgggggagggcgagggggaatcaaaggaccagcaaagccaggctctcccccaggactcaaaattagaccccccgctcaccgtaagtgaacgggtcgtgttcctttggactttctggaaagagagagaaatcaggggttgaatgcttcctggggtcctggcagggaggggcatgaggagaccactggaggctctgccttgctgggcttagagtctgagggtgtctgggcaggctgcccacactctctgggtcccagctgccccctctgcactgtcccagatggggcaggtggcacctaactgccccagctccctgactcacggcaggctgtctgtgacccagttatcccatcggggattcagccccatcccaccccatctttgcctgatctggggcttcctctcccctcccccaaataccagcctgtgactggaccccacgtggagacccccaaacttcttggtaccccagccgacttagtctaggttggggtctccaacttggttcttcggtccccaccgccacccctggggctgaggtgggtagcgggcagcctcccctgcactcacctgccttggccatggtgaggagacccacacagaaaaccaagatgtggccaagagacgccattgtcctgggggggacaccacggattaggcagtgtgtgcccttgctctcccacatagggcttgaacccaagggattaagtcagagacagtctggggactgaatcacagaagtgtttgtcctctatcttggtggctccaagctagagaaacgggtatccccagcttcgtggggacacagtgtcaccaaaacaacctccacgatgggatcacacaacaacacaacgtagcagggacgggggtgagacacacagtccccggggggcctcccttgggcctccacctcccgcagcaggcccccgattcccagacctaccctggcagggcagaggaggcgctgcctcacacaaacacagagcaggagacagcagggcacgcccaagtcccacctgcctacatgcccggcctcactgtgccccgcgaaatcccagctccctgccctctccgcccgcccgctcgcggcctgaccccgggtataaatatctcccacttcaccctggaggaattctgctcgctcaggccaccatggcaacagcctgccttcccccactcagggggtcacgcacagccctgccggggtgaggcccagctgccacatcgccacaggctgcccctgtgggaaaggtcaccccgtctcctccctgggcagcaacgagaaaaggaaaagacagcccctctgcccgcctctgggtgacatctttcacaatcggatgtcaggcaagtgacatgaggcccagcccagtgggccttagagatagaaaacacatgctggggcagggatacacacacacacacacacacacacacacacacacacacacagtggggccggaatggacatgaacaacaacctctccccaaactgctggttggagcaggacgtggggtgtaaacaccgtcaggcatccaatactcctcctctgggcctccggtgcccccacgcagtgacgcaaccagccctacacacgtgtgtgtcccaactccacaccctgccagggtgcacacgcaccagcagggcagggaggagtcacccacatcccaccctgcagaacccactgcctcaaccacactccctccctcttgggttggcctgcctgggaagcctcgggctggccactcctgctcccaaaataggcggcccagccagaccaggggtgaggcctggagggaaggagtgggggacgctcaccccaatcgggctgtcccctgctgaaagaaggcccccaaacgtcctgctgtgccccgggggctgagcactttggaccccctggcccagagctggacgcgccgcccccagcagcctcccctcccagccccaccccacccatgccctccccaaccagcagctgaaactggagctggggctggaggggggccagggggcggcccccagcccagactgccctggcccgcttggttaactctctcagttcagagagagcagcagcaggcagccagcaggcaggctggagaggctaggaggattgtggaggacagggttgtgaacacacacacacacaaacacacacgcctccaagagcttttgggctgaggcggctgccccctgggaactgggtccagccagggccgaaggtcacccagcctgactgcccaggagcccactgacccccgatcccagtgctccgtgaggtccttaacagggctgttttagaggacgggagggaggtgtgtgtgtgtgtgtgtgtgtgcgcgcgcatgtgcgctatctgctgtggtgagatccccagaaatgcaccacacacacacacccacacacaatcccaaagacccagatatacaggtacaaaaccagacaaaaccatgtatgtatgtacatccatagaagcagacacacacagaatgacacactgatagagaaacccaaagacccggacacacagccaacaccttttatgccagtcacaaaataccagaacaagcacatttatgtctacacagacccacgcacgctcatgtagatggatggccacacagagatacagtcaaagacatagccacatcaccatctacactcacaaactggccacaaaaatgcatgtttatgtgaagacccacccacaaatggccatacagaaacacacaagtatgtgcacaccgcacataaatgcattctaagatgcatggccaaacatggccaggtacggtggctcacacctgtactcccagcactttgggaggccaaggcgggaggatcacttgaggccaggagttcaacaccagcctggccaacccgacgagagctcgtctctactaaaaaaatatacaaaaattagctgggtgtggtggcgtgcgcctgtaatcacggctactccggaggctgaggcaggagagtcacttgagcccgggaggcagagcttgcagtgagctgagatcatgccactgcactctagcctgggcaacagagcgagactctgtctcaaaaacaaaaacaaaacaaaaaaaccccaaaggtacagacatgcagccagcactcctacatggtcccaaagataggaaggccaacaagcttgtgtacacacagacagatttccatgggcacagatacacaagcagaaacaccatcaaggacaacccgccgctctcacacatacccacaaaagcagaaacacacacactggttcacaccctatgcttgagcaaacaggcacatggttggccacggtgacagatgcgcaggctgacacacttgcatgttcacacattccaaaaccacagatatgtatttaaccccacactttccttcccctgagctcttgtcggggacaacacacctggcgtccccatgggcaggccaggtttacaggtcctggtgacagggaaacctggaatggcccaggcactgcactcctggttgtgtgaacttgagcagctctgtgcctcattttcacatgctccaaaatggaaaaatcactaagatcacgtgtataatcctggacagggctcagaggtctctgaacttgacattgtcttatgattaacttcattttttgtttgtttgtttgagaccgggtcttgctctgtcacccaggctgaagtgcaatggcacaatcatagctcactgtagcctcaacctcatgggctcaagtgattctcccacctcagcttcctgagtagctgggactatgggcgtgcgacaccatgcctggctaattttttaattttttgtacagtcggggtttctctatgttgcccaggcttgtcttgaactcctggccccaagcgatcctcccacttcagcctgccaaaatgtgggattacagaaatgagccaccgt

SEQ ID NO: 1560391 - DNA, 4001 bp, Homo sapiens
cagcttcccagttaattccacatgctgaactcacaattttagttggagcatccatttcttttcctttttttgcgggaagaaagcctgaggctttggggagcattactgaggcccaggaagtgtttaggatccccaaaagtgttgggggttgggggagctggcgtgggtgggtgggcaggatggcatgttggataggggcacaggttgtaggtggactgcctgtggtctgaagctgtcacccatgaccatacgagtcctggtaataacagcagatgcttattgagtgtctaccccatgggggcattttctcagcttcccacttactcgctcaatctctgcagcttaatgcagggggcactattattagcccacattgcagttgtaatcctgtaacccctgcaaattcatcttaaagccctatgctctgtcgccatggctgttgagtctcacctcttaagcctctttccaggggctcctccaagccacctctggcctgcaaggccccactatacccccttcccatgatgtcatccagccaagactgacagatggtatcctcctcgccccagcctctgcaaaacaacgtccagtcccatgcttccggaggctgcagggagccgggagctgggtctgccctcacgttccccattcaggctgttgtctgaagaggctgtgggctgctcccgaactgatgtggttggtgagcaggttagagaggaaggcagccctgcagctgatgctctgtctacctgctctcatccttcctggccatgaggtcccaaggccggcctgaggactgtttcccccacctgccctctgctatcccctctattcctccataccatgggagaatggtctcatgttcaggggtgggtagaaagatcctgcccgctgtgtgctcctgaaatctcccaagcaactccccatttaaagcttcccccagcagctccatccttttttcctggaggtctccagaatccagatccctcaatgtctggacaccccgagtccacccagcactccttatccacccagatccctcaatgtctggacaccccgagtccacccagcattcctcatccacccagatgtccccagtccatctacgcacccctggtccacttagatacccctacctacccaggcaccccctctcctccacccagctatccccaacccagatatccctaatccatgcagacactagtctttcagacaccccaaccacacttatcagtcctgccctcacctcagctggttcaacaagtccctgagaggagaatggtggggaaagggacattaggggaagggacttccgtttatctcctggctccagaaaagcatttcacaagattttaggcgctttaacataaaagcttctatggggcagggtcagggggcaggtagatacttcctaatttaggggcagagacaaggagggcttggaggaaggggccccagctgctcacctgtgtggttcaccaggctgagcagaggttccgggagaaatcgggctgccaggcggagtcctgcgtttatccgaagctgccacgccctaagcaaacctgggcaggtagaaaacaagtcagatgccctgaggcccaggggctccattcctgctcttaaagagacagcttcaccccctccccagccatgggcggcaggttgctccctggggtcaccaggaccacagcagcctcaggtgagacggagaattggatgggctggaactcggcccctggaattaagggaggagctttctccaatctcctgtgcccaggagaggaccttgaatggggaaggttctggggtctttaaacggcagagcctccagggccatgcagtgagatgatgcgttggtgttccgacctcacttcttttccttagatgatgtgttttgcctggtggaaggattgctggcagttgtggagaacttaaagtccccttccaggccacatcttgccgctggtacaatttcaggatcagcagaagatgctagcgtgaccaaagtcaggagatggggcaggggtggatatgagggagcggctggaacagcagggaggggtcagggtggggactctgggaccttagtcctggtcataacctgctccctgccctggggagaatgagaactgtctgccaggcaccaggctgcagtttcctagccaggctctttccgtgggtgctgggagccagacgcctgggtctacagagtgggtgctggtgggggcggctgcctcctagtccacataaggcccccagcactgtacaagcctccctccccctttcctcccctgtctcctgctcctcctcctccaggcattccttccggatggggtctgtgcaggctcccccatggtcccagttgggggtgccccctcccctcaattccgccttcttagacagagggacttttgtctgggggctggatggagaacaaggatcctttgagcggttggcggaggattggggtcacggggaggggtagggccaggaaaggggtagctctgccctggacaccagctggactccaggcgaccccaacaccaccgtgggggcggggaggagggctgcagggcctggccagggagaagcagctgctgggagtgtggagcacaggacaggaaaagggggtttgggtcaaggctcttccggaaactggcctgctgggggcagagagaaggaccccccacttgtcatcgctgagggatcggggagggcaatgttcgcccagcgctacaccccttctctatgtggttccctggggcaagttgtcaagcccaggtcctagacaagggtaaggctccctcctaccactcttaaggcggggccagttcccataaggaagccgggcggggggacctcggggtagggctctaagcaacaggtccaggaggagatagaaacaggaaggggaggcccggaggccaactcagtatagctaaggggggtctttgtgtctgggcggatagcgtctcttccctagacccttgaagcttgtgtctgggacgaccccttggtggtcttgggagtggaatggtgtctccctctgctgggaagcctgggaactgcaggcatccgagagcgagtaggggcgtgtacagggtggctgggaagggcggggggtgctctgcccttcaccggaacggggtgaactggagaactgttgtctaaaaatcttggaggaacacccctgcccgtggttagatacagaagtatttcccagacagcttgctaaggggaaaaaaaacaaggtattgggaaaccgtgcagtgtgctaccatttgtgagcggtaaaataatgcatatgtatatacttgtaatgaataaaatatttttggagattggcatccatacccatggcttctggagagggaaactgggaggctggagggtggggtggaagtgagactcactcattatcacgtgccctcttatattttttgaattttgcatcttgaaaatgtactaccttaaaggggtttaatttaaaaaatttggttcagatttaaaaaaaaatttgcaggtcaaaatttcaacctaagggctggtttcaacctgggggaccagcaattagagacttctgacaacctctgaatgttctgtagttttaaacaccatgatcttacattctgaggtacagacgtttacggtttttacccaatccaggtcaaccataaattcttcctaggctggacgtgaacatgctgcgtccaagtgtgtgttgggctggcgctggggcttgggtttatggtcagaaggactctgagaccctagtgtgatgagcacactgagtcttaggaagggctgtgaggagtagagtttgtgcagtcacttgcaccctattggggattaggtctcatttggagtgagtcttctgggccaatctgacttcagttatgttttaaatgcatgtaggtaatatgttttattaatatattgtatataatatacataataaacatatttgaaaaagtttctctcgttttgcttttggaatc

SEQ ID NO: 1560392 - DNA, 4001 bp, Homo sapiens
ccatcctggtcctgcctctgtaccctccagcctggacatcccagcagcctccttcttgggctccctgctcctgtctccgcccccacagtctgttccaacctgcagccagagggagcctgggaccacctgagtcaggtcggggcccgcctggttcagagccctgccctggctgcacttcactccacataaaagcaaagccctcacgtggcccgtaagtcctcctccatctggtcccatcacttctctgtcctctcgtcatcccactctgccccttctcatcccaacccagccaccccacctgcctgctattcttaaaacacaccagacaacactcagcccccagacacctgcaaagctcattccctcatttcctccaagtgtttgttggtccaaatgtcacctcctcagtgaggccctccctgaccacccagtttaaacaatcctcattacctctacttttctgcaagcacgtatcacctcctagcacacgatataatttactaacttgtctctctccactagagtgtgacctcttgttttattcagtgctgtttccccagtgcacagaatatctagcacatagtaggtgctcaataaatatttgtcaaatgactgaacgagtatatgaaaatcattttatgaaggagaaatgagggcgccttcagtggggcatgcaccctgggttctgggggcaggcaggacagttgttttctcagctcctccacccattctcctctgacacagggcacttcccttcgctgagcctcagtttcctcatcagtaaaatgggcaagacaacaggtgtgactgactgtcagaggcaaagcctaactgacctaacacacaccacacctgccacacagaaagaacgatcaatacccccctgtggttcccatctttcaggagacactttccaggcaaggctgagatgttgccaactctttggactaaccccagctcaacagctttgcctaactgtgtaatgcctggggactctgggagcctaggtttcctggctgctgagtagaaaaccgacaccaatctccccgccaaatgaaactcagtgagttcttcttggaggtgaaattggaggatgctcagcaggacaggccctggccagactcactggaagcagccacccgggtctgaggtgtccaaagagggtgtaacgtcgccccgccatagggatccccacttcctggtgccggctcagcgggagggtgacagggcaggacaacgttcacacgggccaaccacccaccccgcagcacacgtggggctggcctggctgggggctctggggcagggtggaggccagagatgggtcttacctctggtggggagaatcaggccaacgatggtgagaagacacaggcgaccagagggcgacatctgtgggaccaggcgatgctggggtcagccatgatgtcagtgagaccgacctccggcagcccccggggatcctgcagccctttccctgccctgagcaaaaacctctggcttccaagaccccctgccaggggctgacggctggcctcaggggaaaggggagggtcttaggtggggataccaaaccgtcaccctgcttccttcccctgcaggtccccaaagaaaacaagaagcatgagataaatgggtcttccagcagctgcaagggccggcgggcactcctgaagcagagaaacacctccctgcgccttccgccaggcgcttatccctcactgggactgacgcaaggaggggactggggcagaggagtagataggaggcctcttccctcccccaggggcccagagcccgggagtcggcgaggaggggaaggaggaagagtgagtaacgcctcccgcgctcagaggaaaaagtgagttggtgtcaggggccgccttgcagggatggcgcgctggagagacctaagaggcactggtccgaggggggtggcagagagctggggagactgaggcaggcgggcgggagcgaggcagagcggcccactgtagcccaggagaggaggcagagagatgtgggcgtggatggggggcggagaggagcggaaggggtcaaacccctacccacctgagcccggcccgtgggcagaggggcagcggatggaggtggcgcacgagagggacttacgtcggagctgggggtcctaagccggcagcctcgtggagagagggacgcggcggtggctgctgcgtccaggcggagggtgtggccaggggagcgcgagcgggcggggacccagacgggctcagtcatttcctcttgggtttcctggcttcagagcccggggtgggagcaggagggggaatcgctgagggcgacggggggcaggggtgagggcatagtggtgggagagggtgggaacggggatggggcaggcaggtctagggtgagtggacgcctctgagagagcagggggagaaacgggagggctctattctggggtcgctggaggaagggaaaggacaaatccggaggtgttgaggaaggagaagggattgaaggggggcatctcggggcactgggggaggagaatgaagagggggcgactccgggcacgcaggggagagctaccccaggttcagttctgcacccctacccacaccgtgccccacagatgagaacacacagacagaacagaggaaaaaaccaaatgcacatttattaagctcaagacatggacactgaggggccagggggacggatcttcggggatgagacaaggaggtgcaggggggccatacacggggatgctgggggtgctgggccgggatggactcccggatcccaggagctggaggcctgaggccctgggtctggggtgcagacgggctctttgggggatcgtcattgccaaggcctggagagggacagcagggtgcagcggctccagccttggggtgggtggggcggctcattccggggagcgctcccggcgcgcggctgggtccccaccgcctccacccggtcctcaggctcccgcgctcaggcagggtcggcagcggagtttcctcgggaaggtgttacacgccgccgccaccaggggctggggagagagggggtgcgtgagccactagaaaggtggaaactgcctccctccccacagctcgttggctctccattccccggcaccatggaagccagaccccagggactgtcaccccagagctaacactgaggagctgtcttgcctcccacactctaatgtcttgttcccttggggacacctcctggctgctgtcatggagagaaacacctgctacggggctggcgaccccagacccaacctgggcttttggggctatccgcctgccagaaagggagtccccatctcccttcccatttgcaatctcctcctacaccctcactcctttcctacactccctgtcctgaacatttggatacaacgggaagtcccccattccccacccgctgcagaccatcattcacctaggatagaccagaaacctgtgcaaagtcttcagctgtgccccaggtgacaaggccaacccccatgctgccccacgcatccataagtgccttgttcatgttttaaaactcattaaataaacatgaaacaggccaagcgctgtggctcacgcctgtaatccaagcactttgggaggccgaggatggcggatcgtttgaggtcaggagtttgagaccagcctggccaaaatggtgaaccaccatctctgctaaagatataaaaattagccgggtgtggtggtgtgtgcctgtagtcccagctatttgggaggctgaggcaggagaatcgcttgaacccaggacgcagaggttgcagtgttgtaataagctgagatcgtgccactgcactccagcctgggcaacagaggacacagcaagactctgtctcaaaaaaaaaaaaaaaaaaaaaaaaaaaaaggaacgtgaaacaaattccacaccaaatacttctcaaccattgaataacccgtgtccccctcccgcattttttttttttttttttttttttt

SEQ ID NO: 1560393 - DNA, 4001 bp, Homo sapiens
cctccatctggtcccatcacttctctgtcctctcgtcatcccactctgccccttctcatcccaacccagccaccccacctgcctgctattcttaaaacacaccagacaacactcagcccccagacacctgcaaagctcattccctcatttcctccaagtgtttgttggtccaaatgtcacctcctcagtgaggccctccctgaccacccagtttaaacaatcctcattacctctacttttctgcaagcacgtatcacctcctagcacacgatataatttactaacttgtctctctccactagagtgtgacctcttgttttattcagtgctgtttccccagtgcacagaatatctagcacatagtaggtgctcaataaatatttgtcaaatgactgaacgagtatatgaaaatcattttatgaaggagaaatgagggcgccttcagtggggcatgcaccctgggttctgggggcaggcaggacagttgttttctcagctcctccacccattctcctctgacacagggcacttcccttcgctgagcctcagtttcctcatcagtaaaatgggcaagacaacaggtgtgactgactgtcagaggcaaagcctaactgacctaacacacaccacacctgccacacagaaagaacgatcaatacccccctgtggttcccatctttcaggagacactttccaggcaaggctgagatgttgccaactctttggactaaccccagctcaacagctttgcctaactgtgtaatgcctggggactctgggagcctaggtttcctggctgctgagtagaaaaccgacaccaatctccccgccaaatgaaactcagtgagttcttcttggaggtgaaattggaggatgctcagcaggacaggccctggccagactcactggaagcagccacccgggtctgaggtgtccaaagagggtgtaacgtcgccccgccatagggatccccacttcctggtgccggctcagcgggagggtgacagggcaggacaacgttcacacgggccaaccacccaccccgcagcacacgtggggctggcctggctgggggctctggggcagggtggaggccagagatgggtcttacctctggtggggagaatcaggccaacgatggtgagaagacacaggcgaccagagggcgacatctgtgggaccaggcgatgctggggtcagccatgatgtcagtgagaccgacctccggcagcccccggggatcctgcagccctttccctgccctgagcaaaaacctctggcttccaagaccccctgccaggggctgacggctggcctcaggggaaaggggagggtcttaggtggggataccaaaccgtcaccctgcttccttcccctgcaggtccccaaagaaaacaagaagcatgagataaatgggtcttccagcagctgcaagggccggcgggcactcctgaagcagagaaacacctccctgcgccttccgccaggcgcttatccctcactgggactgacgcaaggaggggactggggcagaggagtagataggaggcctcttccctcccccaggggcccagagcccgggagtcggcgaggaggggaaggaggaagagtgagtaacgcctcccgcgctcagaggaaaaagtgagttggtgtcaggggccgccttgcagggatggcgcgctggagagacctaagaggcactggtccgaggggggtggcagagagctggggagactgaggcaggcgggcgggagcgaggcagagcggcccactgtagcccaggagaggaggcagagagatgtgggcgtggatggggggcggagaggagcggaaggggtcaaacccctacccacctgagcccggcccgtgggcagaggggcagcggatggaggtggcgcacgagagggacttacgtcggagctgggggtcctaagccggcagcctcgtggagagagggacgcggcggtggctgctgcgtccaggcggagggtgtggccaggggagcgcgagcgggcggggacccagacgggctcagtcatttcctcttgggtttcctggcttcagagcccggggtgggagcaggagggggaatcgctgagggcgacggggggcaggggtgagggcatagtggtgggagagggtgggaacggggatggggcaggcaggtctagggtgagtggacgcctctgagagagcagggggagaaacgggagggctctattctggggtcgctggaggaagggaaaggacaaatccggaggtgttgaggaaggagaagggattgaaggggggcatctcggggcactgggggaggagaatgaagagggggcgactccgggcacgcaggggagagctaccccaggttcagttctgcacccctacccacaccgtgccccacagatgagaacacacagacagaacagaggaaaaaaccaaatgcacatttattaagctcaagacatggacactgaggggccagggggacggatcttcggggatgagacaaggaggtgcaggggggccatacacggggatgctgggggtgctgggccgggatggactcccggatcccaggagctggaggcctgaggccctgggtctggggtgcagacgggctctttgggggatcgtcattgccaaggcctggagagggacagcagggtgcagcggctccagccttggggtgggtggggcggctcattccggggagcgctcccggcgcgcggctgggtccccaccgcctccacccggtcctcaggctcccgcgctcaggcagggtcggcagcggagtttcctcgggaaggtgttacacgccgccgccaccaggggctggggagagagggggtgcgtgagccactagaaaggtggaaactgcctccctccccacagctcgttggctctccattccccggcaccatggaagccagaccccagggactgtcaccccagagctaacactgaggagctgtcttgcctcccacactctaatgtcttgttcccttggggacacctcctggctgctgtcatggagagaaacacctgctacggggctggcgaccccagacccaacctgggcttttggggctatccgcctgccagaaagggagtccccatctcccttcccatttgcaatctcctcctacaccctcactcctttcctacactccctgtcctgaacatttggatacaacgggaagtcccccattccccacccgctgcagaccatcattcacctaggatagaccagaaacctgtgcaaagtcttcagctgtgccccaggtgacaaggccaacccccatgctgccccacgcatccataagtgccttgttcatgttttaaaactcattaaataaacatgaaacaggccaagcgctgtggctcacgcctgtaatccaagcactttgggaggccgaggatggcggatcgtttgaggtcaggagtttgagaccagcctggccaaaatggtgaaccaccatctctgctaaagatataaaaattagccgggtgtggtggtgtgtgcctgtagtcccagctatttgggaggctgaggcaggagaatcgcttgaacccaggacgcagaggttgcagtgttgtaataagctgagatcgtgccactgcactccagcctgggcaacagaggacacagcaagactctgtctcaaaaaaaaaaaaaaaaaaaaaaaaaaaaaggaacgtgaaacaaattccacaccaaatacttctcaaccattgaataacccgtgtccccctcccgcattttttttttttttttttttttttttagttataagaactttataagagacacagaaattcccatttctgttcttttacaagtctccagaaaggctgcatttccactaaaaacaggtcaagttatttttacataattaaaattaacagcctcaaagagatcagtctttcgttgacatgcttgccctgcatccctctcgctctccctttacactttccatgcttacacccattctccctcctccacc

SEQ ID NO: 1560394 - DNA, 4001 bp, Homo sapiens
acttcactccacataaaagcaaagccctcacgtggcccgtaagtcctcctccatctggtcccatcacttctctgtcctctcgtcatcccactctgccccttctcatcccaacccagccaccccacctgcctgctattcttaaaacacaccagacaacactcagcccccagacacctgcaaagctcattccctcatttcctccaagtgtttgttggtccaaatgtcacctcctcagtgaggccctccctgaccacccagtttaaacaatcctcattacctctacttttctgcaagcacgtatcacctcctagcacacgatataatttactaacttgtctctctccactagagtgtgacctcttgttttattcagtgctgtttccccagtgcacagaatatctagcacatagtaggtgctcaataaatatttgtcaaatgactgaacgagtatatgaaaatcattttatgaaggagaaatgagggcgccttcagtggggcatgcaccctgggttctgggggcaggcaggacagttgttttctcagctcctccacccattctcctctgacacagggcacttcccttcgctgagcctcagtttcctcatcagtaaaatgggcaagacaacaggtgtgactgactgtcagaggcaaagcctaactgacctaacacacaccacacctgccacacagaaagaacgatcaatacccccctgtggttcccatctttcaggagacactttccaggcaaggctgagatgttgccaactctttggactaaccccagctcaacagctttgcctaactgtgtaatgcctggggactctgggagcctaggtttcctggctgctgagtagaaaaccgacaccaatctccccgccaaatgaaactcagtgagttcttcttggaggtgaaattggaggatgctcagcaggacaggccctggccagactcactggaagcagccacccgggtctgaggtgtccaaagagggtgtaacgtcgccccgccatagggatccccacttcctggtgccggctcagcgggagggtgacagggcaggacaacgttcacacgggccaaccacccaccccgcagcacacgtggggctggcctggctgggggctctggggcagggtggaggccagagatgggtcttacctctggtggggagaatcaggccaacgatggtgagaagacacaggcgaccagagggcgacatctgtgggaccaggcgatgctggggtcagccatgatgtcagtgagaccgacctccggcagcccccggggatcctgcagccctttccctgccctgagcaaaaacctctggcttccaagaccccctgccaggggctgacggctggcctcaggggaaaggggagggtcttaggtggggataccaaaccgtcaccctgcttccttcccctgcaggtccccaaagaaaacaagaagcatgagataaatgggtcttccagcagctgcaagggccggcgggcactcctgaagcagagaaacacctccctgcgccttccgccaggcgcttatccctcactgggactgacgcaaggaggggactggggcagaggagtagataggaggcctcttccctcccccaggggcccagagcccgggagtcggcgaggaggggaaggaggaagagtgagtaacgcctcccgcgctcagaggaaaaagtgagttggtgtcaggggccgccttgcagggatggcgcgctggagagacctaagaggcactggtccgaggggggtggcagagagctggggagactgaggcaggcgggcgggagcgaggcagagcggcccactgtagcccaggagaggaggcagagagatgtgggcgtggatggggggcggagaggagcggaaggggtcaaacccctacccacctgagcccggcccgtgggcagaggggcagcggatggaggtggcgcacgagagggacttacgtcggagctgggggtcctaagccggcagcctcgtggagagagggacgcggcggtggctgctgcgtccaggcggagggtgtggccaggggagcgcgagcgggcggggacccagacgggctcagtcatttcctcttgggtttcctggcttcagagcccggggtgggagcaggagggggaatcgctgagggcgacggggggcaggggtgagggcatagtggtgggagagggtgggaacggggatggggcaggcaggtctagggtgagtggacgcctctgagagagcagggggagaaacgggagggctctattctggggtcgctggaggaagggaaaggacaaatccggaggtgttgaggaaggagaagggattgaaggggggcatctcggggcactgggggaggagaatgaagagggggcgactccgggcacgcaggggagagctaccccaggttcagttctgcacccctacccacaccgtgccccacagatgagaacacacagacagaacagaggaaaaaaccaaatgcacatttattaagctcaagacatggacactgaggggccagggggacggatcttcggggatgagacaaggaggtgcaggggggccatacacggggatgctgggggtgctgggccgggatggactcccggatcccaggagctggaggcctgaggccctgggtctggggtgcagacgggctctttgggggatcgtcattgccaaggcctggagagggacagcagggtgcagcggctccagccttggggtgggtggggcggctcattccggggagcgctcccggcgcgcggctgggtccccaccgcctccacccggtcctcaggctcccgcgctcaggcagggtcggcagcggagtttcctcgggaaggtgttacacgccgccgccaccaggggctggggagagagggggtgcgtgagccactagaaaggtggaaactgcctccctccccacagctcgttggctctccattccccggcaccatggaagccagaccccagggactgtcaccccagagctaacactgaggagctgtcttgcctcccacactctaatgtcttgttcccttggggacacctcctggctgctgtcatggagagaaacacctgctacggggctggcgaccccagacccaacctgggcttttggggctatccgcctgccagaaagggagtccccatctcccttcccatttgcaatctcctcctacaccctcactcctttcctacactccctgtcctgaacatttggatacaacgggaagtcccccattccccacccgctgcagaccatcattcacctaggatagaccagaaacctgtgcaaagtcttcagctgtgccccaggtgacaaggccaacccccatgctgccccacgcatccataagtgccttgttcatgttttaaaactcattaaataaacatgaaacaggccaagcgctgtggctcacgcctgtaatccaagcactttgggaggccgaggatggcggatcgtttgaggtcaggagtttgagaccagcctggccaaaatggtgaaccaccatctctgctaaagatataaaaattagccgggtgtggtggtgtgtgcctgtagtcccagctatttgggaggctgaggcaggagaatcgcttgaacccaggacgcagaggttgcagtgttgtaataagctgagatcgtgccactgcactccagcctgggcaacagaggacacagcaagactctgtctcaaaaaaaaaaaaaaaaaaaaaaaaaaaaaggaacgtgaaacaaattccacaccaaatacttctcaaccattgaataacccgtgtccccctcccgcattttttttttttttttttttttttttagttataagaactttataagagacacagaaattcccatttctgttcttttacaagtctccagaaaggctgcatttccactaaaaacaggtcaagttatttttacataattaaaattaacagcctcaaagagatcagtctttcgttgacatgcttgccctgcatccctctcgc

SEQ ID NO: 1560395 - DNA, 4001 bp, Homo sapiens
gaaggaggtggttgctatggcaactggggcatcttgggaggtgaagagaggtgataggtcccgccaccccaggctgggtggggtcccctgtgaggtcctgtgtgagatgcaggtttcaatcttgaccctctcccctccttttgcacctcctgccgttgcccctgcaggactggcttctggccaagctaagggtccatttcagggatagggacccggacccagctgtgctcatgcatccctcttctgttcactcctaactctccctcctgttctctggcagggtggagggagactctcccctcttcccccctcgctccccaacaattcattaattagtttccttaagcagcttgcaatgcacaacatgcttttcctcccccggggtttcccgagacctgcggtcccctgtcatgctgtgactgggaaagggggaggcagaggaggttgggttgaggagtctgtcctcccacctctgcccgtctgctgccatcgatcctgctaaccaccacctctgcaaaaagaagccctgggctcccgccaggcctgctgcctcagccctgcccccctccctagggtagcttccagcctctgcagccccccccaccccccgccctgcttcggattctgcagatatggctcagtgcagcagcccccgcctgctgggaagcgcggaagggagggagccatccaagtggaattcgggttcccttcactgccaggggcttctcagcacccctggtcccctgccctcagtgctggagacccttgctgggcactggctccctcttgaagcagtctgtgccttgctcatctgcagaagcaggattagcagtgggggctattagggggcgacggtagaagtgggtgtttaagtgggtgcataactgggttaattggtgtggaatggaaatcagtgtgtggctggatgggggcagtaggggcagctaggtgtatacccaacagcacctctgggattggaaaacacccctgctgtgggctggaaggagggtcccatcgccccattcccacacatagggtctcactgcagtggtttgggccccaccccacatggctcccttcttctctttctactcccctctctccccatgggtccgtctctctccctccgtctctctgcttctctctccatagcggtctcaatcccactatctcccaggctctcatttttttttctctctctctctgcatctctgtctactgctctcagcctctcccctccactgggaatctctctgagtccatctatttgtcttcctgggtctttgtatctgtgactctggatctcctgcctctcttggtctctgtctcttccaggttctccctgtctgtctcttgctatatcccttctctctgtctcttccttcagctctcactcctttcctctgaacctggctgtcaagggtttcaggaaacagacaccctaggagacagcactggaaagaagagggacatgaacctcctccccttcccttgcccaccccagggaccctgaaatcttccagaacgtctctggtcgcagacccacccgctcccaccctgcaagctcatctcttccccgtctgctaccaccacggtgcgggaccagccacccggttgccatagcgacctgtccgagcatcccttctcccgggactgccactctccaaccgcaggtctggcacaggacgcctgccggggagggggtgtcccagagacccggaggggcgatcgggggggcgcattacaggggcttccgcccacaggaggagcggacctccctcccccaactcccttgccttaccattgcttgaatctcccgacaccctctctcctaggctctcagatcccggagcccccctgcaaccccctccccaaacgacgctcaccctttgtgggggtctgggtcggggtcgccatgctgggccggagcagggggctgctggatgctttggcggcgaaggcgcgctgcagcagctggaagcaggacggaccgatgtgggggggagctggggggagccctggcgtgggggggcctgcagccaatgggggcccggggagcccgcccccgtgcaggccacccccgcccccgcccccgcccaccaccgtcgtccccgccccttcctctagggtggggcgccccctgctggggcccagtggcgctggcgtttcgcgctgagggaccgagaccgacaaagtgctgtcgagaggaacgcacgttttattggaagtcttggcggcagggggagtctgcgggggcagggctggggaaggggcggcggagggggcggtgggcgcgcaggtggagcgtgggagatgtcaggtgccaggggagtcctgtgagggtgaaaagggtgagaggcgaggggggacgtccagccccacccctcgccgcccttcaactctggcacttggccccctccctctcccgcctttccttcctccctccttccctcccaccgccgtgtcagagctgcagcacctggccggattccatcgctccaggtgtttctaccgcctgcgggtggacagacctggggggaacacggagatcgggggtcattctggagaggcatccccagctcctgggcaggtggggcccgcggcggggcaactccccgccctccgctttcagatccagcccttccctctacgcagccagggagggccgggaaaagcggtccttggaaccagccctctccccagaatacccgcagtctccccagactcacggcggatggagctgcggaaagttccctcctcttcatcgggttccccagtcctgggaagacagaggcagagggatttcgggatggaaagggggagaggctgcccttctaggaaccccccagtacaagcctcctttcccagattggtgtaactaggcccagatatggacgaagagcaggctcggggtccgccagaaatgaggagcacccaggagcagcttatgtgctggcagggggcttctaagctggttaacagtgagtacctccgcggatttgggggcagggatgtgaagttggtgggggagggatagtcatggggacttggcagactgccatgagatggcctgggttggaaacccagaaccccccatcttccacttgagtgatcttgaacaaagtgactttacctccctgtgccttagtttcctcatctgtcaaatggggttaataacagcacctccctcccagaggaagtgaaaccgtatctaacacgtggtacacacccagtaaatattagctactacttatgataatatctataattgttctaacatattcatacattgtccatgctttaacattttattcgaagaggaatcaaagagctaggaacaagactctaagctaaactgggccgcgtgtgagatgatctcatttcaccgccgtttcttctttcctgcactttgtgttatcacgctttgtgatttttctatctgtggggctgttggaacccacggccaccgcctccactaggctgggagctcggccaggaagggcgggaggttttttcctcgcttggtcccagggccaggcttgggccatggcacatagtaggtgcttaatacatagtcgctgacggggatcgggctgcgggtcaggggtactccccgcctcacccgcggcgccctccagagcaggagcgggcgaaggagggcggggaggggcgtcttacctctgctgctggttgaacttgcaccggcatcttctgcctgtgggcgtggagaggtaggagaagctgaggctccctcccggcgggcgccaagcggcgctgtagctccagctcgccctcgcgaggggcggggcttgggggacggggcggggctagaggcgagaccgggggccggggaaccaaggcagggtaggcggggcaaggcctgggaggggttggggcggggcggggccagggaggggcgggaccagggagaagcggggccagggagaggggggctagggagaggcggggccagggagaggcggggccagagagaggtgggg

SEQ ID NO: 1560396 - DNA, 4001 bp, Homo sapiens
cccgcaacctgggaatgggactctgattggacacgagtttcttgcagatgtgattatactcaagaggaagccattagggtgagccctgatttgatgacaagcatcctcataagaagaggaaaacacggacacagagacacaagcagatggttccaggacagatgcagaggccagagggacgtggtcacagccacggatagcaggagcccccagaagctgggagaggcaggaagggtcctcccctggagcctcgagaggaagcgtggccctgcccacaccgtgacctccgactccggacccccaggactgggagaggttctgcgagtgctgcgtgggccccgtctgcggcctctctggtggagccccaggaaacacaggcttgcgtagggtcatattccgtctgctgtcacatctccctgcccccagcctgtgacgcagtcatggccttgacactttggagggttccagggctgtctctccacagcctggcgctccgtctgggtctgaaggtggttctgtgtcataaagtccaggctgtgctgggtgactgcggggcaggacgggtatgtggggagctctcccaaaactgccaatgcccgctcctcccccatctcccgttcacaccccggcctggctgcatccgggagacttcgaagtgcactggatggagggtgctggatcctcgcactgcgccccgccctcccacgcactgctgggcctgcaggctcccactgtcctcctggcagccccgagagtgctctggagaccgagggtcggcactagggctgctcctgctgctgggcgccgtggtgcccagatcctctctgtgcacacagatgcccctgtatttatgcctctctctctctgaaatccctgagattgcaaagacacctctaattctacgccacttttcttctgcagtggccctgtccctttaccaatggggaccctgctacatcacgcacgatcctggatctgcctccctggctctgccctgtgggggccgcaccgcacagggggagaaggcggctgtggtgggctcccgcaggtcccgggacccaggctttggggtctgaagctgaacaaagccttgaaggtgagcctgccccaggcctagcccaatgcctgggcacagaggttgctggcactgagggagctgcgatgggacagcccctccccaaaggcccatgcccctcagacccgtctatgcaggccagcccatgggggagggactcgggacaatggcaacttcgtcttcgagaatgatggcttgggcgtctatcacagggcagggactggtggccgtccaggctaagcctgatgctattccgacccaggcttcatgttgtgtagacagcaacaggagtttggcccctcagccccccgcaggagtcgggtggggaagcaggtgagggatgtggctgtcacacagcagccaccagccccgagaccctgtgtggccagtggcctgcctggagcccagggcaaggcaaacacggctgggctggggaggcagggtggagcgcaaggaaggacaaagccagggccccccaaatcccacagggttccagatgtgcctggggcttggagacaggaacgggtctccctaaaggctctgcaggccaccctgtgcctctgcccatgcggccgccccagctccaccactctgggccttttgcctcctcatccatccaagccccgctgggctctgactatggccctgggggtggcggcaaccctgacagcccaggaggcggaggccccgtgtgacctgggggactgggacctgagtggtccgtggggctttagtgacagtggggacacctgaggctgctggccagggcagaggcagctgggggagggggagccacagtggtgggcagggcgggggcactcacgcgtggcatcgtgttctcattctggatgacgatctggcgaagcaggcgccgctcatagtcctggtccatggcgaggcagggctcggcccgcggcaaggttagcctgcagcgggaagggcaggagaggtgagtggggcagggccggctgcccggagaccacggggctcgcctgcacctccaggccctgggagctagagtgactgtggggtcctcctggctcctctgtggggatcttctgccagccctagcctcatcctaggtgaggctcccccaacctgggcctcggctgctgcccacagaccctcccagcctgtatatccacaccctgtcctcctgcccgggaaaggggctttctgccctggaggccccaggagggaggcgggggctgggaagagtcctggaggtcccgacaaggactcttccctgagcgtgggcagcctccatgtcccgaggagccatggggacccacgtgcgtgtgcgtctgcaacggggttcaacaagccacaccagctctaaggcagtgtgcaagagctggccacgcacaggccccgggccggccacgtgggtccaggcccaggtagaccaagtcacagctccagggacatcagcctcctgtggacaagccacatccgcactcagctacaaccaaggtaacatccaggggcccatgcagagcccacatgggaccaggctcagccaaaccaggaaggcccctccaagggggtggcatttatgttgaggtgtgaagaaaagtggcggtgaggagaccgcaaagaacgttccagagagagatgcacagcccgaggcaggaagggggtttgtacaagaataaagtgaaggtccgtgcaggccatggagacagaaggtagcctaggaaaaacgctcttcccaccagggccagcaaaccacagcccaaggccatgtacaggctgccggtctgtaaatacagcggttctttttgtagacaggtctccctgtgtcacccaggctgtagtgccatggcacaatcacggatcactgcagcctcaacctcctgggctcaagtgtggtggcgcgcacctgtggtcccagctacttgggaggctgaggtgggaggatcgcctgaggctgggagtttgaggctgcagtaagctatgatcatgccactacactccagcctgggtgacagagcaagactctgtctcaagaaaaaaaaaaaaaaaaagtgaaaaaatttacctaaagtttaccatctcgaacacgtttaagtgtgcagttctggccaggcacggtggctcacgcctgtaatcccaacagttcgggaggccgaggcgggtggatcacgaggtcaggaatttgagaccagcctggccaacgtggtgaaaccccgtctctactaaaaatacaaaaattagctgggtgtgatggcacatgcctgtaatcccagctactcaggaggctgaggcaggaggagcgcttgaacccgggaggtgaaggctgcagtgagctgagatcgtgccgctgcactcctgcctgggtgacagagcgggactctgtctcaaaaaaaaaaaaagcgtacagttcagtggtgttaatcacattcccgtggttgtgtagccaccaccacggtcatctctagaactttctcatcttcccaaactgaaactctgtcgccatggaacactcactccccatccctctccccagtccctggtgacttctttggcaggtaagttcctcaatcgttaaacacagagtctgtcagtgatgaaagcttagtcccgttctgctactaatgttaagtgatgataaagttatgtctacgcaagagaaacccacagtcaccacatgacccagcacttcctagatacacacccaggagaatgggaaaggcacaggaactggtacacaaatgctcacagacgcacaattcacaacagccaaaagacggcaaaatcctacatacgcatcaacaggtgagggacgaaccagcgcggccctccacacgccagaacacgacccagccatgaaaggagcaaggctctacccaggccacagcgcggacacgccctgaggacgttgcaccctgtgagagacaccagacacaaaagacctgggagggcc

SEQ ID NO: 1560397 - DNA, 4001 bp, Homo sapiens
ttgaacctgggaggcagaggttgcggtgagccgagatcgcgccactggacttcagcccagagcgaaactccatctcaaaaaaaaaaaaaaaaaaaaagaaaatcaatgtagccccaccttgaagaccaatccggcttgtctgtttctagaaactcctcctccaaaccccaaagccccaccccaacccctacccccaccactgcctgcagccagggcacaggttctgaaatttgacctgggaagcaagtcacaggggcaaactggcgggtaccaccttgccaagatacccctccccagtaaagcaccgggcttgcctttgagtaagtgtctgctcccttagcaaaaccctctgcaacccaactccgctcgctgctcaaggcgccgggcagcggccagtggccagcacacctgcctccacttgggattccgaaggaaatgacaatcgggtgtcgccaaaacacacgggcccctgacacaggaggaggcccacgcggaattccgcatgacagacggcccccgacacatccactccggggaccaaacctaggtgatgccgtcagcttctatccccacccccaccccgagagagaccactccgccttcacttcaaagtccccgcaggctgccctcatgctggtggtgtgtgtccttggtggatggttttcccttaggtaaatcaccctccttcaaagcacataggttggggtgggggcctcaccacggagaggcatgaggtcatcgcccggtagactggggcggggcgggggaatcggaaccagagagacgccctgaaccagaggatgagtttggggtggagaaaacaggggaaaagacaaaacagatttaggctgaacatctgcatatcgggggtctcaggacgtggggtggagacaggtctggacggtggaagagggggagggggtgtcacaggtttgagtaggggtaaaacggctctgaatggggggcacactccatattctggggatccgagatggccaggcttgcgtttggagaagacacggggcaggacgcaggacggaggttcagttcggaggagggaggggcttgtgcacggatagctcgtctgaggctttggtgggagagctggatttcgggggaatgggggctggtagggggcacgctgggagggtgggggagcagaaatcagcgagatgaggtgagacggggacatccatgcactcaacccgtgcctgcggggactggtggacacaacagtgaccacagacacaggtttccgggtgtcccgggctgggactgcattttactggggcgaggggctggttgcggcctgggcgagccatcgcacaccacaggctcagcgatggggggcggcttcgtgtgggcaggacccaagctgggagggtctgaactgggaagtcccggggatgacaggccagggagaaatcacccgggttaggaggcggggtctgctgttctaggggtgcgcagtggggtcccctggttgggggtgcagggctcagcctattttaaaaagaatggtggacgctgacggcggctgcggggaggtcacgacttacaggtggctcggggtgggggtcacggcaggccccgacgtgggggggacgctgggatttgggtgttaactcgggagacgcggatgctgaggtcacccgggcctagttcggcctgggaggcggcattcgaggggactgggggctcctggaggggcctgagctggggtgggggtcgcagcccgccccgccgtcccggttttggggggtcgcagtcaagctccgccgcctagggcccggggggcgggtccccgaccccggccgcctcacctggctcgctcccgtggctcgctggctcccgccgaccccgcctctcctggcaccgcacagcgcccgcctccggcctccgcagctcccgcaggcccggccgcggccgccgctgacgggatcccgggctccgcggtccctaatatggcggcggtcgctcctccgctgcctcccggctccctccctccgccgcgcgcgcccggccggccgcgcgcacccccgcaacccgaccacgcccccacgccgcgcgcggctaatcgcggccacgccccccgcctaccccacacaccgccaggccctgcccaacacccagccaggccctgcccactccgagtggctgcgcctgcgcgcgttgggcatctcgggaggacgtgacgtctcccgcgattcaaatcaatacaggaagcgcggctccacgcgttgcccagggcaaccgcggccggaagaggacccgcggggtgctagacgttgcagaaatggctctggtagatggagggcgtggttcccactggggacagtcgcggaatggggcgccccagggcagacccttcctagggtagatcgaagccaggcacacctcagtgcggcattgacgtcgcgcctaatgagcgcagatgggacccaacaccaggtgcgtgtcccgaacgtacaaacgtcactgctgagagtcattaatttattcaacaaacctgcattgcgctcctaagtgctgctcctccaggccccagtgagacagcagggaacaaaacaggtttttaggccaggtgcggtggctcaagcctgtaatcccggcactttgggaggccgaggcgggcggatcacctgaggtacggagttaatcccagctactcgggaggttgaggcagaagaatcccttgaacccaggaggcagaggttgcaatgagccgagattgcgccactgcacttcagccagggtgacagagcaacactacgtcttgaaaaaaaaaacaaaaaacaggtttttaaaaaaattatgggccgggcgcggtggctcacgcctgtaatcacagcactttgggaggtggaggtgggtggatcacctgaggtcaggagttcgagaccagcctggccaacatagtgaaaccccgtctctactaaaaatacgaaaaattagccaagcatcgtggcaggcgcctgtaatcccagctactggggagactgaggcaggagaattgcttgaacccgggaggcaaaggttgcagtgagccaagatcgcaccattgtactccagcctaggcaacagggcaagactcagtctcaaaaaaaaaaaaaaaaaaaaaaaggttaaacatagaattgccacatgacacagcagtaacactcctaggtatctacccaagagaaacaaacatgtaacatccacgcaaaaactcacacacctatgtgcatagcagctttattcataacatccacaaagtgcacacaacccaaatgtacatccacagatgaagggaaaatgctccattcatacaatgacacggtgttttgcaatatgaggcaatgaggctcggacacaggctacagattggatgaacctcgaaagcatcatgcccagtgaaagaagccagatacaaaagaccacatagtgagtgattccattgatacgaaatgtccagataagcaaatccatagagacaggaagtggattagtggttgccaagggctgggagagggggatcaggagtgactggaatggactttattttggggggttgatggatatgttctaaaattgatgtgatggccgtgagctgtggctcacacctgtaatcccagcactttgggaggctgaggcgggcagatcacttgaggtcaggagttcaagatcagcctggccaatctggtgaaaccccatctctactaaaaatacaaaaatgagccgggtgtgctggcgcgcacctgtagtcccagctactcgggaggctgaagcaggggaatcacttgaacccgggaagtgtaggttgcagtgagcccagatcatgccaccacactccaccttgggtgtcaaagcaagactccgtctcggaaaaaaaaaaaaaaaatttatgtgatgatggctgcccgactctgaatatactaaacaccactgaattatcactttacacagatgaattgtacagtatgtaaactatatctcaatacagctgttatttaaaaagt

SEQ ID NO: 1560398 - DNA, 4001 bp, Homo sapiens
actgggagttcatgggtacagagcaacttcagccccagctcccaagtcccaaagtgtggtcttgtcgagggtgcagacaaggaccaaccaagttcaaccaagtctctcgtatgcagacgccagctccagtctcaaggagggtggggcttgcagtcagtctcactccacccccgagtggacagtctggaccctccgtgatggggaaggcggcagcgtgccccgccactccggcttctgctccatcccaaggcctcagcttcgggggtcctgtctcctgctggcctgggtccccccttctccatcggatcggcggccgccagctcctggatctccgccctgggggcggccgctcactccccttctcctcctcctcttcctcttcagtctccaacgactctgcccccgatggtcctcgtgggttgggttgttttgggggggttgtgctgggggggagggggttcaaatatttattgtattttttgtttgtggcagcaactcaacagattctgctgctgggaagggcctcagcgttcctgaagagagatgtaggggacccactggttgttgccccggctttcttcgcagtagctggccacctccaccaagccgtggctcttccaggcgtccgtgtgagggttctgtaggagggaaaagaaggggtttagtggagcctccctctcccggggcccctgtgtggggaaaacagtcaggctcaaaatagcttcctgggtgaggaggccccagcccggctgcccacgggacatgccaaacgtggctgagcgctgagctgtgcaggaccagtcagcccgactttgttgacaaacaccggcccaggtgcccgggcgtggcggggcagggcagaggcccgactcaccgtgaccaggagacaatgcaggtctcgggcctcggtggtgccctgggtctcggccggctctcccaggagctgcgccaggcgctgcatgcccgacacccgcacgatgttgatgtcgttgtcacagcagaaggactggatgagcgtgaagtggatttgcagggcgatgtcatcctcctcctcctcgtcaatggccaagaggcagaggaccacgctgtctgggtccctgagggggccaaagggtagggatgggtcagccggggacaggggaggggccaccgtgcagggggagtttgcaaaaaaggagcgtgcaagagcaaaagagaaactgcaagggtgcaggggattgcctctgcaagctggtgacggtggggggaggggagggcacacggttcaaagtatggggtagggggagacaggcccacggcgggaggggtgtttgcagacgatacatcaggatacggcagcccccgatccacaaaacggcagagaagctctgcatccacagcggggggcacttggggaagtcccagctccatgcaagacaagcgtgcggaaagcgtccagagcggaggggaggtcccgtcccacccgcgcccagcccgggaagggggtctgactcacacattcatcaacttggccgactcgtacacccccactgtgaggcgatcctggcgctgagcggccaccaaaagctcctccaccgcggcggtcaccgtctgcatcctgagaccaggaaagagggatcagtgacgggcggaccaccgggtgctacgttccgctcccggcccggcccaacccgacccatcccgtcccggctgacctcaggcggcggcagccccggctacttacttctgcgccgcgttgtcgcacgccacgagctcttccagcgtcatgttgcaattataatccacagtggatgcggctccacggcagtccccagggagaaattgcaaaatccgagccagagagcccaaaaccttcccacagagctagagcgctcgtccaagaccttcgggaagcagcgaaatccttccagaaaaggcggaaaaatatattgcaaagtccttggcgaggataatccaggaagttgcggaaaccaacggtagtccgacgcttcggcgatctgagctgggagcctccggcaccgacttttatagacttgaacattgggcgtggcctcagtggagtcattcgcccctcctattggtggaaagacaagggcgagtgcagctagctctgcggttggccgacggaggggagggggaggagcggcgtgcgggggcgccccacgtgggggcgagaaccgggaggagggcgcgcgggggccgggtaggtgaccgcgaatgccagaaaagaaaaaaaagcagaagtttttttctcctgatttcccggcagccgagccgcggttcggggcgcgcgcgggatttccagcgcgcgaggcggcccggactttcgggggggcctggaatcccctcccgatccgcggagagtcccggaccgcgcctttcccaagttctgctgggggtggaggggctgcaccgggaaggggccccgtttgcagcgtgatctcgcccaggtggtggtgagggccggagtctctcctggctgcgacgaccccagcccctgggtgatttcgcttctcccggcctctctgttcccgtctgagtaatgggtctgcagcgccggcctcgctggtttgcagagcatggcataaaatacggctgacagtaagagcccaatacacatcagctgtcacctggtggtcgcgggaggcctcctcgagggccccgaaagtgggaggttgcaaagcccggggcgctctggagaagaaagtgggcgcctcctcgccgaccccgcgagtatcagggtggggtgcgcgtgggaggtgcaggtggcgcggccccgcccccgccggctgcctggcgttccagcctttgcccgtgcggaggcctccaggccctggagaaagccattgttgaggggaatggtgcaggctccggctgcacgccgccacccagggcccacgtgcaaggatgacggctacttttatttctcactccggggtgggcgctgacctgcattgagtgcgtggtgcggacctggtaccccccacccctccggattcatggatgatttaatccaagacctgggaagcaggggggatgcttatgtgcattatgcaaaaggggaaactgaggcttggtgaggccataggctagttcgtgttggagccacgcgtgtgcgccaggcacggccgcctgcaggactccgccgccccgggaaggctgttcaggagcgaggctggcaggccccgcatgacaacgtctcccacggtcgactgggggctcccgggtgactcacatctgagtcccctcccccgccagcctggggtctggcctccgcccggcggctcactttccccagttgcccggctccccggcccgcgggtccggctgacgcatcccacctcctccgcgccgcccaccgctggggcacgaaatgtcccggggctgcgaggcgcggtggcgccatctggtggccgcgccgagtttctgcgccctcagcgccggaagagagggacggacgggcggggcactgggctggaggcgggggataaggggaccgtggcggttgcaacgttttatgtaactttatgcaatgttttacgcatgcaacatacatatttatattttataatttcaatttaaaagttaaatcggccgggcgcggtggcttacgcctgtaatcccagcactttgggagtccgaggcgggcggatcaactgaggtcaggagttcgagaccaacctgaccaacatggccaacatgagctgaagataaggaagatcagggaggtgggtgggataagtgcaaagtcagattctgtctttatttacaattttgatattttgttcctcatggatacttgggcattgattttgatttttaaaaagtattgcaggctgggtaatcccagcacattaggaggctgaggcgggcagatcgtgaggtcagttcgagaccagcctgaccaacatggtgaaaccctgtctctactaaaaacacaaaaattagctgggcgtggtggcacgcgcctgtaatcccagcttactcaggaggctgaggca

SEQ ID NO: 1560399 - DNA, 4001 bp, Homo sapiens
tccctgcaaaggacatgatctcgttcttttttatgacagcctcatttaaggattagaaaagtaaaagaattaagccctataatggtcatctggctgaggaggggcagaaacaggagtccctgctccatgattccctgcctgggtgatcagacgcatgacttcacttcaccaagcctcagtttcctcatctctaaaattagggcaatcccttcttcctcttaaggctattaggaaaacaagaagattaaacaccaggaacacacttgacctacccccttcacgctccaggatgtggcattatctataagagatgcccctggtctggcccgacgcggtggctcacgcctgtaatcctagcactttgggaggccgaggcagatggatcacctgaggtcaggagtttgagaccagcctggccaatatggcgaaaccccatctctactaaaaatacaaaaaatgagccgggtgtggtggtgggcgcttgtaatcccagctactcgggaggctgaagcaggagaatctcttgatcctgggaggcagaggttgcagtgagctgagattgcactccagcctgggcaacaagagcaaaactctgcctcaaaacaacaacaacaacaacaacaaaaagatgcccctggtccttcagacctgcctctgtatctgacctctgccctcttggttccaggacccatcaccttcctgccctcaccttttccccagccacactggcttcctggctgttctttaaggcatatcgtatctcagggcatttgccccagctgttccctttaccagaaactttctacccaagagatcgccccatagctaagtctggttattcaggtctttgcttaaacatcacctcctcagagaggcctgaggcttcccaaaccaaagctgccctcaggcacacactcttcactcttttaccttcctactagtcggctgtcaccattggtattatcttgcctgtcagctgtcgccatctgatattaagggcccttttggggcctgcctcggcctcccaaataactgggattacaggcacgagccaccgcccccggcctgggacagggtcttgcacacggtatgcgctcagtaaagacttggtggtgatggccggacgtgatggctcacacctgtaatcccggcactttgggaggctgaggcaggtggatcacttgaagtaaggagtttgagaccagcctggccaacatggtggaaccccgtctctactaaaactacaaaaatttgccgggcgtggtggtgcacgcctgtaatcccagctacaccggaggctaaggcgggagaatcgcttgaaccggggaggcggaggttgcagtgagccaagatcttgcgactgcactccagcctgggcaacagagcgagactcttgtctccaaaaaacaaacaaacaaacaaacaaaacttgctgatgaatgactaaatggacgttattctgagtttgttttgcggccaggtgagcgtatacataaatctacaacatgcagatgctgcgacgtgaccccgaaggggtaggcacggtttggggcccagttcgcccacggggcacagagggcagccccgcgtctgcctgcacgcacgcacctctcccgacgcttctgctcttcggccagctgcttcacccgcagcgactcctgcatggtcgccaggctcgggtaccattcgcgttcttcggcctccagctcccgcagctgctccggcgacggccataacgaaccggggaccaccccggaggcggcgccgtaacgcgcgaactgcttagccgcgtagcgcggtcccagctgccaccgcggggtcaggaggtcctcggggtctggccaccggggtcccggcctgcggcgcgggggcggccgcgcccggtagccacgggaacccggggccagggtcgccgccacacctagtaggctgcgtgcctgtcgcacggacgccgccatcttggctgtgcggggtcctcacaggcccgccgggctgtccatgcccggtgcctgagcgcgaggcccggtgtgggccagggcagggcgaggggtgtccctgctgcctcagttcgggggagggcggcgaaggggatagtatgggttttatacgtttccaagtataactttaaattttagttaagcagttactgattaaagtcatttttaattttcactttttttcttctcctttctgcacactgacacttaaaaatacatatttttgtcgggcgcggtggctcacgcctgtaatctcagcactttgggaggccgaggcgggcggatcacctgaggtcgcgagttcgagaccagtcttttttttttttttttttcgagacagagtctcgctctgtcgcccaggctggagggtaacggcgtgatctcgggtcactgtaacctccgccttccgggaggagaggagaaaccccgtctctactaaaaatacaaaattagccgggcatggtggcgcatgcctgtagtcccagctccgcgggaggctgaggcaggagaatcgcttgaacccgggaggcggaggttggggtgggccgagatcgtgccattgcattccagcctgggtaacaagagcgaaactccgtctaaaaaattaataaataaaaataaatacatacatgcatacacacacacacacatatacatatatatatacgctcacctggctacaaatatatatttgtgtatttttttctaagtgttcagtgttctttgggtaaaaattgtatttttgttttttgcatatcagaaaccatactgttttattcatccatgtgtcttctgtgcacacagtagccctccaatgaataatctgaaatcatgttgaatgaacacattgaaaaatcaaaaataagaggctgtggcagggccactgatatggtttggctctgtgtccccaaccaaatctcatcctgaattataatccccatgtgtccagggagggacctgtaatccccacatgtcggggaagggaggtggttggatcacgggggtggtttcccccatgctattcttttttttttttttttgccttcaaaaagtttattttattttattttattattattatactttaagttttagggtacttgtgcacaacgtgcaggtttgttacatatgtatacatgtgccatgttggtgtgctgcacccattaactcgtcatttagcattaggtatatctcctaatgctatccctcccccctccccccaccccacaacagtccccggtgtgtgatgttccctttcctgtgtccatgtggtctcattgttcacttcccacctatgagtgagaacatgcggtgtttggttttttgtccttgcgatagtttgctgagaatgatggtttccagtttcatccatgtccctacaaaggacacgaactcatcattttttatggctgcgtaaaaattatatttttaactttacttttatacatttaaactagcatttattaggctgggcttggtggctcacgcctgtaatcccagtactttgggaggctgaagcgggcggatcacttgaggtcaggagttggagaccagcctgaccaacatggcaaaaccttgtctctactaaaaatacaaaaattacctgggcgtggtggtgggcgcctgtaatcccaactactcaggaggctgaggcaggagaatcgcttgaacctgggaggtggaggttgcaatgagctgagatcgtgccattgcactctacccagggtgacagagtgagactctgtctgaacaaacaaacagacaaaaagcccactagcatttattatttttttaatgtaaatgtggctgaacgcggtggttcacacctgtaatcccagcactttgggaggctgaggcaggtatcactgaggtcaggagttcgagaccagcctggccaacatggtgaaaccccgtctttactaaaaatacaaaaattggctgggtgcggtggtgcacacctgtaatcccaactactcgagaagctaaggcaggagaatcgcttga

SEQ ID NO: 1560400 - DNA, 4001 bp, Homo sapiens
ccatctactctcttagcaattttcaagtatacaacacattgttatgaacaacagccaccatgctgtaccagagatctagtttatttcccctgtctaactgaaactgtgtatccctggaccaacatctcttaattatttaatcctcttggctaaataatgagagctgcctgccatccgagttaactgttaactctcacagtgctggaattggacaaagaagatccactcagagaccagagaggttaggcaatgtgactgaagtcacacagctagaaagtcgcagatcccggatttcaaactcaacccagcctctacagcccatgctgtggaggtgtgtgatcaaaggttttcaaagtgtcgtcccagactgggtgccgtggctgacacctgtgatcccagtactttgggaggccaaggcgggtggatcacttgaagccaggaggtcaggagttcaagaccagcctagccaacatggtgaaaccccatttcttcttttttttttttttttttgagatggagtctcgctctgtcacccaggctggagtgcagtggcacaatctcggctcgctgcaacctccgcctgccaggttcaagcgattctcctgcctcagcctcctgagtagctgggactacaggcacgtgccaccatgcccggctaatttttgtgtttttagtagagacacgcaatatttcttctcatattttcaggatttgagcttcttccccaggacccttgacacaagccagaagcatttttaaaaactcttcccagagggcagggatttggggacactgttgtttccgaggaacttagggaggcgttacccggtgggcaggtgcggatgctggagtctctgccaggctcagcaagaggacgaggaggaggaccagggggacggagggaggagccatcgaaggcaggacgacaggtgcctacagctgcggaacacgctgcaaggagagagcggccagtcattttccgaagcgggggccaggtgcatttccgataaggacagaggaatttattttttagctttatggaggcatcatcgagatacaaaaatggcgcacatttaatgtacacatcttgaggagtttggacgtgtgcaagcaattaagcctctccttcccccatcatcggatcaggccgacctggtcccccagcgcccatgccttctgccccactgcctccaccactccatcttcaaacctttccgtccccttacctgcccctcaccttttccctgccaccaatgctggggtttctcctgttatccccatcccttcaagccccccatcactctcccaggagcccctcactccctccacccctctgccctcctggcctaggctctcaccccagtgcagcttggatccacccctctgccctcctggcctaggctctcaccccggtgcagctggcatccacccctctgccctcctggcctaggctctcaccccgctgcagctggcatccgcccctctgccctcctggcctaggctctcacccccgtgcagctgggatccgcccctctgccctcctggcctaggctctcaccccgctgcagctggcatccgcccctctgccctcctggcctaggctctcaccccggtgcagctgggatccgcccctctgccctcctggcctaggctctcaccccggtgcagctgggatccgcccctctgccctcctggcctaggctctcaccccggtgcagctgggatccgcccctctgccctcctggcctaggctctcaccccgctgcagctggcatccgcccctgtgccctcctggcctaggctctcaccccgctgcagctggcatccgcccctctgccctcctggcctaggctctcaccccgctgcagctggcagccgaccctgtgccctcctggcctaggctctcaccccggtgcagctgggatccgcccctctgccctcctggcctaggctctcaccccgctgcagctggcagctctccgcagctctctctggctcctcgctccagcgcctggactctttcacgccccctgagcttttatgccttctgaggagacaatagaagggaggggggaaagggaggggattagaagaagggagagggagtgaagaggatggaggtgggggaacagtcatccactccaggggctttcaaacgctggtctgtgaggtcaaaacacacacttcatcgcgggaaatgctgctgtgccttggtttcccctggtagaccctgcccttccccctccttctgtgcccctttatcttccagctgtcctgttccagactttgcagctattcgagggctccctccctccctcttatctgcgtctgggccttgacctgtgtcttccttggttgtctccacctgccactggtgtctccgtagccctgtcccctctgcccccatcaatccctccaagcctccgcagctccctcactgagttgcatttcttctgtcttgcacggtagaccctgtttatttgtttacttgtgagctgtctatctccccgccccccacctaccaccctggctaaaggagaccccatgaggggtgtcaactgtgtcttgttcatggctgcgtccctaggccggaagctctcaaccaggagtgactctgccccgatgctgccccagcctcaccccaggacatgtgaccaagtctggagacagttttgtttgttcgttttttttgtttttgttttgagacggagtctcgcactgtcgcccaggctggagtgcagtgctgtgatctcggctcactacaagctgtgcctcccgggttcacgccattctcctgcctcagcctcccgagtagctgggacgacaggcgcccgccaccacgcccggctaattttttgtatttttagtagagacagacggagttttactatgttggccaggctagtcttgaactcctgacctcgtgatcttcccgcctcagcctctcaaagtgctgggattacaggcgtgagccaccgcgcccggctggagacatctttacttgggacttgggagggactcccggcatctcgtgggtggaagccagggacgcggctcagcctcccacagtgctcaggaaaggcctccccgatgggaaggacccagccccgaaagtcaatagctccaaagatgagaaacctcacagcagcccctaaaacagtgcccggagctcactcaatacttgttgggtgaacgaataaggagtgtgtcgttgctgcgtctctctcctgtcatgtgtgttgatctatctgtctctgcagcacgctctctctttgccctgacgtcacctgctttccagaggaaagaaccttggaagaggttttactcttgctgttgccctttgctgtctaagggacagaggggacgccctggtcctggctgggttctgtctcctcctctccaccgtggaggacacattgcctccaaggtccttccagcattctgtcggtttgtggctggcacttgtatctctgtcctgtctttacacatccccatcagcccttaccccatcctttctcatcccaaggggaaagggagaccccaggagagggatggagtgagaagacgacgtgggggattacagacaccctggtgggctcctgagccccctccgctgtttctccaagtccctcacttctcatccagaggatgacaacaacgaggaggaggaggaggaggaggaggaggagtgggcaggggaggaggaggagggggaagcttttatagaagacaaactgacaagaaggtgtgaatggctttgctgggaaggagaaaggaggagggagtgacgcccactgcacgggagacaggactgaggaggcgacgctgagagcttgaagctgggttacctggagcccaatggagggtcagagaaacagtgggaagtccttgcctcactgcccattagctagtttgtgaaaagtaaacggggtaggtccaaagcttgctctatctctcttacacacacacacacacacacacacacacacacacacgcaaaa

SEQ ID NO: 1560401 - DNA, 4001 bp, Homo sapiens
cctttcaaggggatgaccttgcagaggggaaaagaaaaagagaggacagggtagagaggtccccaggatctccccacctgcagaaagggagcggccagggggactcccgagagagaagaccacctcctccacctctgacagccccaggcccccaacccccaggaagcagtgccctcaccccaaggagtgggggtcctggagggcctgcgggcagaggggcaccttgtgtgtctgccgtggggcccagtcccggagccgctggaagacgccgtcattgcactcgatgatccaatgctcatcaatgggcgcctcctgcacctttgacgctgcgatggccatgccaaagcccacctccaggacccggccccctgggcagacacagggcgcctggcatcactaggtggggcgggcttaggaggctgcctggaggaggggcacagggcagggcagggctggggagactgcctggaggagggggcgcagggctgggctgggggtctgcctggaggggggcgtgcagagcagggctggagaggctgcctggaggagggggtgtggggcaatgctggggaggctgcctggaggagggggtgcggggcagggctggagaggctgccaggaggaggggatgcagggctggggaggctgtctggaagagggggtgcagagcagggctggggaggcttcctggaggagggggcacagggtagggcagggctgagctgggggtctgcttggaggagggggtgcagggctgaactaggctatgtgagtcacatttgccacaggacgggagggcaccctgggccagcatggacagaggcgggcggaacacagtagtcctgagcgggaacagcgtgggccctggccagcggccagagagaggatgaccagccagggaggccgaagacggccgcttttggggccaggcctgtggggaggcgagagccttggactttgagcccagcccacgctgtttgtcccgggtcccttatctctcgggttagttacttttctctccccctccctctatccgaaagttggatttgcaagagtggccaggcaagacctggacttgagactatctgggaggggaaggactggtccccagtgggccacacatgggccccccgctcaatcctgattggcactggacactggacgtgcccattttcagggtgggaacactgaggcccgacccctggacggggcctgtgtggggccagggagtcctttcttagcagcccttagcgtctgacgccaggcaggccagggccaccccggggacagctgtctccctgagctcagctttccgagtgctattcttagccgggcgagtcggggctgctctcccaggcaggcagaagggcagcctctccctggcacgaccccttcctcccgacctcagacagggagctggggacccggttccacccagtttcacccaggtctcacgtttgaggtccccatctggagagcggggggcctcactccccctggagaggaagtttctggtacttaggcggtgcctaacgtgtgcgggccccacgcctgccgcactccccgtgaacgcctccgtgtgcccccacctgcagccccacttcccaggcgaggagacagaggcgccccggcgggagggtgggctgcagagtccccgggtcggggcagccccggcctcagtttcccctgcgcccccgggggcggtgcaggccgggcgggggctacctttggaggaggcggcggcggccagcgcgtgcatatagggggtctcccagcgctccatcaccggcttgcccaggatgcgcaggtgcgtgtccgctgcgtcgtaggccgcgggcgccgccccccacgcggggctgcagttctcgccgggcgcgaagatgggggtcgcgctgggggcgctcatgctgcaggctggacggcgacccgacctcgatcgcgcgccgcccgggcccgctccctgcaggggcttgtgggccgggggcgggtccaacaggcccggggggcggacccgcgagaggacgcgcgcgcgcggctccgggagcggcctctagcggcggccacgcgagaggtggcgggagtggggtcggggccccggccgccccctccccaaggagcctcggtgccccctctgcggagcgggcaccgcagccccgcgcccggggacgcgaacctgcaggctggggactggaatccccgccttgccgcttacgcgccatagattcctcatctgtcagcaccgcagaaaggccccctcctcgctggggtgtgagaatctgaggatcttccaggcgctgttggaagtgctttaagtgtttaaaatcatttaatcttcagaagatgctacagtgagttctgtctttttttaatagagacggggtcttgctatgttgcccaggttggtctcaaactcctgggcgcaagcgatcctcccgcttcagcctcccaaagtgttgggattacaggcgtgagccaccgcgcccgccaggttctatgatgactgtcgtttttccttccttccttccttcctttcttttttgaaagcaagtttattaaggaataaaaatgaatggctactccatagagcagccgactgtcattttacagatgtggaaactgaggctttgagaagcaaagccggtggtctggtggccacgagggtggggacccagcattagagctctgatgcccccctttcatgagcccatgtcacacccccataggctgggggtcatctgagaccccgggtccctaatgggggattccgcccaaagacgcctccagttctggagaccaggactcaatcccagcagtgccctttcctccggcggccctgcagctggggtgtgcgggggtggaattaggcctcccccagcccagggtagccccttagggtcaagcacaccccccgcctgtttcctgggggcccccaagcccgctgcggtggcgtcctggctctgatagccggtttccttccccctctgaacgtggggccacagtcatgagccctgagcactgcctgcctgcctgcctgcctgcctgccgtgcgttctgcacgggttaacagatgcagttattatgcccatttaacacgagggaaactgaggcccagagaggttgaggttcacaggttgcagcagggccacggtgtgaacgcaggcagcctcggaaacagctcccgcgcgcggccttccctgcgccaccttgtctgggtagctgcctgccccatcactgcctgctcaacgcctccacatgcccctgccacctcttgcacagctccttagccccgggccttggcacacgctcttccccttgcccagacagcctctctcctggtcaggccgctttctcgttctgtctcaagctgagcccacgtgtcctctaggagacacccccattctgccccaggacaggcatgtcctggtcagaagctgttttgtttgtttttgtttttctgagacagagtctcactctgttgctcaggttggagtgcagtggcatgattttggctcagtgcaacctctgcctcccgggttcaagcgattctcctacctcagcctcctgggtagctgtgatgacaggcgcccgccaccaagcccggctaattttttttttttttttttttttttgtatttttagtagaaacggggtttcaccatgttagccaggatggtcttgatctcctgacctcgtgattcacccgcctcggcctcctaaagtgctgggattgcaaggtgtgagccaccgcacccacccggccagaagctgttttctctctctttggtagttcactaacggaaggtatttcttcatggtcctagcgtccctctcacagggctgtcagtgatcctggcacacagaacatgcttgataggctgggtgcagcagctcccacctgtgatcccagtgcctgggggaggtgcaggggctcaggcctgtgatcccaccactttgggatgccgaggtagaaggattgcttcagtgcaagagttaagaccagc

SEQ ID NO: 1560402 - DNA, 4001 bp, Homo sapiens
actccatctcccaaaaaaaaataaaaaataaaataagcactccaggcatttcttatcctcagggaagcttagagagtaccgtgtatcatactctgtgaaacccatggaagctcacattggctcccacctctccacacacactcctgctcccagactgcacttaaaaacacctgcgcctggaggtagcagccgcctgagctacagaggagggcttgagaagaggggagaagtggagactcaggggacctggtggcagagagtttcaagctggaaagtcaagcctggctcagtccacacagacctgctgctctgtggatttgagcaagttaatgaacctcttggggctgatcccccacctaggggctgctgtgagggcgcagtgagatctcgaggcccacacataggagctgattttaatagaggagggaagtctgatcctacacagattcctgaggaaagggagacagcagggggtggagaagggctggaagggggtagtgggagtccaagtttttggcaccaaatcaaaggcacctggggggtggtggggctgggagccgggggccagctggcctgtctgtctccctgacctctccctgttgccacagaccttgtggcctgaggctggactataggtgtttccagtggctgtccaagttcatgaaggtgttagtgtttattggtgaacttgaggatgtttgcatccttgggggttgtttctgctatgggagaaaggggatttgtccacctggttcaggtgggaatctgagcccaatgggtgacccttccgaagaaaactcagatggtcctcctctcccagcactcccagccttgcactctcttcccctccactgtaggggtggggtcccccggttggagaaaagcctgggggctagctgggtgctgcccccagctcctcactgcgtcctcccactgaatcccgagaggcatgcgctataaacccactttacagaggggaaaatgaagcctgaggccacggagcagtgatgcgcagggcaggggttcaagtctcatgaggctggtaagcctgtctgctcctgtgtcttccagggtctcctggaccaaagccccagccccacctacccctgcggcccccgcccttgggaagtgagggaacagtgtgggaatggaggcagcccaccggaagacctggttcctccggctagagtgagtgagtgagtgtgtgtgtgtgtgtgtgcgcgcgcgcgggcgcgccgcccttgttgagagactaaggaagtagtttgccctctcttaacctctgttggccgctctgtaaactgcgggcacactctggccttctcaggtggtggtgaggcttccctgagctctcgcctgcgaagtggtcagcacgtccccggcaaggttccaagtgtccttgttttgtgcatcacagggagggcaaagctcacctcacgcgaagcgccatgaacatcacttttacatggaagcccagcacccctgggttctccctaagcccctcctaagcccgcccacttcccgccactttcaggctgcagcctccgatggccctcgtttctgctctttctaccgcgtgatagcggcgcgaagcccacccagccctgggggcggaggcccggtctccccgccatggcagtaaaccccactctgccagcacactggcgggtgtggagggagggagagcggctgatcccctggtccctagatggtgcacacgccaggaagggcggtagggatacggcacaggtgtgagggtgcagacgctccccactaccctttccacccctcccccgcgccctccgctgcctccctcacccgggcacggctgtcgcagcaactggacaacggtgacattggtgaggacgatgtcgcgcttcgacatggcctcttataaggttatcattggcctggacctgctgtgatgttaccgaggtgcgtgcggagcgccagggctgtgggtcctgggctaattgccctgatgtcacagcacccagtgacgtcacagtacccagtgacgtcgccgaggggcggcgcccaagccagaggcctgacaccatcgcatcccatccccgtagaggcatgggacgtcagcacgctatgcatcaccgttccacggccacgcactgccgtctggaatggaatcccactttttaaaattatcatttgtttatttattttgagacggggtgtcactctttctcctaggctggagtgcagtggtgcaatcatggctcactgcagccttgaactcctgggctcaagcgatcctcccgcctcggcctcctgagtagctgggactacatgtgcagccaccactgcaggctatttttactttttatttttttgtagagagagggtctcactcttttgctcaggctggtctagaacccttgggctcaagcgatcctcccacctcggccttccaaaatgctgggattacaggagcgagccaccacacccagcctggaatcccaccttttacactgttcctgaaagccctttcctcttctctgtctcttgaagcacacaggttccatgctgtcccttggattctccagtggagtgactcttgctgcctccgtatgcctggaaggcccacccagggcttcccttggctgcctcttggtttcccaccctttaagagaggctttctacactctgcatctaagttccctcctttctctgtcactgtcagccgtcacccccttcccaatttctgcccatcttccaggaagccttgtctgacttctccattctgagttatgcttcagtgtgcaaaatttctctagggctacactgtctatgtttttattttccttagagcacatgtctctctaaaaattgtttgttttcttgccaactgtctctgtccaccagactgtaagctctgagaggacagggacgtcatctatgtcacttctgtatcccattgacaagaaaagtgtttggcacctgaaaggtgtttgtgggctggacgcagtggctcatgcctgtaatcccaacactttgggaggctgaggtgggaggatcatttgagtccaggagtttgagaccaacatgggcaatgtggcaaaaccctgtatctacaaaaaataaaaaaagtagccaggtgtggtggtgcatgcctgttgtcccaattattagggaggctgaggtgggaggatcacttgagcctaggaggtcaaggctgcagtgagctgtgattgtgtcactgcactccagctgggagacagagcaagaccctgtctgaaaaaggcgttagcccaataaactatacctgaatgaataaatgtcaattcctcaggtttcatctgatcgctaatcttttcttttcttttcttttttttgagacagagtttcgctcttgttgcctaggctggagtgcaatggtgcgatctcagctcaccgcaacctccgcctcctgggttcaagtgattctcccgcctcagcctcctgagtagctgggactacaggcgtgcgccactacacctagctaattttttttttgtttttgtatttttagtagagacggggtttcaccatgttggccaggctgatctcaaactcctgacctcaggtgatccatctgcctcggcctcccaaagtggtgggattacaggcgtgaaccacctcgcccggccctgatcgccaatcttatcaaactcttcacgttatatcttctcgcagcacccattcttttccttgtagcttttcatgtagtttgtcatgatctactgattggtttatttgttcgatgtctcccccttgggctctaagcccctcacagggctcctgttcttgtttgtttgttcacgactgtgcctccagcacttagaacaatacaaagcaggttttcaatgaacgtctgacaaagaacaagtggacaaacagctccctcccctgcagccccggggtaggggtttgcttgcacctcagtgactcacaggcaggcaccatcacctgcacagcaggttgacacgcagctgtgaccaaggttc

SEQ ID NO: 1560403 - DNA, 4001 bp, Homo sapiens
acagtggcgcgatctcggctcattgcaagctccgcctcccaggttcacaccattctcctgcctcagcctcccaagtcactgggactacaggcacccgccaccacacccagctaatttttttgtatttttagtagagatggggtttcaccgtgttagccaggatggtctcaatctcctgaccttgtgatccacccgcctcggccccctaaagtgctgggattacaggcgtgagtcaccgcgcccagctgaactctgagtttctttaacacttaacttctccctcacaatccactgacctaccctgcaggggaacatggtgattacaggagaaaatgcatgtcagcaacccaggaatgcacaagggaccccatgcacatggactgcagattcccatgaacatggactcctcctcttcctgccctgactccacaccagcccctcactgctcacccctgctgagctgtcatggactggtctctggctgaaaacatagagaaaggaaaaggagacttggacctatagttttatttctggaactttagaagaggaccttggttttagaatggggactgcagacagcagagtcagacagaaaagccctctttggacagcaggactacaaagtatatttcctcagactaggaggctttgtcaacaggagcaggcttgggttttcccatttatcttcccattttaaacgctgtgaacaccagatgatctctgaagtcctcaggatcccaacagtttgggttccaaaaacgaatttgacataagactgcaggctggggtcatcctgtggggttagctgacacgggaaggtgaggagccaccagctgtcccttatgaacaggcgtggagagacaggccctccacagggagaagactccagtgggcggtgaggagagagagcaacgggccacagaggagtttgtcagagggccagccgggaagctgtggccacaccacagccctcagtgggtgtctgggcatgaacattctggagagctccaaggggaggggtgatgcaagagcaggtgctgggtctgaatttgtctttacagagagaaaggaaggttttgaagtcaagaaataggtggtagattgggtcttatttttatttcaagcttttaccttaagagactcataaaaggtgaatatgaggaaagtcactcttgaagtaatcagtgttgactaaggacaaaccaacagagcaagccaaagaccagcaccaagtgaacatggagtcgagtgagcatcccgtacccgctccgaggagggtgccctgggctgggctcccaactctatccctagccaagtgaccaaggtaggtgtagcattcctggccctctgacctctagatctgaaaagcagggaagcataaccaaatgaataactcaagtgtccctacaaaccaaaagcaccgagttggacagacagcaggtgcgtgggtggcaaaggcctactgatggcaggggagctgatggaatgtgccactccttctcctgtgagacccacactctgtgccacttgcagttgggacctggggccctggaatggccacaacagcacagctgccagtggtgggtgatgcccgagctgagcctacagccctctccacaaccccgccaagctgttaccaacaggcctggagtgtggccagccccaacctgggcacactgggcttgtctccaggttccagcccctcccgctggctcctcccactcacctgtgtgaggtgcgcatgtccacgggcccatcgcccaccagcccttcgcctctgcccatggccatggccgtggcctctgttgccctcagcaatccttgggttggacctgctcccggctcaggtgtcaccctcatgtctccgtcagtgtttaaatctgaagccaacaatcctctctccatttttattttcttgctctccacatcgtcctctgttgggtcccgttcaagcgctcgtttctgactccgtgttcggcatgcttcttcggtcattctgaacttgggagggaggagaagacacaacattttaactgggtgcaatgaaggtgccaccttcttggagacttttcagtgttgctttcagtgttttcctccctatgggaaggatggcaaaagaatgtacaacaaacgcagggcccagaaaagcatccccaggacatttcatcactgccttgaggaaggctaggcaggaggggggtgtccccagcctccactgtgtggctgaacattggtggagccaaactacaccctgccctgttgggggccagaggcagcagggtgctgaacaggagcagtggaaggtggctgcttatcagcaaggaaaggctcaacagcaaacagaggaaaagttgttctagatctcaactacctgcctttgggattttcagcacctgcaatgtctggaatccaggagggcggtgactgcactgttccaggagcagggtcggggcctgggactagccctatgctgtggtgactcgagttaaccccagcttctccccttcagggaagggaggtctcctcactccctgctcacctctggggagtggggactggggatcacatttaaccctttggttgccagtgaggtacactttgagtagagtgaggcctggcccatcaacgtgccactgccctgtacctgcagcacacacatatcttgatttaaagaagaaagaaaaagaagaaaaaaacagctgagtcagtttttgatcccatgacatcactggctccacatgacccttcccaggattcagtcggagagacaaagcactttccagaaaaccagtctgaaccggttccagacaacaggctgaagtgttgttaaccctcacggagacaggacgacagcacagcgatgtctgtctgcagggaggcggctggcattccacagcagggtctgggacactggcactcttaaaggggctgctctaatcccggcctcgacgtcccaacaggacagggcacaggaattgagacagagagagtcaggttcttaaaaaagcatcccagtgtttaccagaggacaaaagagaaatttagcagctgagctctagtggaattcccgaagtgtcacagttttccatgggacagttggtgcccacttgggccccacagagaaccccaattcacacctgtggcatgctctatgctgaagccctctggtcctatctgtgtcctcacaggcagggcactcatcttgccagagccttagtttcctcactggcaaacaccctggggaagcctgtcccaggtagagccaggcagaccgtctggaagctgggggcagcacaaggcaacacaggggtcctgtcgccatccatgggacgcactccagagctgactcatctgcagcttccttaaaggagccaatttcacaaatgagcaatagcgcaaggccctgcccaaatgtgccccctcatgcactcaaactgaaaggaaagaaagagacagctgcttcacgctcctggagccagagggaaagcaggccgtctacatgcgtgttgtgccagtgtggtccagccagggcacccgggcaccggcttgaaacactggggtctcctcaaggccaggaaatccctggtgcttcacacaggcccagagcagctctgtgctccctaccctgtctcaccaccacccaggtgccatggctgacccttaacatgaccaggctgaggcagggagactccgaatctcaagggcacaggttttcagacttgcctccacctgtccccagcccctctggcatcccagcctgcacctaccacctatcccacaccaactgtgcggcctccgctgcccccggccaccctgtccacccccgcccccgctcctgctcagctgcccctcagctcctccgtggaatggagcccaggtagaggtcgaatgtggaggtcatggcctcacttctctgggggaggtgaggaatgctacggtgtccctctcagccctgaagttctatggtctctgtccttccttcctccgacatgccttgccca

SEQ ID NO: 1560404 - DNA, 4001 bp, Homo sapiens
gatatctcaagttaaggggaaaacctctggagaaactggggacccctcagaaaactgcaggatccatagagcatttgggggcccagaagaaatagaaaagaaggatactggtaaagtaggggtatacctcagaaaactaacgatccagtcagatgggcatttcaaagaagtgggggaccccctcaggaaagtgaaggcactcatcaaaaagcgggggccaggcacggtggctcacacctgtaatcccaacactgtgggaggccgaggcgggtggatcacctgagctcagaagttcgagaccagcctggccaacatgatgaaaccccctctctacaaaaatacaaaaattagccaggcatggtggtgggtgcctgtagtcccagctactcaggaagctgaggcagaagagtcgcttgaacccaggaggcagaggttacagtgagcccagatcgcaccactgcactccagcctgggagacggaatgagactctgtctcaaaaaaaaaaagaaagggggacaagtcagaaaagtaggaccacagctgagagaggtgggggtggggagatccccacagagaggcaaggcttcctccgagaagcagcaatgtcttctgaaaagaggggtcccccggggaagaaggggttccccaggggtccacaaaaggtgggggatccctcagagaaagtacaccctgatagaatcaggggtctctccttagaggagtgaggatagggtcttagagaggccagggcccctcaaagaaagcgggggaccctcagagaggcagagggtctctcagagagatggggattcccctcaaagaggcaggggtccctcagagaaagggactcccctcagaggcgggggtcctcagataggaaggggtctctagggaggcaggggtccctcaaaaggatgggttcctgagaaaagtagagggaccctcagtgaagaagggagtcccctcagataagcgggaattctcaaagagttggggatccccaaagaagggagttagttcctgtcaaaggcaggattcctcagagaggtgggggttccctccggcaggggtcctcagagaggcgggggagcccctgataagaggggttgtcccctcagagaagcagggtcgcctagagagacagggctcccctcggagagacgggggttccctagagacgaggtcccctagagagacggggtcccctagagaggtggggatcctctagaaaggcacggatcctctagagaggcagcgttcccctagagaagcggggtcccctgcctggagagatgggagtcccctagagaggcaagggtcccctagatgggaagaaagtcccctagaaaggtgggggtcgctagaaagatgggatcccctgcctggagagacggggtccccaagagagacggggtcccctagagaggcaagggtctcctggagaggagggaggcccctagagaggcgggtgtgtccccaagagaggcgagggtccctaagagagacggggtctcctagagaggcgggggtcccctggagaggcgggggggcccagagcaggggctcccctgagggggaagtgctgtggagaagggagtaaactcggccaaggtagtgcgggagaagcggaagccccagagagcctggggcaccggaaaccggggacccgccagcggcgcctgccccttactcaccgaagttgctcggcgccctcgctgacggcggccgacggcctcgggcggcgcagtccggtcaggtcttgtggcgtcccgcggaggcgactccctcaggtggcgcccgcggcggccgctgtggcggcggcggcagcggcgacaggacagacgaccgaccgaccgactgcgcgggcggcgcggggcgcgctcgggcggcgggggtgcgcgtgcgcgcgccggggcgctgaccctgggcgggaggagccgccgcgcagcgctcggagccgcagctcagtctcgcggctcagtctcacactgaaattgcccgcttcacagcccggcttccccggttgctaggcagatttcgcctcgcacacttccgggttgaggcgcgtctctccgagtgaaggcgccacaagccaatgaggtccagccaggactcccaggacccgcaccccatggaaggtgtggccagcttcatgacagacagcgcatgacgaccagtgagtgcgcgggccggctggttctcgggatcgcgccgccggccggggcgggtccgaggaggcgggacggaatgactgacaggcatcctgccaatggtagatgggagcgggccgcagagccactcaaggccatgcgggggcgggacttaaacttcggggcgggaaccccgcgaggggcggggcctagggggacgagtcaattcgtggccggctccctgggaccccggagggcggatcgcctgggccacccggcggccggcaactggctgggcagggggttccccgcagtgctctgcaggggctccccacccataatgcaccggaggcggccttggccaggcgggcgtggggcagctacgacgggctgcgagcggcgcctctgaggagcccgggcgcttcgtggcctggcagtgtttctaaggggctccggtggccgcgcgctctttctgcctcgtcttgtggcttcgaccctctctatccaggagaatcttggagattctggcgcgcgccccggttctgagaagactctgcttcgggattcttttccctggcccccgttctgaggaggatcttcggaaatcttgccccgacccctcttctgagagagtttgggggtttcttgccctgcccggttttctgaggacaattgccgggatcacgattatgttgtagattcgggaccccagctctgtttcctaagaaaacatgggagttcgggatccctaaggagcatttggagaatccagggtccaccgccttttccgaggaatatttggggcacatacactccttttctaagcactcttgggggccgctctccctgtccctcctttatctgaggaaagtgagggctgcgcgcccccctccaccttcgtttctgaagatatcttggggattttctgcctcccctgttttctcactacacgaggaatttgggacttcaagcacctcgcctctctccagagaaggatggcaggagatgggcgcccctcacccctttactaaggaaatgcgaccgggcgcggtggctcacgcctggaatcccagcactttggaaggttgagactggagggtcgattgagcccaggagtttcagaccagcctgggcaacatggcaaaatcctgtctctacaaaaattaaaatcaaaatgaaaaaatcagcaggggtggtggcgcacacctgtagtcccagctactccggaggctgaggtgggaggatcgtttgaaccgagaggtcgaggctgcagtgagccaagatcgtgccactgcactccagcctgggcgacagagcgagaccctgtctcaaaaaaaagaaaaaagaaagttatcgggcgcggtggctcacgcttgtatcccagcactttgggaagccgaggtgggcggatcacctgaggtcaggagttcgagaccagtctggccaagatggtgaaaccctgtctttactaaaaatacaaaaattagccgggcgtggtagtgggcgcctatagtcccagctactcgggaggctgaggcaggagaaccgcttgaacctgggaggcaggttgcagtgcgccgagatccaccactgcactccagcctggatgacagtgagactccgtctcaaaaagaaagaaagaaaaagaaaaatgcgagggagttgtgctccatgtgcttttctaagcagcatctgagtgtgggaggaaggggtccccttttcctgaaacttcgactttctgacgcctcagccctaggacaatgcggtgagttagacctttttagaaaagcaacccaggccgggcgcggtggttcacgcctgtaatcccagcattttgggaggctgaggcg

SEQ ID NO: 1560405 - DNA, 4001 bp, Homo sapiens
ggatcacctgaggtcaggagttcaagaccagcctggccaacatggtgaaatcccatttctactaaaaaatacaaaaattagctgggcgtggtggtgcacccctgtaatcccagctactcagaaggctgaggtggcagaattgcttgaacctaggaggaggaaactgcagtgagccaggatcgcaccactgtaatccagtaatccaggctgggtgacagagcgaaactccatctcaaaaaaaaaaaaaaaagaaaagggccgggcaacggtggctcacacctgtaatcaggaggctgaggcgggtggatcacctgaggtcaggagttcgagactagcctggccaacacggtgaaaccccacctctactaaaaatacaaaaattagccaggcgtggtggcggacgcctgtaatcccagctactcgggagcctgaggcaggataatcacttaaacccgggaggtggaggctgcagtgagccaagattgcatcactgcactccagcctggacaacaagagcgaaactccatctcaaaaagaaggctgaacgtggtggctcatgcctgtaatcccagcactttaggaggctgaggtgggcggatcacctgaggtcaggagtttgagaccagcctggccaacacagtgaaaccctgtctctactaaaaatacaaaaattagccaggcatggtggcacatacctgtaatcccagctactagaggggtggaggcaggagaatcgcttgagcctgggaggcagaatttgcagtgagccaagatcgtgccactgcactccagcctgggcaacagagccagactctgttgggggggaagaagaaaggaaagaaaaggaaaagaaaagaaagagaaggaaggaagaaagggagggagggaaggaggaagaggctttcagaatacagagggttctgcagtgtgtggagagatacttgttcctacctttgatggtggggcccagcacacccaactcccccatctccgaaatgatctcccgatgaaaaactgcaaagggaccagtgcccaaattcaggcccaggcctaggccacaggaagccccagccccaaggacagaggggccttgaggtggggtggctatggctccaggcggaggagcagtctcagggcacccaccagcccgcccaccttcgttgcgattggccaacaggatgcgaggcatgagtctctcctggcagtaggtgcggaaggtgtccctgatgaggatctcatctgtggtcagctgctcctccagcaccagcgggtcctgccagtcaaactcgggacgcgaggctgggaaggggaattcgcctcggtccagtccgcaagatcactgtgccctcccttctcggaccctcatcagccctaccccccaacacccatgtcgccccccggctagtgcgagctgcaagcgagactgatcaggtgacttttctccggccccgcaggcacagcgcactcactgccttagtgcctctgaccctggccacgaccctgccaccccgctcgggcagctctcggattctgggacagagtccacctgcggcagacagacagctgaacaggggcagcagacacacggtgcgaccagaggtccttacacttagccagttggctctgtgttctcccgcctttctctgcaagcacagaacgggaaagtcaccccggaaagtccctaaacccccagttcctccctccttccctccacactcccgaccccacactgaccggtctgcgccgccgacgagacccacgtgcgaaggacgtgcaggccgggtccgcggctcagcagccgcacggagacgcctctcagggccatgctctctcagagcgagcggagcaacgacggcgacctacaggagcgggggtgtcagagcggagctcctctcacccacggctggggctaccgcaccttccttacctggtagtacctcccggttcactgccgaggctacagtgcaactgacgcaggcctttgacctcagcaagaagtgggaggagcggaggccgagtgaggcttttcattggttcctcctagaatccggccccctccgcagctctgccttttaaaagggctaaggtagccttgcctgtggaaatcggggggcccagacagagataggctagcccctttaagaagcggacggggtaggggcggaagacgagtgcgggaaaccgattggccagctgggtttctcctcttattggccgtaggaaagggctcggcccactcctggttggtcagttgcagggggtgtgtgcggagggagtcaagaattaaacaaagaaattctggcgcgagcactaggcgtcctcctgaacccaggaggccagactcgagttctctaattgggtgctggttgtggggaagacgagctccaagtgggcgatcttagcaaacctttctgccagtctgtcccaggaagcacatgtagatacttgtgactctgtgtgtgtgtgtgtgtgtgtgtgtgtgtgtctgtgtctgtgtatgtgtgtgtgtgtgtgaacttgtgtgattctgtgagtctatgtggttgttttgttttgtttttgttttttctttttagacagggtctcgttctgtcgctcaggctggagtgcagtggcgcgatcatagctcactgcagcttccacctcctgggcgatcctcccacctcagcctccaagtagctgggaccactgaagcatgccatcatgcctggctaattttttttttttttttttttttttgagacggattctcactctgttgcccaggctggagtgcagtagcgcaatcttggctcactgcaacctctgcctactggattcaagcaattctcctgcctcagcctcctgagtagctgggattacaggtgtgagccaccatgcctggccttttttcttatatttaatagagacgggtttcaccatgttggccaggctggcctcaaactcctgacctcaagtgatccacccacctcggcctcccaaagtgctgggattacaggcgtgagccaccgcgccccgcctgttttgtctttttgtgtagtgcatttgtggtgcacccattctgattgtgtatctgttgagaaatgtgtgtgtcttgattctcaggacctgtgatgccatgtccttgcgtttgtctgtgtttaactgggtgcatcccctacggttgggcactggtagctatgcaactgtgactaaataattactttacatattgtaaaagtgaccggtggtgtgactgtataaagtgtaggttttgactggctggggcggctcatgcctgtcatcccagcactttgggaggccaaggagggtgggtcacctgaggtcaggaccagcctggccaacatggggaaaccccatctctactaaaaatacaaaaattagccaggcctgcttgtgggtgcctgtaatcccagcaactcgggaggctgaggcaggagaatcacttgaacccaggaggcagaggttgcagtgagctgagatcatgccattgcactccagcctgggcaacaagagtgaaactctgtctcaaaaaaaaaaaaaaaaaaaaaattagcgtggcgtggtagcaggcacctgtaatcccagctacttgggaggctgaggcagaggaatcacttgagcctaggaggtggaggttgcagtgagccaaaatcatgccactgcactccagcctgggtgacagagagagacactatctaaaaaaaaaaagttctgtgacaatgtatctgactccccatgtgtgtctgctcaattacggctaaattgtgtcagtaggattgtataactgtgtgcctgcctgtggattatgaattctgtgttttagagattgtttggctatgacattgtgtaaccaatatagcatagggttgtgttttagtgcctgggaattgtatgtctgtgcatagtccatatacatagacagacacacaattatatgtgcacggattatatgatcagtgtgactgagggaacaggaactcatgtcattatgtaattgc

SEQ ID NO: 1560406 - DNA, 4001 bp, Homo sapiens; identical to SEQ ID NO: 1560162

SEQ ID NO: 1560407 - DNA, 4001 bp, Homo sapiens
ttcccctaccaagagcatttctccgtgcgggcgcggtggctcacgcctgtaatcccagcactttgggaggccgatgcaggtggatcacttgaggtcaggagttcaagaccagcctggccgatatgtggccaatatggtgaaacgcccgcttctactaaaaataccaaaaattagctgggcatggtggctggcgcctgtgatcccagctactcgggaggctgaggcagaagaatggcttgaatcggggcggtggaggttgcagtgagccaagatcgtgccactgcactccagcctgggcaacagaggaagactccctctcaaaaaaaaaaaaaaaaaaaaaaaaaagggcatttctccccttgaatctcctgaatctcagtatggctggctcctcctcttccttccagcctgcctaaaataggaagcaccctattttatttccttgtgtatcattcatattccctacttagaatcttagcttggttgacactgtgcctggcacacaataggtgcttagtaaatacttgaaggaattaatgtatatctgatattcaggcagcctgagattccaaccatggctctgcttttcttctggcagtcaaaaacttacttgcttcacttatttatttatttattatggtcttgctgttacccaggctggagtgcagtggggcactcatggctcagtgcagcctcaatctcctggattcaagtgctcctcccgcctcagcctcctgaataactgagactacaggcacacaccatcatgtctggctaattttttttaaacatttttggtagagatggattctcgctatactgcccaggctgcaatgttctggcctaaagcgatgctcccaccttggcctcctaaagtgctgggattacaggtgtaatcccgagaaatgaagagtgccaaacccatcacattccagactactgagcctctaggaatcacagcccctcaggctggtacaagtgttagggagactggggagactggggtttgagggtgccttaacctagttgctaggcttagcaagggtgagaggtttgccggagtcacacggcacagatgggtttagggcgggctaagagtgtgcccctctgcctgccccctcctgggtcccaccacagcccagacctcatccagtgccctgcacccctggagcctccatggagggcacagagatggggaaaatactctcctcctcccctaacaagtcgctcgttgcatgtgactttagcagtgccttgacaagcgatttcatcagattcagaaccagctccagctggctctgcccatcacaaacttctatccatgcaccacacccccattgtttctcttggatcctggccccagcccaggtcagggaccatgcccacaccgcacgcccgaccccgtccccgggtttcccaggtgctgtgcacattcaggagggtccctggcatccctgtacctcagtttccccatttgcaacttggggacaggttataacctcccacgttgtgggtgcaaatcaggcatcggctaccccatcagacccaaggggatccaggatattcctacccagggcacagatggggcaactgaggctcaaaggtaggtctgggcttttcaagatgaggaatccctgattagatatgggggctgcttggggggtgggaggggatctctaagatttcacttaccttctggcgtgagtatccggactgcaggggccgggacgaggtcggtgttcgaatcttcccagctctggttggcccgcagcctggttagcaggtcctcgtagcgtttccgcaactctcggaatctggagtcttcggagtgcaactctgagggtcccgggaaacttgcgcggctcgcctcggccagagacagggcgcccccatgcggcagccacgagagcaccagcaacaccaggagcatctgagagccattcaccgtcctgagttcttgcccgggcatggctgtgcaggttgcggctctgagctgggactgaccagatgctgccggaccggcctttatagtccccggactttgtccgtctccgcctgctcagtcccgccctcctccccctgcctgcagagtaaacactccaatgaccacagctgggcggggtctgggggtgtatttagggggaggatctttaggtgggggcgctcctagtaaagctagggcacatttctgggcctcagtatcctcttcctcgatatgaggacaccattccagcctgggagtctttttggaggaaaaaaagacattgttactatgtgaaaaattccagacaagagtttaagaggtggctgtctatgcccatgggatttcctctcttctctttttggttggggtcaaaggctaaagatggtgaaaaacaaaggaagcagaggagaacgggctagatggagccaggaagggcaaccttgatgtgtcatgcctctctgccatgcctgtttcctcaccaggaaaaaaaggactgagactctcactggagaggtggtcaaatgaggggtaaagcacagggccagacacataggaggcacttgataaactgggtgttattgcagttactcatcctcctctggagaactcctactcattcttcaaaactctacgcaaaaagcccctcttccaggaagtcttctccaacattatctttccagtctaagcagggtgctcccaaaccccatccttttgtctggctcagcgctcaccttgaagccatcctcacaggattcataattctgggggccaggcatggtggcttatgtcagtaatctcagcactttgggaggccgaggtgggtggattgtttgagcccaggagttcgagacaagtctgggcaagatggcaatacctcatctctaaaaaaaagaattctgcgccgggcacggtggctctcgcctgtaatcccagcactttgggaggccgaggcacgtggatcatctgacgtcaagagttctagactagcctgaccaacatggagaaaccctgtctctactaaatatacaaaattagctgggcttggtggtgggattacatgcctgtaatcccagctactcgagaggctgaagcaagagaatcgcttgaacccagagggcggaggttgcagtgagccaagttttcaccattgcacttccgcctgatcaacaagagcaaaactctgtctcaaaaaaaaagaattctggacagaaacttagttataattaagcactaatcaggctgcactttgacccacttccttgtgaccgcaagttgcttgtagcacctgataccgaccatttgctatagatgtgatttccgaccttagaatcataagactttttagaagaatttcttaagatgtttttgaaatccttaaccaatgacacccaccagtgtgaagaccccacagaggaacggaatctgcatgagaatacagtttcttactgtctgtgacttcacctcctgcactctttcaccaagcaatgacctccacacttcagcccactccaaaatccttaaaaattaaaactctagcccctggccaggtgcagtggctcacgcctgtaatcccagcactttgggaggccaaggcgggcggatcacctgaggtcaggagttcgagaccagcctgaccaacatgatgaaaccctgtctctactaaaaaatttcagaaattaaccggtcgtggtggcacatgcctgtaatcccagctgctcgggagcctgaggcaggagaatcgcttgaacccaggaggcggaggttgcagtgagctgagatcatgccattgcactccaacctgcaagctccagctcccaggttcatgctattctcctgcctcagcctcctgagtagctgggactatgagcaccccccaccacgcctggctaatttttttttgtatttttagtagagatggggtttcaccgtgttagctaggatggtctcaatctcctgaccttgtgatccgctggcctcggcctcccaaagtactgggattagaggcgtgagccaccac

SEQ ID NO: 1560408 - DNA, 4001 bp, Homo sapiens
gttggccaggctggtctcaaactcctgatctgcctgcttcagcctcccaaagtgctgggattacaggcatgagccaccgtgcccggccttgcattttctaattttttaaaaagcacatttacttatttatttactttgaggtgaggtctcgctgtattgcccacgctaatcttgaactcctggactcaagatatcctcccacctcagccttccgagaagctgggattacaggcccacgccaacacgccctacttgcattttttattttctctgaccactgtcactccaatttagtcaggcctcaccagcccccagggtctttcctgagcctagattaacacttgagtttcaagagaaaccccctagtctctagggtgagtacttactaaatgacttagataggattagagtggccaaagaattctgttaaatccctggataaaatgaaattaagggagggccagtatagggccttgttttctccatcaggaaaaaaaaaaaaaaaaacaaaaaacaagggagatttggtcatattgatgcaatccccatttttgtaaagtggccagtgaagctggcaggtcaaatctttcctcgggctgggtgcagtggttcacacctgtaatcccagcactttgggagactgagggaggcagatcacctgatgtcaggagtttaagaccagcctggctaacatggtgaaaccctatctctactaaaaatacaaaaaaaattagctggatgtggtggcacgcatctgtaatcccagctacgcaggaggctgaggcaggagaatcccttgaaccagggagacggaggttgcagtgagcggagatcacgcctctgcaccccagcctgggccacagagtgagactctgtttcaaaaaaaaaaaaaaaaaaatcatttccttggtgcaagctggagggtggaggaagagggagcaaactctggtcctcacccgtgccccatgtagaaaggcagactgtggagccaaggtgtgacctgataagaaactggtttaagaaagatcacacagggtgtgcccaggagggtagaggcaggcgttatccattgtccctggtgacctggccccagaggcctttatcctttcagtctccaaggcaaggatttccgaaggtttcagggaaaaatgcccaagcccatcccccacgacttgaaaaactagtctgttagattcaagagcccaacacttaggtcaatggcaggggcaggggtttcacagacctccctcctggtggccccggtgctccagagaggagatcagctcagtggacaaacatttggccaactcttcacaattgccagggtgtggaaccagctgagttgtcaacagagaagccgccagacctaattaattaaccaaggtgttgacgtgtccacagacacacacacacatacagacatcatcggctgctgaatcttgatgcaaattagctaaatggggccacccgagagggtcagaaccccaagcacagaatctctcccctccccttctcccctggggccggtcagtttcctttcaattccgccctgaccacccattgctctccttttcttatactaagtaggtcctcccggcccccaggcgtccactccccacaccgccctgggcgttcggactggaccttcttcccacctccaggctcagactgagcgagcgattccgctccaggtaaagcgggatgactgccaccgatgcttctgttatcgtggccatttattattttccggaggggaagtttttctccttctcccttctcctcaccccacccgcgtggggcattcccgctgccggcgatcgggatcaaacagtccctgataggagcgtctggggaccagaacgtccctccagccggcgctgcaggcgcggtcctacctctttccgtcactcagggcgttgcactggggtgagcgtccagagctggggccggggagagggaacctgctggcgaccccccaccaccttgtactcaccgaggtccgcggctactggtgtccccacttccgccggcgcccccgctgcagaggcccgggcaggccgcaagccgcggagcctgggttccgcccgcgccgccgccactgccccacgtggtcgcgggctggctcgcaggcttggaagccagcacagcccgggtcgccacctggcccgcggctttgcggggcacttgggaccgatcttcctgcctgcgagttgggggcgtctgggatgcccattttaggcaggaagaaactgaggttcagagaggggaagacttcctccctgctgggttaagggcagagctcggtctttgcatccccatccccctacacatacccactcctaaccccttgcttccagtgggaacccccgctcctctacaggaaacctggagatcatggtttcagatgccgcatactaagaaagtagctgggctggatcagaggcggtcattttgtcctccagctctccctgcagtcccattttacaaagggggaaactgaggccttgaatggggaatatgaacctccctattccaggcccagtcagaattcactttctccttgcggggtcctctttacgcagggatcctgtgggcctttgctttccactagatcaccaaggcctagtgccaggtacacaatttggtgctctgcaaatatctgttgaaagaatatcatcagacacatagtaggtgcgcaataaatatttgttgacttaactatgaacgagtaggggttgtatttatgaacaagacagactcccatcctgcctcctagaacctacgttctagtgggggtagaagggacagaatagggtaaaatgagcaaatatgtaaacaagatccttcagggtttgatcaaagtgatgtataaagaataaaataggccgggcacggtggctcacgcctgtaattccagcactttgggaggctgaggcgggtggatcacctgaggtcaggagttcgagaccagcctggccaacatggtgaaaccctgtctctactaaaaatagaaaaattagccgggcatctgtaatcccagctactccggaggctcaggcaggagaatcacttgaacccgggaggcggaggttgcagtgagctgaggtcgtgccactgcactccagcctgggcaacaagagtgaaactccatctcaaaaaaaaaaaaaaaaaaaaagagtaaaataagggcaatgggatagtgggtggctgggttgccatggaacttaaaattgggtggtctgaggctgagtgcagtgtctcacacctgtaatctcagcactttgggatgctgaagcaggaggagcgcttcaagccaagagtttcagaccaaccagggcaacaaagcgagtccctgtctctatttaaaaataattttttttgaaaaattaaaaattacaaaaaaaaaaagggtgatcagaggaggcggcagtgaagaagaaaccacctcagataaccctctagttccaacctgccctacctcctttgacagatggagaaagtgagatccaagagggaactggggacagatggaggtcatggagtgtaatttgcaaggccttcagcagggtggggctactttagatactgttggtcagggccctctgctctcaggaggacaatggaacccagacctgaataacaatgtgcagaactccaagagatcagcatctgaaatcagcatctgggctgaggacagctgggggaggacaggttcttgccctgacctcagggggcttgcattgggtgggggagaggacagtccacaagccgttctatactgtcgtgcagtcggtgccaggaagaaaagaatactcatcagggattgagggtggggcagggtgtcgatgccacttcaaacagtgagcagacagaactgcttaggggagggaagttcaaggaggcggagtggaggcaggtgagctgcttggctatttggttttaatggcgacttctggtctaggaacagagtcgatgtgtatgattacagtcctcctctgctc

SEQ ID NO: 1560409 - DNA, 4001 bp, Homo sapiens
ggtctcaaactcctgatctgcctgcttcagcctcccaaagtgctgggattacaggcatgagccaccgtgcccggccttgcattttctaattttttaaaaagcacatttacttatttatttactttgaggtgaggtctcgctgtattgcccacgctaatcttgaactcctggactcaagatatcctcccacctcagccttccgagaagctgggattacaggcccacgccaacacgccctacttgcattttttattttctctgaccactgtcactccaatttagtcaggcctcaccagcccccagggtctttcctgagcctagattaacacttgagtttcaagagaaaccccctagtctctagggtgagtacttactaaatgacttagataggattagagtggccaaagaattctgttaaatccctggataaaatgaaattaagggagggccagtatagggccttgttttctccatcaggaaaaaaaaaaaaaaaaacaaaaaacaagggagatttggtcatattgatgcaatccccatttttgtaaagtggccagtgaagctggcaggtcaaatctttcctcgggctgggtgcagtggttcacacctgtaatcccagcactttgggagactgagggaggcagatcacctgatgtcaggagtttaagaccagcctggctaacatggtgaaaccctatctctactaaaaatacaaaaaaaattagctggatgtggtggcacgcatctgtaatcccagctacgcaggaggctgaggcaggagaatcccttgaaccagggagacggaggttgcagtgagcggagatcacgcctctgcaccccagcctgggccacagagtgagactctgtttcaaaaaaaaaaaaaaaaaaatcatttccttggtgcaagctggagggtggaggaagagggagcaaactctggtcctcacccgtgccccatgtagaaaggcagactgtggagccaaggtgtgacctgataagaaactggtttaagaaagatcacacagggtgtgcccaggagggtagaggcaggcgttatccattgtccctggtgacctggccccagaggcctttatcctttcagtctccaaggcaaggatttccgaaggtttcagggaaaaatgcccaagcccatcccccacgacttgaaaaactagtctgttagattcaagagcccaacacttaggtcaatggcaggggcaggggtttcacagacctccctcctggtggccccggtgctccagagaggagatcagctcagtggacaaacatttggccaactcttcacaattgccagggtgtggaaccagctgagttgtcaacagagaagccgccagacctaattaattaaccaaggtgttgacgtgtccacagacacacacacacatacagacatcatcggctgctgaatcttgatgcaaattagctaaatggggccacccgagagggtcagaaccccaagcacagaatctctcccctccccttctcccctggggccggtcagtttcctttcaattccgccctgaccacccattgctctccttttcttatactaagtaggtcctcccggcccccaggcgtccactccccacaccgccctgggcgttcggactggaccttcttcccacctccaggctcagactgagcgagcgattccgctccaggtaaagcgggatgactgccaccgatgcttctgttatcgtggccatttattattttccggaggggaagtttttctccttctcccttctcctcaccccacccgcgtggggcattcccgctgccggcgatcgggatcaaacagtccctgataggagcgtctggggaccagaacgtccctccagccggcgctgcaggcgcggtcctacctctttccgtcactcagggcgttgcactggggtgagcgtccagagctggggccggggagagggaacctgctggcgaccccccaccaccttgtactcaccgaggtccgcggctactggtgtccccacttccgccggcgcccccgctgcagaggcccgggcaggccgcaagccgcggagcctgggttccgcccgcgccgccgccactgccccacgtggtcgcgggctggctcgcaggcttggaagccagcacagcccgggtcgccacctggcccgcggctttgcggggcacttgggaccgatcttcctgcctgcgagttgggggcgtctgggatgcccattttaggcaggaagaaactgaggttcagagaggggaagacttcctccctgctgggttaagggcagagctcggtctttgcatccccatccccctacacatacccactcctaaccccttgcttccagtgggaacccccgctcctctacaggaaacctggagatcatggtttcagatgccgcatactaagaaagtagctgggctggatcagaggcggtcattttgtcctccagctctccctgcagtcccattttacaaagggggaaactgaggccttgaatggggaatatgaacctccctattccaggcccagtcagaattcactttctccttgcggggtcctctttacgcagggatcctgtgggcctttgctttccactagatcaccaaggcctagtgccaggtacacaatttggtgctctgcaaatatctgttgaaagaatatcatcagacacatagtaggtgcgcaataaatatttgttgacttaactatgaacgagtaggggttgtatttatgaacaagacagactcccatcctgcctcctagaacctacgttctagtgggggtagaagggacagaatagggtaaaatgagcaaatatgtaaacaagatccttcagggtttgatcaaagtgatgtataaagaataaaataggccgggcacggtggctcacgcctgtaattccagcactttgggaggctgaggcgggtggatcacctgaggtcaggagttcgagaccagcctggccaacatggtgaaaccctgtctctactaaaaatagaaaaattagccgggcatctgtaatcccagctactccggaggctcaggcaggagaatcacttgaacccgggaggcggaggttgcagtgagctgaggtcgtgccactgcactccagcctgggcaacaagagtgaaactccatctcaaaaaaaaaaaaaaaaaaaaagagtaaaataagggcaatgggatagtgggtggctgggttgccatggaacttaaaattgggtggtctgaggctgagtgcagtgtctcacacctgtaatctcagcactttgggatgctgaagcaggaggagcgcttcaagccaagagtttcagaccaaccagggcaacaaagcgagtccctgtctctatttaaaaataattttttttgaaaaattaaaaattacaaaaaaaaaaagggtgatcagaggaggcggcagtgaagaagaaaccacctcagataaccctctagttccaacctgccctacctcctttgacagatggagaaagtgagatccaagagggaactggggacagatggaggtcatggagtgtaatttgcaaggccttcagcagggtggggctactttagatactgttggtcagggccctctgctctcaggaggacaatggaacccagacctgaataacaatgtgcagaactccaagagatcagcatctgaaatcagcatctgggctgaggacagctgggggaggacaggttcttgccctgacctcagggggcttgcattgggtgggggagaggacagtccacaagccgttctatactgtcgtgcagtcggtgccaggaagaaaagaatactcatcagggattgagggtggggcagggtgtcgatgccacttcaaacagtgagcagacagaactgcttaggggagggaagttcaaggaggcggagtggaggcaggtgagctgcttggctatttggttttaatggcgacttctggtctaggaacagagtcgatgtgtatgattacagtcctcctctgctcaaaaccctccta

SEQ ID NO: 1560410 - DNA, 4001 bp, Homo sapiens
cgatcagcagcggcggggcctgcagtggagggcgggaagtacagggctccgggccgcgtacctggaggggcaggggcggggctggcggggacggccggctctgggcctgaagccgtttccaaccgcattgggagcggcactggactcttgggtgaaattgcagacatttagggggctggacgttgccatggaagagccagggctttcattgaccttgggtgggggacctgtgcttttttggctggcgccctgtagtgccgggagagaccaggttatggaaaagtgcaggcattcaaggggcagggcgctcacccggttcatctccgtcgtccggaagccggtgatgtgcgaagggccgctgtctagctgcccggcggtaaagacaccacagcagcacaaagatgccgatcagcagcgcggtccccgcgaagaacaggcagagggccccgcctgctgcgccacgtggtcgccccaccagagtcacgcctgaagggggataccagcaatctaagctcctaaccccctcctctctcagacccaggggtccaagctcctagcccctcctccctcagatccaggaattcctgttcccaaacccttctccctcagacccaggagtccagaccccagccggtcctccctcgcacccaggagtccaggcccccagcccctcctccctcggacccaggagtccaggcccccagcccctcctccctcgcacccaggagtccaggcccccagcccctcctccctcggacccaggagtccaggcccccagcccctccctcagactcaggagtccggctcctgcccctcaccggtctccttcactcgctccaccacgatgatggtgttgactccctcacctcggctgtgcctctggggtgcccgcagagtggcaggggccaactgactggggcgccctggaagagcagggggacctgcaatccgggctgagggaggagggacgttggactccttagggccagagttctggggggccttcagctcaaccattcctggagaatctgaagtgggcaattttggggagtcgggctggatggctgcaggtgttcctggtttgggattcagggacagctcatttagagcagtggcgtcatccttgaagggcacaggtgtttctgggtagagactagtggagatttgagggtcggaggtcctgggtacatctgttgcattttggtagtaggttgtggggaattctgtttgggaaatttcggtggggctgggattgtgggtcacatgggattctgggtggggggttttagaagggtcaggatggagagcttggagaaattcagagtttggggtctcagtggagttgaggtcatgcttttctggggatttggggtcaggggtcttggtagggttagtgtttgaggtctcggggagttctgcctgtgagacttcagtggcattaagctgcagaatctctggggattcttggggtgtagtttgcataaggtcagtgtttggggtctcaggaaattctgggcgtgaagttttggagaagttaggtttgggggtctcaggggatcctgggtgtggcatttcagttgggccaggtgtgggggtctcagaagactctgggtgtgccattttggagaggttagttttgggcatgtccagggattctgatattgaggttgtgagtgagtcagctttgggggtctcaggagactctgggtgcggggtttctcggaggtcagggttgaggggctcagtgaagtcaagtgggaaggtttccagggaaaccgtatgaggtagcttggaaggctcagggtaaggagtcccaggaaattctgggttaaggcgatctcgtttggaattttcagaagcacccttcagaggggaagtctcagaggggtgggccatgtccggaaagccacagcccaaaggcagaggggctgagggagcggccttggacctcaggccggcgaggaggaagacgaggaagaggatccggctgaatgatttcatagctctggcagatacctatagctgcgggggagagcgggaaggaaggggttaaggccgaaggctcccaggagccccgcccactcccggaggccacgcccactggaacacaggtggaccacgtctgtccggggcccagcttggcgccagggatgggaagagaacccaatcgcaagtcccttggaggcttgtggggcgatggcccaggtagccaagagagactgaggcgcggggctacttgggagtcgtagttaatttccttatctgtttcagcgaggggtcctagaaaaattgggaaagaacgacacttctccaggcctcagatctcctcgacttcgactttagggagtgtcagggcttcgaggggacgtgggatctccttcctctccgaggtcccccgggacaccttgactcaacagttgtttacactacaggaggctcctaacggctgagggctggactcatggatttgagggaggagggagacatttgggctctgggttaagaaggttgctgggggttcagactcctgcgtcttgcagggtgagggggctgaggttcctggctcctggttctttagagaggagaaggctggaagttcaggtgcctagaattttgagggagcaaggtttgggggctggattgcaggggtgaaaggagataagaggccttgagctcttggttcctgagttagaaaggaattgggagctctgagtcctccagaaatagggtctggggtctgggctctgcagagtagaggggtagggacttgaagaagagagctttggggcaggactctcaagtctgttattgaagatggagctaggatttcggcatctccggggccagtctgggcagagaagcataggtctgtgttcaggtggaggtggaggcggccgacacatcgatgggacaggcttacttgaggtcctggggtctcttacctgctctggtgtccaaggtaacagcagataagcagagctggatgcagagaacggtgaatgttgcagaacagatctgggcagggcggtgggaggtagggtctcaggggcacacaggtgacgcacctcaccccctcccaggggatcctgggagcctagcgacagacttagactcttaaagggacagaagtaaaggacattttctctggggtggggaagggagttagaaactggattgatctagtggagatgtggcccaaattatttttttgaaaccagtggtcctggccctctaccctctcctacctgaaaacccaggggtctagttccctggtaccttcctatttcaagtcccctaagttgtatcccccagctccctccccccagactcagaactccagtcctctagctccttccttcctcagattcaggaatccaagtccccagcctcctccttccccagaacataggaatctgggtccctgtcccatccactcttagactcaggagtccaagcttctgccaccaccttcctaggaaactaggagcccaagttcccacatcccaagtttctactgctctgtaggacttccaagttttgcccatcttctcctcactgtgtataaaggcccctctttttaaatttttttttttttttgagacagagtctcactctgttgcccaggctggagtgcagtggtgcgatctcagctcactgcaacctccctctcccaggttcaagcgattttcctgcctcagcctcccaagtagctgggattacaccacacctaatttatgtatttttgtagagaaggagtttcgccatgttggccagtctggtctcgaactcctgacctcaagtgatccacccaccacggccttccaaagtgctgggattacaggcatgagccacagcacccggctgaggcccctcttaagagtcagtgtggactgggtgtgctggctcacgcctgtaatcccaacactctgggaggccaaggagggcagatcacaaggtcaggagttcaagaccagcctggccaacagtttggcgaaacccta

SEQ ID NO: 1560411 - DNA, 4001 bp, Homo sapiens
cagcagggcaggtgcgggcctccggggcccgggagctgagtgtatctgctctggtggtggcggaggggagccccaaggcccagagagtgcggccgcacgccgtcgcggcgccccgatgcctccgccagccccgttgaagcggaagtggcgttcagggccgtcgggagcgctaacccagtcgaatttgggcttcgagcctgggaaggtggtgtagggtggcggcggtagggcccgggcttgggacgcaggcgccgagggaggaccagagcacccttcgccgtctccatcacctccctcggcttcctgtgcccctcgagaaacctctcccaaggggcgagcggctccaggaggcaggggcccttgcttcaggacctcggcgtaagagatggcacctgaggcagcaaagaggccgccgcctccgccgccccccagcgaagctttggctgctaaggaactcgaggctgccggaggggccaaagagggcctcgacttgaaggtgattttacacagcaggctcagaccggactcggaatccgcaggctgggccatttcgccttcgcccgcatggggaggcgcccctccgcgagccctgccggccgtctggccctggttgcggggcccagcctggctttctgtcgggggtgaggcgggtgtggccagagcaggagtgattctgcggtccgccggctgccgttcagaaggtaatggtggtggcggcttccaagtctccaggggcggcggaaattgggatggggccctcgggacagtgtccttcacggatagttgccggggcggcggcggcggcttcagcgggcggaggctcggagggtcgccctggccgcgatggctcgcctccagcaggcggcggatccggggaactggagtgcccgcgggcttttgccatttagacgggccgggcagcagagtccccgcgggggccgggggtggtgcagagaccgcggccgcctcttcaggagggggcatcactggagagggccgttctaaggtgaggggcagggtcgagggtgaggcctggggctcccggggtaccatgagtcccgggggtgtggcgctgccagggaaccagacacccagcccacgagtcaggcgcatggcctgggaggtcatctcgggctccaccagggacgtccggcgggagtcgggggcgcggtccgagggctgcacttttcgggagcccccgcccgcggatggctccgactgcaagttccccatttctgacggagctcggagactagtcagaaaaatttactccagtcagcctgccagggccgtggggaccctacgaggctggctgtacttgatctaatgcgtccgcaccggccccgcccctgttctccaagatccgatcaggcccaagtccttaggtcgcactcctgttccccgaccttcgacactcacgccttcttgcccatgtccccaacacagctgctgttaagatacttcactaccagccccattatgtactaaggttccatgcctgtccccttggctggtcatgctgatccctcagtcctctcctctaactctccgactccccgcctctctctagagcacctgggtcccgccctcttcccaggcaggggcagatcctcaggcctcacccctaaacctcttcccgctccaggtctactagctggcatccacagtcaagctccacccctgtccccaagctccgccctggccccgcctccccccagaggaacccactcaccgagtcctccagccgagcagagttcagaccgcggcgccctgggcccggggcagggcagggaactgccgtagcagaaaataaccgaaaagaacgggggtgcgggtgaaggcaagtgggcgagacaactagggcggaccccgagatgtaggccccgcccccggagctcgaggccccgccctcctgcgagcccgcgggagcccggccccttacgaacctaggtctccccttgaaatactccgaggtcttgttcctcgcccccaggccttctggttctaagctccacccctttgggttgttctccttagcccctcccctttagaatgtcccgcccctctcattccctcccgaggccccgcccacgcgaacaccgatgcgtcgctcctcccctttggacctctcatctgccccgcccctaaggcaatttacctctaagctccgcctttttaagacccggcaacatcgcttctcaagaccctctccttccccccgggcgccgagaaggcccatccaccgtgggcccgccccttcgtgacgcacgcactagtcctcgcctgcagcatccaaacctccttatacccaggccctccaaccccacccacttgtgaaggctcccctctcgccccaccccttatcgaactctgccaggcacccaagccacagcgtagaccaccacctctttagaaccttgagaccagtccctgtccctgccccgtcccctcctcatagcattagagaccaatggcgcagatgggtggaaaagtgggggatcccctctggatcttaagaaaatgggggctggggggttgctctctggagctagtgccgggctctaggacccagcaggcaagtaagcccgcctcgctcttacccctcccccaagccgccccttccccccccacccgtcttccaggttccccctccctcccccctcgccccggctcccggtgcccgtctccagcgccgccggagccagccagggagccggaacgaaaaggaggaggaggaggccgcgtcgccgccgctcggagcccggccggagcctcgcaggcaggtgccgaggggggcgagggggcgggggctgacagactgcctgccccgatgagggggcggccgtgaccgcgctgcgccttctgcccacccaggcgcccccaaggccccggctaggaggactagagagtggggaccccccaaactgcgcggcagccattcagggtaccagtcttcatttgtggggtctggactttctccgaggatgccccattcacaaaattccgtcctggaccctcaccgttgaggaacgctgaggaccactccccccgggggacacaggatgtgtggggagcgtaggccaccctgaaatgccagtgccccattccagctaggccctggggggacccctgctctcattccctgcttcacctgttgtcgggggaggcgggcggacaaaggaagcagcgtcacgtgactgctcattcacaaaatcccatcccattgagaaaagggggctgggggcgctgcagccgccccttcccctcctgaagggcccgggaaacccagcagcctgcaggtgggggagggggctagagctcgtccgggtccctaaggttgggacgccagggtccctgtgctggatggcagtgaagggctggacactgatcccgattactgggcggagggctacgtcctctgagctggggggcggggtaaaatggttctgaaggatgctggggctggggggcgggaagggaagagggaggaaggatcaatctgcccccccatcccatctttcccccctggcttccctcggctggggcctgggggagcagccttgatttttgtgaatgaaatgctctctggatgtgtcttcggtcgcccgtttctgacttcctctgcctccgtctccctctgagcctctctttctggccatttctggttctctccctgttccctgcccatctcccgttgctgggtgactcagtgagctttgcatccggtctcattcataaatccgggaaggggtgggtgggggggaaagagcctgggtttctcacccagcctgtggcctggacgacagggtgcggaggcagggttgggagaacaggagctgagttgatgggcccagagaaaatatatatgcgcaggcacccagctgtgagggggagcactgggtggggctgtgggtatgtgctgagggaggagaagggggtgatagggataagcaggagggggagggaagggcaacaccagggctatgggggtggggacggag

SEQ ID NO: 1560412 - DNA, 4001 bp, Homo sapiens
gggtttcaccatgttgatcaggctggtctcaaactcctgacctcttgacccacctgtctcagcctcccaaagtgctgggattacaggggtgagccatgcccctagccaatttttgtatttttagtagagacagggtttccccatgttggccaggctggtctcaaactcctgacctcaagcaacccacccgcctcggcctcccaaagtgctgggattacaggcgtgagccaccgcgcccgggcccccttgcctgatctttgctgggctggcaccccttgcccacaactactctctacagtaccacccgctcatattttattcatagcagttagtgccatctgaaattatcttctttatttacttgctaacttgtttgttggctgcttccttcctttcagagtgccaactcctcaaaagtagggattttgttttgttcactgttgcattttctgtgccaagaacagtgcctagcacatgcacgtagcaggtgctcactaaatatttgtagactgagtgaatgaatgtgtctcaggtcctcgttctgattgctctctgtgctccccatccttgaaacagccccctaaacatgcctgctgtgcggttgccaactgtcctaggctccccactttccctggctcccctcacacctgaacacagagatgaagagccacttcagcccggatattgagtgtttgggctggaatttcagcatcctcaccccctcatcctgggaagggcctgaaacttagcaaccccacggccacacagaagcagtgtggccagcaggaggaggggaagggggttcctgggagcacacagaagctaggggaagggggaaaccacgcccaggctccccgttccagcacagtgttgctttggagagaaggagggaaagaggcctctgattcactcttgaaaaaccggctcctgggtgtttccggggagaacgcctacttcccagcctcggcccaggttgccaggggggaacccagtgggcccagaccccagcatcctggccccctgcagacgccactctcttctctggacccaggtagttagacctgccctctccagctctggggagaagggaaaggagggcagcttcctgtttgagtggctggtaaagcaaaagaccagcaggtgtggccctgatgatgagtacggggtagggggtgggaggggtagggggccggagctactcagcaacaactgagccgtggagttattggtatccagtctagtgggtgtgactccagttctggaccctggggcatgagttccagtcccagatgtgccagttactagctgtgtgaccttgggcaagtcactccacctctctgggtaggctgcctcaccttttttacaagaaggcacagcacctcccatgaggtgtttagagtcaattatcctcatggtaaatgcctgacacggaagctctccaataaatgctagctgaggtggagtttttcatgacgattattattcagaccgtggtcctcactgcgtcccccccaaggccctggagggttcagacgcggttagctcaggggaagtgcccaggaaagggtcagaaacactgaccccgcgcctgtccacgctgggatggggacagtccagccgggggacggggggaggggcaagcccagaaaccccagcccagcgttgggaggcgtttgtcccctgcccgccagcaggaagggagctgcccccaccaccccccacccccgcttcccctgggaaggggcctccggcatccccgcgcgcagcctagacctccagtcgcgtccacggcgccggccccaccctgcaggatcggccggatcctcgcaggcccgcgacccccgaggcccccggagcagacacatccttctcgcagaggccactcacctgctccgccgccgccgccgccgccgccgccgccgccgctgcctccgcctccccgtgcgcacccggctcggccctccgcaaactccagaccgggcctctcccgcagcggcgcctggggggcggggccgacgcccgcggccggccaatcagcggctgcctctcggtgctcgcagccaatccgcgtcttccgcttcgggtggacccgacggaaacattccagagggatccctccgcctcgcccggctcttcccgactcctcccctcgccgcgaagcagtggaccgttccgccccgcctaagccgcggctggctgtaccaccggagggctgaggaggggggggagctgcagctgggccccggccaatcgcgagggaggaaggagacaagcggccaatgggaaggaagctggggcccctgaaccacgtgctgtcggctgagtgtcagtctcgggtgccctgggtggtgaggggcgggggagtcaggtgacctaggccaggtttcggggaaaggattcgaacttccgacgtccaggaaagcggacagtttaggagacctgggtgggggtcaatggcagtccccaacccagttccctgcccggcctcctctgccccagcctggccatcctcggagcggataaaaagatgcattcaatctctgggggcgggcgggggatcgagatgaatagggagggtcccgagtttccctgcttcctgggctgtacaatggacaaaggcattcattcattcattcgttcactcactcatcaaatatttaatgtgccagactgctccgtgccagactctgtcctacctctgaagacgcgtcagtgaataagctgaatgtgctcctggtagaggtaacagagcgtgcaaaagccggacagagagatacagcacgctttaggatactgcaatatcgtgggagctagtaaatcagtgtggaaaggcaagatgcaatgaaagacaagggtgagatagtttatctgcttgttggtttgtttatgtgctaggtcacagaaggtacccagccagcctttcatagatctgtctcctccatctgactgtgagggtggaggctgagtctctcttgtcaacccctcactcccacctcaggctgccacacggcaggttctcagcaaacctgtgtggacaaatagaccatgtagtttataaggaagggggatttatcaggtggacacagatccaagaaacaagagtcacaaatgcacctggaccaggccaggacgctcagttcccgggacaagtgagatttccttgttctagttcaaacccagccacttggacagcaactggggctgaatgctgtgtgttctgggaactgtagttcctggaagcctctaagtgctgagaccctgctcaagctccatagaaagactggttctttgcagttcccagggtgagatgttgtgcatatcagtcccaccaggacctgcagaggggcaaactaaaatgggagatggaaccttgagctttgctgctgaggattgcctagccagccccacccagctggcaaacaccgagattgctgtggcaggccaggcaacaggcacagctattgtccgtcccttcctgttctgctgacctctgccatcccactgagcaatcagttgcctgggctggccagtaccctctgtgggactgtgctgcctgccctgcttgagcctggcatctaagctgccccctgcacacttggagaggacgggatgctgagcccaggggacagcatgactgaggctgcagagtcctgagccagactccaactggctcctgtttcctgatgaggaagtgcccggagaaggggtgatgggattgtgggattgctcaagacacagagcagcactgggcacctcctttctgaatttttttttttttttttttgagacagtgtctagctccgttggccaggctggaatgcagtggcaggatctcagctcactgcaacctccacctcctaggctcaagtaatcctcccatcttagcctaccgagtagctgggaccacaggcatgtaccaccacacctggctaatttttgttgttgttgttgtttgtttgtttgtttttttgagacggagcctcactctgtcacccaggctg

SEQ ID NO: 1560413 - DNA, 4001 bp, Homo sapiens
ggtggctcacgcctataatcctagcattttgggagactgaggcgggtggagcacttgaggtcagaagttcgagaccagactggtcaagatggtgaaaccccgtctctactaaaaatacaaaaattagccaggcgcaatggtgggtgcctgtagtcccagctactcgggaggctgaggcaggagaatcgcttgaacccgggaggtggagattgcagtgagctgagatcgcgccattgcactccagcccaggcaacagagtgagactccgtctcaaaaacaaacaaacaaacaaacaaacaaaaacaagtctcccagcctggctccaaagtggttctggacgcgtcctcctccaactccactttacccagtctctcccccacccctcccccacaggctgactccataacaatctattaatagaaactacctacgagtttctgataccctgccaggagctccttggcacgcagcgggtgcacctagaaccttccagcccgtcccatccccgaccctcctccaccccaggcatccgtagaacgcacttcgggaagagctcccgccagcccacccgcctcaccgaaggccctcttgggctgcaccaggcgcagggtgaagggctgggacttgggcagctcccggagcatcttggccacctcgtagtggcggcagcccacaatggagtggtcgttgatggcttcgatgctgtcacccacgcacactgcctcgatccggttgatgatactgccttccttgattctctgcagggatccagcgtcgctggcagggcaaccccagccacccgcctccaatccgcagaacccacgtcgacccagagtggggggggcagttgctggaccccaggaagccacccgcccaccccctcccgggcaccttgatgaaggcgtagccagccccgttgtccgtgatggtcagccccagagcatcctctgtcttagtgacctccacctccttggtctcgcctcgcacgtgggcaaagatgaagtcctccaggcctatctgaccccccaggagcttctgcatgtccactttgtggctgttgagggtgcagaataaaatcttcccgggggagaaggagcctagagttagccagggcatgcatccccccacgcagccaccctgtctgcgcaggcccctgcccccagcgaccaggatcccagcccatgggaaagggcagggcgtgggacccccagaacagagagaggagggagaaggagacttccagcaggtggagacccctctccataccccgggacctccagcccccagacctccaggtttaatctgctggcgccccctgggggctgcaaaccaaacgaacccggattggaaaaacgcccaggaaccccccaaccccacggcggcctcaaacttcccatccctaagggggccatctggaaccccagaccccagctacgcccaggaagcacagaggcgcttccccgagggctggggtccgctccaagctaggtctgcgcagaggattttctggaatatctaggggtccgctagtcctaagacctgcccatcttttgcgcagagcgtgcaaagggggcccctgggagtgtggcaccccgggatctgagggctgggtctctgagatccggcgattaggcggccaccccgacgtctgggatccggggatctggggtctcccgtccagggtccaagctccctacccctcaccccatcaggcgggtggtcttgggcgccggtgtccgggctccttacctcggtgggcgcgatcccgaaggcttcggcgatcttggcgtacagctcgcggacgttggtgaagccctcgatcttgcccgtggggctcccgtgcgccagctgcgtgcggaagacgaggcgcgggcgggcgcggggcgcggccgggggctccgagggcgcgggcgggggcgcagacgcgcgcggggtctcggtcccccgggcctcccgggccgctgctccctccatggcgggagaagttcggccacccacccgggccctcgccgccgccgccggatccgccgcttcctgcagcctcccctcccccggcccagggcgcgacagccgagacgcccgggtaaggggatctgggaacccgagcctcccgggaaggcgacaccgcggggtgcgcaggggtgggtcgggccccaggtgtccgggccctgccagggccagctgtgccctccccggggatacccgcagtccgggggggcctgagctcaggaccctggaagaacagggaccacaaataaggacagggacaggcctggagcggtggctcacgtctgtaattccagcactttgggaggccgaagcgggcagatgacctgaggtcaggagttcaagactagcctggccaacatggtgaaaccccgtctctaccaaaaatacaaaaatcagccggacgtggtggcgggcgcctgtaatcccagctactcgggaggctgagatctcttgaacccgggaggcggaggtggcagtgagctgagatggcgccattacactccagcctgggcaacaaagcgagactccgtcgcaaaaaaaaaaaaaaaaaaaaaaaaaaggacagggacagctgagggtgctggagcactcaccctctgctaggcgaggtcattgttttattttattttattatttttatttatttatttattttgagctggagtctcgctctgtcacccagtttggagttcagtggcacgatctcagctcactgcaacctctgcccaccaggttcaagcaattctcatgcctcggcctccccagtagctgggattacaggcatataccaccatgcccggctaatttttttgtatttttaatagagatgaggtttcaccatgttggccaggatggtcttgaactcctgacctcaggaatccacccaccttagcctccaaaaaagctgggattacaggcatgagccaccacgcccagcctttggtttgtttgtttgattttggagacggagtctagctctgtcgcccaggctggagtgcaatggcgtgatctcggctcactgcaacctccacctcctgggttcaagcgattctcctgcctcagcccccctagtagctgggattataggcgcacaccaccatgcctggctaatttttgtattttttagtagagacagggtttcaccatgttggtcaggcttgtctcgaacccctgacctcaggtgatccacctgccttggcctcccaaagtgctgggattacaggcgtgaaccaccgcacccggccgcattcagttttttaaaatttaatttagaaacatgattaattttttgtacagttgggatctcactgtgttgcccaggctggtctcaaactcaagaccaggaggttcaggccatccttcagccttggcctcccaaagtgctaggattacagatgtgagccactgtgcccagcttctcttcagcatttaaagctaccatctgacatatcagatattttattttattttattttttgagacggagtctctctctcttgccaaggctggagtgcagtggcacgatctcggctcactgcaacctctgcctcccgggttcaagcgattcttctgcctcagcctcctgattagttgggattacaggcacctgccaccatgcccagctaattttttttgtatttttagtagagacgggggtttcaccatgttggccaggatggtctcgaactcctgacctcaaggaatcctcccgcctcagcctcccaaaatgttgggattacaggcttgagccccagccccctgctgatatttcatttcatcttttgtcctgtttgtccccaggactggaggaatgtcagctccaggagggtgggggctgttcccctgctctgtccccatgcccagtgtccagggcacagtgcctggcatacagcaggtgcccagtgatctttggtgaggaatgaacggatgtccaggtcacagatgaaggaggagaccccaggcaccaggaggcgttggtaaaaatccgctgg

SEQ ID NO: 1560414 - DNA, 4001 bp, Homo sapiens
gcctgaccaacatggtgaaatccccgtctctactaaaaatccaaaaattagccaggcatggtggagtgcgcctgtagtcccagctactcgagaggctgaggcgggagaatcgcttgaacccgggagacggaggttgtagtgagccgagatcatgccactgcatctcagcctgggtgacagagtgagactccgtctcgaaacaaacaaacaaaccaccacccaacaacttgaatctgggcaagcgggacagtcttgaaactctctttgcgctgagggaagcctcccccccccaccccgagacagagtctcactctgtcacccaagttagagtgcagtggcgcgatctcggctcaccgcaacctctgcctcccgggctcaagcgattctcctgcctcagccttccgagtagctgggattacaggcggccgccaccacgcccggctaatttttgtattttttttagtagagagggagtttcaccatgttggccaggctggtctcgaactcctggcctcaagtgatccacccgcttcggcctcccaaagtgctgggattacaggcgtgagcgacagcgccctgacgacggaagccctaaaaccgtccccatacctccctccaagcctggagctcctctggctcctcgcttcctcacctccgccctctggagcagcagcccgcacagtgagagccgcagcagcagctgcaggatcggagaggtagtcatcgtgagggcggcgaagggtctggttcgtgcaggggcgatcaggcctggagggtcccagggcaaggtcagcacctctgccctcctactccaaccccagcgtcaccccgcctcagggattcacacacaggggcagacggctggggagccgtatacacgcgggactccgaggcagcgcacccgctcccgcaactcccaggcgtgatgatctggggggagggagaggcacgcggagtgggtggaactccggtggtgggcggggccccttaagtgattccccggcctcccctgactgttgttggggcagcaaaggtggaaggggggggtgtttgctgagcgggcggttgccctagagctacgctgggcggaagtgtcagtgtcaccgaagtctggacctacagactcctgggaacccggggaccgccttggagaggagggggtagaaaccgtcagcctagaccccttttctatggggaactgaaaaacttgaaggttttcagtaccccctagtggggtacttgaaacgcccatctgagttcccacagcctggtggagaacttgaaacgcccatccgagctcccactctccaagcccaaagggttttctagcacacataggaacctgaccttacaaaactttccccgctgggggtagataaagcccagagtaagtggaacaaccctttcccagcatccaaatacttagggactagagaagcgacagatccggggttagatgtgcagatgcctggaaatcggtctaacgcccgacacccactcacccgcgcccccgcggctccacgtagagaaagacggaagcagagaggatctcaggtcgagcctcagaaggacagacaacggcgtcacagacacaagagacagaaatgtaaagactgagaggcgcagagacggagggacagaatgagacccccagccagagaccagagaaaaacaaacagagaaagagacgcagatgtgggctaggagacaaagaagaggcagagacgtggagggagacagagcaggggaaagagaagttatctagcagctaaccagagatggaaacacgcagacagagacatcaagagacagagatgagcagagatggtggtgggcacagagacagagagacaaaggcagggcagagaagcagagagggagagtgccagagacttgagaggtcaagggggggcagggagaatgggctgggattggggagccctcacctgtccccagtcctgctcctggtcacttgctcctgcagcccctgccaccgctgcctccaactgccttgtctcggctctgggagaggtgacaggcgctggcagcccggggtgatgggagggggcggggccaaggcgggacagggaacggaagcggggagctctggggcagagagccgagcagggggcagtcatcaaggtcatgagggagggcagttactgaattgtccttatcgtcctgaggacccctgcaccaagtgtgtacaatctctcatgctgtcccacccacaggtacccgcccccaccgccactcattcccagagcctcagtcactcaatcaaacatgcagtgtcacacacaatcccataggctgagccatggaaaggcacagtcacagaacctcacaagctgttactcacacagtcacacattcagtcacacccatacagtcccatggtcacacccagacagccacagtctctcactcacaggtggacagtcatccactgtgacacacagtcatgtacccagggctatggactcctgcacacacacagtaacgctcacagtgtctcacagttccaacaacactgtcaatcacccacacattcacgcaatcaccgggtttcatcacaaacactgttgccctgctagcctgtgtggcccaggagggtagagccaggacatctgggtcaccactgggtccccaaaatcgttaagagcaggggttcaaggaaggattgtcatgaaataaatatacgcagtatgcagttgtgtggttactcgcagacatagaattttttttttttgagacagagtcttcctctgttgctgaggctggagtacagaagcatgatctcagctcactgcaacctccgcctcctgggttcaagcaattctcccaccgcagcctcccaagtagctgggattccaggcacacaccaccacaaccgactaatttttgtatttttagtagagacggtgtttcaccatgttgcccaggctggtctcaaactcctgacctcaggtgttccacatgtcttggccttccaaagtggtgggattacaggcgacagccaccacacccggcccatacaatcctttttacattttatttatttatttatttatgagagtggagtgcactggaacaattatagctcactgcagcctccacttcctgggctcaagggatcctcttaactcagcctcttgactagctgggactatgggcatgagccaccatgccccaccattttattaaaaaataatttcaacttttttttttttgagacagggtctcactctgtcacccaggatggagtgcagtggcgccatcttggctcacttcaacctccgcctccagggttcaggagattctcctgcctcagcctcccgagtagctgggactacaggtgtgtgccaccacacccagctaaaatttttgtatttttagtagagatggggtttcaccatgttggccatgctggtctccaactcttggcctcaagcaatcctcctgcctcggcctcccaaagtgctgggactacagggatgtgccatcacacccagcctcaacttttatttatttatttattcatttattttaattcattttatttattattttttctagacagggtctcactctgtcacccaggctggagtgcagtggcgccaacttggcaacctctgcctcttgggttcaggcgattctcatgcctcaaccaccagagtagctgggactacaggtgtatgccaccacgcctggctgatttttatatttttagtagagatgaggtttcaccatgttggccatattgttctccaactcctggcctcaagtgatcctcccgccttggcctcccaaagtgctgggattacaggtatgaaccaccgcgcctggccttaacttttattttagattcagggggcacatgtgcaggtttgtcacgggggtgtattgcacgatgcggaggttgggggtataaatgatcccatcatccaggtagtgagcatggcacccaacgggtagttttttaacccttgtctccttcc

SEQ ID NO: 1560415 - DNA, 4001 bp, Homo sapiens
tccctccctccgggtgcccgcggcctggctgccctccgcaggggcccggggaggccgcaggcccagctcgtccgggctcaccccggggaaagggctgcctttgtctaaaggtcaccacccgagcgcggtgccccggccgggcctggtgcctcccgttcccaggccgaggggtaggagatggggggccgccccgaacctcgggaagtgacaggaggcgctcaccccccccacccccgtaacggccccctccgggatgagcctcagctgggggtgggggagggggtcacctccctctattgccgggggctgggggtcaagtcaactcctttcattgtttaggggcggtgcgaaggggggagccccggtggcctccttccccatccatccctccccagctttccagggccccccactgtccgcgacacccacgggagggatttggggagggggcgcaggggccgagcgaggcggggagatgcaggctctccgcctccggccgggagatcaccgcccgctgcccggtggccttcgccttccccgaaaggcggggagcggggcgaggggagggggccgggacggggagggggtctccgcgcccctccccccgtggaacgttaggtctcctctctccgccgctccattgtatccccggcagccggcgggagggccggggaggcactgggcgccgggtctgggcagggaagccggttgggggggggtccccataggatcggggcggcggcggtggtggaagagacgcggggctgggggtgccggtggcggtgggcgccgagcaggaaaaaaaaaaaaaaaaaaaaaaggaggcagcgggcgctgcgccccggctggggggctgagtgtgagagtgtcgcgggggtgggttcggccccggctccggctccccccacacacaccctcgccgccaacccccactcccccctcgcttttgcgccctgtcacagccccgactcgcaggtagagagagttaagagatttaaagagaaattgctacattgtgagaaactcaccctgatgtttgagcagccgtcggcgcggggtctccgagacggccccgcacgggctgcaaagggaggacccagaaggggccggccggccgggccggtcagcgcactgcctgatcgcatggcggccgctcggcagccgctgccgggcccccgccgccgccccgcgcccaggcccgcgcgccccgggcccgcgcccgttccggggagcgcccctcgggtatgcaaaaaaaaaaaaaattttttttaattaaatgcaaacggaaaaaaaaaaaaaaaaacctctcaggttttgtgttccgccccccacccccttcctcctcctcctcctcctcctcttccctccgccctcgccggaggaggggcttcaggaatccccgccccgcgtccgggcggaccagccccggccccgccaggccgagcggcgggacccggagccaatgggaggctgcggacgtccggggactgggccctccgcgccggcgccgcccccgcccccagccccagtcccgggggttcaggggcgcgcctgctcgagctcgggtgtagtttgtcgactgcctcgagccctgatccggatgctggggcgcgggggagctgaagggatccgcgctcccagaccgccggtccggctggggagggggcgccgtgcgtcctgggcgcgtcccctgaggcggaggacggtcgtccggcgggaggacgcgtccagggggagcgccgcaggtccgaaaagatagcgggagtcgaggatgaaggaaatggaggggatggaggggagttccccccggaggtgggaccgcgccggagcccagagttggagcctgacagggtggaaggcggcggggacttcggggtgacaggccgggaccccaggcgtggctcgatcactcaccctagctggtctccgtcgagccacggcggcgccggggaggcgggtcgggcctgcctcggagcctgtccccggccgctctggccgcgctgatgggattcccagaagccccaggacgccgcggtggtgtcgggtccgtttccgccccaccaggccgtaaacgccctgctggcgggacacggattcacgcgttgcccttagcgagcgcttggtgagcgcccactgtgtgcgctgcgcagtgctgggggcccagtggggacacagagcccccggacctgccctcccgatgcttgcagcccagggagatttatactttgttttagtcccttctgcctccccagtgccctagaaaagctcgtgcacacagtaggtgaatgcgggttgaataaatgagtaatcgagacagattgtgattttgttgttgttgtgttatattttgttttgttttgagacggagtttcgctctttcgcccaggctggagtgcagtggcacgatctaggctcaccgcaacctccgtcccctgggttcaagctattctcggcctcccaaagtgcccggcctctgtttttttaagccttaacatgtgttctagtatcttggcggtactacccataatatttacttcaacgtattttttttttttataatttatcggccaggcgcagtggctcacacctgtaatcccaacactttgggaggccgaggagggtagatcacctgaggtcaggagttcgagaccagcctggccaacatggtgaaaccccttctctactaataatacaaaacttagctgggtgtggtggtgcacgcctgtaatcccagctgcttgggaggctgaggcaggagaatcgcttgaatccggaaggcagaggttgcagtgagccgagatcacaccattgcactccagcctgggcgacaagagggaaactctgtctcaaaaatagtaataataataataatttatccagcctgggcaacatagcgagaccctgtccaaacaaaaattagcccagcatggtggtgtgtgcttgtactcccagctacttgggaggctgaggcaggaggatcgcttgagtccaggaagtcgaggttgtagttccccatagtcatgccactgcactccagtctgggagacagcaagaccctgtctcaaaaaaaaaaagaagaagaagaaattaattttgagagaccacagagggtaagggccctgactgaaaccagtcagcccctggttcatatcctgcctttgccactttcttgctgtgtgacagtggacaaattacctcacctctgtgtgtcctcatctttaacatgctgataataataggcctcatttcatagggtcatgaggaagaatgagctagggagagctgcacctgagaggaagtgccatataaatgctggccgttatcattagtaagtaaacaggaagttatcagttccacaagtgaataccttatgcaatgtcccaaacataaaagcatgatagatctataacttagtacagtggtgttcaccgcaatgctatttacaatagcaaagacatggaatcaactcaggtgcccaccaacagtggattggataaagaaaatgtgataaatgtacaccatggaatactatgcagtcataaaaaagaatgaagcctggtgcggtggctcacacctgtaattccagcactttgggaggccgaggcaggtggatcacttgaggtcaggagttggagaccagcctggccagcaaagggaaaccccatctctactgaaaatacaaaaattatttgggtgtggtggcaggcacctgtagtcccagctactcgggaggctgaggcaagggaattacttgagcctgggaggcggaggttgcagtgagccgagatagcgccgttgcactccaggctgggcaacagagcaagactctgtctcaaaaataaataaataaataaataatgaaataatgtcctttgcagcaacacagatgcagctggaggtcattatcctaagcaaactgacacaggaacagataaccaaatacctcatcttctcacttataagtgggaggtaaacattgggtatgcatggacatgaagatg

SEQ ID NO: 1560416 - DNA, 4001 bp, Homo sapiens
ccaagtagctgggattacaggtgcccgccaccacaactggctaatttttgtatttttagcagagacggggtttcaccatcttggccaggctggtctcgaactcctgacctcaggtgatctgcctgcctgagcctcccaaagtactgggaatacaggcgtgactcaccgcaaccggcaggactgagttaagcaggtccttgacttgcttttctgcaagctaaaaagagatcctttaatgtgtttctaacttattcatcaaggcagactcccagcagcttatctgtgcatggagatcactgacatctcaaaagaaaaacctgccttctctaagttcgtctccagcttgctttctgcccatttgaggtccccttgtttatattaaggttgacctgtttccgcagatatttgccttccaagccacatcattaacacagatctcagaggctaccgtaagctgactaacaatgaataaccgccattccacaccacaaaagcctctcctcacctttttccttggagccagtgtccacgaagaagagtttttcatttggggcctctgacaacaagccactgggggacagaaatgcagaacatcagccagagatgttggagaggaaagagatttaacctggcaggtccagccttcatcttccgcttagtcaagtcccgccaccggactcttccaggctaaggcttcgcccagcagtttacagaacttagtatttaggaaggactgccaggcgcagtggctcacgcctgtaatcccagcactttgggaggcccaggcgggtggctcacctgaggtcaggagttcaagagcagcctggccaacatggtgaaaccctgcctttactaaaaatacaaaaattaggctgggtgtggtggctcacacctgtaatcttagcaccttagggggccggggcgggtggatcacctaaggtcaggagttcaagaccagcctggcctgtaacatggcaaaaccctgtctctactaaaaatacaaaaattagccggacgtggtggtgcatgcctgtaatcccagctacttgggaggctgaagcaggagaatcacttgaacccaggaggcagaggttgcagtgagccgagatcgtgccattgcactccagcctggactacagagaaagactccgtctcaaaaaaaaaagaaaaaagaaaagaaaagaaaaatagccgagcgtggtggcgcccgcctgtaatcccagctactaaggagctgaggcaggagaatcgcttgagcctgggaggcggaggttgcggtgagctgagatcgcgcctactccagcctgggcgatagagcgagactccgtctgaaaaacatatatatatacatatatatacacacacacatatacacatatatatatacacacatatacacatatatatacacacacatatatacatacacacacacacatatttagaaaacagcaagctaaggtggatgcatggaacgtatttatgctaaaaattattcattgtttacctaaaatccaaatttaattgagcgtcctgtatatttatctgctaaatctggtaactctatcaagctctccagcttcccatgctgagtcccctgcccatgctctccatttcctcggcggtccccgggacaggagcccccaacccccgacccccgacccccgacccccgacgagtccacgcaagcacgcctggccttgcacctgggcgcaggaaccgtcccacctcccggaagtcccgcccaacgtacccgctcgtgcgctcctgtagccgcacgtcttccaggaactggtcaacctccagccccagcggctcctgagcaagccgccgccagccccgcttcttatttcttgggcctcgccgccgccgcctcagcgctgggtccaccgaagtgggccgcagccccaggaaaccagaatcggcatcgcttttcgagctgcgcttcccaccaacgccactgcctcctgccgccatcttgtcaaaggaagaactcagccactggcgtcccaaaaagcccctttgcagcgtgcgcgcgcagatttcccaccctcttccgtgacgtacttcctgtggcagccatatttataaagtgactggagttgccaggaggctgccatcttggtaaaggataaatggctcctccttcctccattctttacagcgggatctgaagattcctaacggcggcgggtggtaggaaagagacgggaaggttgcaggttcttagctttcgcccttaagcgaacacctttcccggccgcctggggtctttgctcaaactgatttttttctttaatagataaggtctcactttgttgcccccaggctggagtgcagtggaagggtaatggctcactgcagcctccaactcctaagctcagggattctcctacctcagcctcccgagtagctgcgaccacagaagggtgcatccgcacctggctaattttttatttttattttttgtagaaatggagcctccccatgttgcccaggctggtctcaaacatctggtttcaagtgatcctccttcctaggcctcccaaagcgctgggattacaggctcacaccaccactcccggtccaaactgatgtgtgtgtgtttttttttaagagacaaaggtctcactatgttgtccaggctggtcttgaacccctgggctcaagtgattctccctcctcagcctccgaaaatgctaggattacagatgtgagccaccatgctcggcctgattattttttaatctcgttttcttagaaagtcagaaccgtcagtggcagattccgcacaacacacattccaatctcagaagttttgtcctctcaaatgttccaatcctaggatcttagaaatcaagtaactttcggaatatcaaagttggaagcacagaacattagaggaatgttagaaacatacacttttaggaccctagaagtgcagactcagaatcattcatcttgagcgggctacttcactgtgcctcagtttcctcatctgtaaaataaagatgataacagtacatctgcgtcataagtcatgcagaagattaaacatatgtaaagcgcttaaggctgcgtctggcatctgagtgttagctattgttactgccttgccctctgaggcttcatcttagaatcaactcatctttgtcatttacaaataaggaaggaagctcagaggctcttgggccctggcagccattcaaagggatccatggcagggcgtggtgattcacgcctctaatcccagcactttgggaggccgatgcaggaggatcgcttgagcccaggaattcaagaccagcctgggcaacatagtgagatcctgtgtctgccaaaaatttaaaaattagccaggcgtgatggtgtgcgcctgtagtcccaggtactcgggaggctgaggtgggaggatcgcttgagcccaggagttggagggtgcagtgagccgtgattgcaccattgcactccagcctgggtgacagagcaagaccctgtctcaaaaacaaaacaatcaaatcaaaggaatccaggcctcataaaagccactctggactcataaaggaaaaaggcacagagagggcaggcgacacacgcatggtcacacagcgaaattcaactggatccttgcgcagagcgttggaaaggtgacaggccctaaaggtgacaggccctggatcgcagccccgagacctgagcgccgaatcacctgggcagggattttggcgaccacagcctatctgttttctgagcgtccgccagggggcgccgcgagccgcgaaactgggcccgcgtgggcgggatgagtgcgcggccagcgtgtcccgggacgccgtgggtgtggcctggatgtgagtgcgcgggactcggcgcgcacggtgcgctgcccagctctggccaagagtccccggtgcgtgagcgcgcgcacactcctggcagcccgtgtgggcaaggtcaccacttccccaaccagaaaccagcgtgttcctggtgttacgcgt

SEQ ID NO: 1560417 - DNA, 4001 bp, Homo sapiens
gctcactgcaagctccgcctccggggttcacgccattctcctgcctcagcctcccgagtagctgggactacaggcacccgccaccacacccagctaattttttgaatttttagtagagacggggtttcaccatgttagccaggatggtctcgatctcctgaccttgtgatccgcccgcctcagcctcccaaagtgctgagattacaggcgtgagccacggcacccagccgagatggggtcttgctttgttgcccaggttggtctcaaaactcccagcctcaagcaaccctcccacctcagcctcctgtgtagctgagatcacaggtgcacaccactgtgcttggctaatttttgtatttttagtagagttagggtgttaccatgttgcccaggctggtcttaaactcctgggctcaagtgatcctcctgcctcagcctcccaaagcgctgggattacaggcatgagccaccatgcctggctagctttttaacttatatggaaactctttcatttaaatgccaataaagcattattatcatcattattaagatcatcatcaccttattgagcacatactaagtgccaggccttgttctaaacccattacaagaattaaatcactggatgtaaaaacaagcctatgagataagtactattctccccatttcacagatgaggaaatagagacacaaacaggcaaagtctcttgctgggggtcatgagtgagctagaacttgatctccagggttttttgtttttttgttttttgtttttgtttttgagacagagtcttgctctgtggttcagactgaagtgtagtggcacaatctcggctcactacagcctccatctcccgggttccagcgattctcctgcctcggcctcccaagtagctgtgattacaggtgcccaccaccatgcctagctaactttttatatttttagtacagatggggtttcaccatgtttgccaggctggtcttgaactcccaacctcaggtgatccacctgcctcggcctcccaaagtgctgggattacaggcatgagccactgtgctcggccaatctccaggtctttctacccccatgccaggctcttcatatcagttccaaccacttggttctcccagtctcaccctgtacctcccagtcccaatcaccccagcccatcacctgaaattcttcctccagcaccaccatctgccggtctttgtccaccttcactggggaggggtggcacacagggattagacactccccctgatccatgggggacacaagcccagccctccctatctgccctcaccaccgccctcccatccttctgtgggggaagatgtcactcacttatgatggctgcattgtctgtctcttttcggaagcggaatttcctcagcttttctgttagctctgggtctacctcgcacaccaccagggagtcagactgccggagggacccaggaagagctgaaatggcctggcctcagccctcaccccttccccaaacctgtttctccatccactaatgaagaggagcatcgcgccggcccatctgatgcctttgtgaacattgagaaaaggcacccttcccacagagtagatacccctcaccagggcactcagcttggggggcggagcagaggctgggttcccgccttctccacggggactcttgggggacactcaaggaggtgcagagatccacttcctgagcctaaacccagagccactgtctctctgttcttccagccgggctgttcaccacagttgggcccccttcccggcccgtgacctccatcccatagcctgaccttcgcccaggtgtcctccaagccccagccccaaccccagccccagctcttcccatagaacccctggcccctgaccatgattgttctgtccacaggcctcttcttttcttagttccgctgtcttctaggcgtggggaccggggctgtaggggggcgggctgtgcagtaggaggaaggtttcatccaacaccacatcctgtttatgccctttctgggacaactgtcacagagggctcctccccctccttccttcccctcatctgccaggacctgtcaggaaatcgctcagaccagggttccaaagcttccttgctgtgtgaccctagctaagtaacttcacccctctgatttgagattgtggtgaggatataaatagcttcacatcggccgggcatggtggctcacacctgtaatgccagcactttgggaggccgaggcgggcggatcacctgaggtcaggagttggagaccagcctgaccaacatggcaaaaccccatctctactaaaaatacaaaatattagcctggcatggtggtgcacgcctgtgatcccagctactcgggagtctgaggcacaagaattgcttgaatccgagcagcagaggttgcagtgagccaagatcacatcattgcactctatcccaggcaataaaaatacaaataaataaaaataaataaataaatagcttcacatagctgccagcatggcagacacaataggtactaaaaacgaactattttgctcctcccctcctccaggtggccttcctagatttacccccatctgggatatttgaattgcagggctggaaaaggggagtttagtcttttgctggtcagactgacgcccattatgtcaatggcaaaatggggaccagaggggcaaccccacagtgcctgggtaatggtgacttttttcctgcacttttccaacctcactagccttgcaatgacctatgaggccctacaacaagggagttcaatcccgtcagaccggtacccaattttttttttttgagacagggtctcactctgtcgcccaggctggagtgcagtggtgcgatctcagctcactgcaacctccgcctcccaggttcaagccattctccggcctcagcctcccaagtagctgggactacaggcacgtgccactacgcccggctaatttttgtatttttagtagagatggggtttcaccatgttggccatgttggtctcgaactcctgacctcaaatgatccacctgcctcagcctccgaaagtgctgggattccaggtgtgagccactgtgagccaccatgcccggctattttttttattgagtatttttgcactgcccccttttcccatcccgaaataaaattcctagataatataacctacttacacacataaattcaaaaaaaaatcaatataatgtcctgactgtcatataaagaagaaataaaaggaatgtagttcacacaaaaaccatatgtatttcagtgagaagataaaagcaaacaaaagacaatttccacagggtcctaggccaactgtgactggcccacttccctccatggtgggcaaaccccggaccctacactggactctaccccttcacctacatctctgcagctgtcctctctctccctcttgtctcaccaacgtccccatgcctcctggatctttctccttagcctccatgcagtgttacttcttccatcttaatttttttcttttctttttttcttttattttgagacagggtctcattctgttacccaggctggagtgcagcggtgtaatcatggctcactgcagtctccaactcctgggctcaagccaccttcccaccttggcctcctaggtagctgggactataggcacgcaacaccatgcctggccaattttacttttgatttttatagagacaggatctcgctatgtggcccaggctggcctcaaactcctggcctcaagcgatcctcctgcctcagcctcctggtgtgcagggattacaggcgtgagtcactgtgtctggcctcttccatcttaaaaacataaaactgtatctcctgtccagctgctgctcactcatttccttcccttttctgcaagatttctcaaaagaggccgggcgtggtggctcatgcctgtaatcccagcactttgggaggccaaggcgggtggatcacgaggtcaggaga

SEQ ID NO: 1560418 - DNA, 4001 bp, Homo sapiens
ggctgggactgagatctgttgtgtgtactgccatattcccaaaacctaaacgatgccttgcatggaacaggggatcagtggtgatttgttgaaggaaagactcctgtctgtccccactgtcctggcctccagacccccctacctgtgaggggtacaggaccctctggggaggggccgctccaacagctggcttcgttggtctgtgcgggagggagacagtattcagaagcaaacagggcaggggcctggccttcctaaggccccctctgcttgaggtcttcctccctgttcccctactccccactcacaacagtggctgtaggggtcttgtcaggttctgggtcttctgagagtagagggtctccagccagcatctcaagggtcctgggggataaaggtgtgtcaggatgccaccttacacccagtctgtcctgccaaggggtgctggggaccttagggttgtttgtggcaaacatcacctctgtggcatctcttgtgtctgggaggtctgaagaatggtgttttgggggaatcaggtgagttttttttaaataggacttgaaaaagcatctgaagggccccagataactttgaggttcatagagtgggattatagggatcgcaaatattttaaggggttacaaggatatgtaggggttctaggaccactttggggatttccagtctatttagggggacacttttaggataccgaggcattttggagggtcccatcctagacttctctggttattaggtatgtaggtccagatgttacaggttccaaatgggactgcaaggcacctaaatggttaggggcttggggcatcttggcaggatttgggggtgatccaggctcagactcacacgttccccagtgagatttcgaggttgtccaggctccggaagatgtcactgtacctcttcctgccctcaggacctggggggagtcctaggggaggggagtgtaatacatgggctaaccactgcctccctccacccacggcacctcaaccagtctcatttggagggggtggaagagaaagggaagagtgagagagagaaagagagggctggggggggcttggttggggccaactcgaggcaggcagatggactcacacaccaccagagaccagagacagctgctcggggaacagagacacccactccctgggtctgcctgcacccagaagcaaaccaacaaaacagatgccccagatgcaaccaggctgtcccgagaagaaagccggtctgacaatggaaccacgggctagacagatggaaatacacaagggacagccaggcagagcctggggcagaaacacacatggagagactgaagccgtgagggacataaagaccgaatgacactccacatacacaacacagacacaaagacggccggaaacaccaagtcggaccccgccacatttctactgctgcccccctgccccctctcctaaggggcctagaccagcactgccgactccccagggctacagaggggccctgtggggatcctaccgcgttgccctctccctcagcagtcgtggcaccctgcccccatcacaaaaatcagaagcagaagcagtcacttccccttcctgggccccctcccccaggcgtctggggtgagggatcaaaagggggagggggagtgaagggctggggtcctgaacccatccgggcacagggctccccacaatggaggatccctgggtccttcccattcaggaactcctctcctggctctcaggacggagcgggacaagtgtgtgccctcaatgtaggaagcaggggatggtcgggggaggcccctcccggatccccgaccccctacccggctctgctgcgtccatatctgggcccggggatcgctctgcagggaccgggatggggatggggtcgcgcgccggcggggccgagccccgatttcctgccgccgcagccgccgccgccgcctcggttccgcgtcgccctgcccagcggaggccacgcccccgcatcagaccacgcccccgtagcccggaagccttgatagtgcccttctctacctgagccgcttgaaactgggtcgggccagggccccctgagcgaccactcgaggctgcagtgcccctgacctgggcatcctaagacttcatctgggccataggttccctctcagatctttgtgctaccccaaatcccacggagccccagccccctcctccctgaatggttgcagagtccacctgtcccggggggcctctcccaggagctcccacaacccgcgaccctggtgatccccttgcccaggttgtctctcggagccctgaaaccacctgggcctcgctggagccatggcgccccctggtggaggcctgatattctgtccgattccaaccaaaattctaatactcgggctggagaacccctggcctgggggacgccccttccgtgaccctcaaagctggatcaggctcaaggccccaattacagcacaccagggagcagcccttttaggtagggagtggaggtttgtccaaaagcaccagctctggggttgccacaagccgcctgttataaaaatgctcccacccccagcacagtggaattttggggctggaaatagactttaaagtatgtttataactttgtgtccaaaggctttggctgttaaggaggcaaggattctctgactggctccgtgctgcctactctgcagttcttgagttgtgatgagtgagtccattgaaaggaataacactatcaacctaagagccaagccaggtttccaggtcacatcctggctgatgctcagccagagctccctgactgtgacatgagatggtagagcagcgcaggcccccaaagagcatgacagagtcagtacttgtttgtttttcttttgagttggagtctcgctctgttgcccaggctggagtgcagtggcgttatctcggctcactgcaagctccacctcctgggttcacgccattctcctgcctcagcctcccgagtaactgggactacaggcactcgccaccatgcctggctaattttttgtatttttagtagagatggggtttcactgtgttagccaggatggtctcgatctcctgaccttgtgatgggcccgccttggcctcccaaagtgctgggattacaggcttgagccaccggacagagtcaatacttgtaatgatgcagatcatattcctcaagtctcagacaccacccgagagaaaggcatgctgttatgtattatgggaaagaaaaaaatatcacacatcctaaggcttctctcagcacctgagttgttaaaatgtgaaagagacctcagaaatatgggggtgcttgttaaactagaaaatatgcactgaattctctgggcagggacaagtccatgttcaagtgctgaaagtgccagagggtttcaccaacatcacacgcctgtggggagggtgctgggaccttcctcagtgaccctctgtccccgagcccccagcaaacaccgtgtggcacagacgaggtggaggcagggctttttaaaatctcagatgctgctttatttaccaaaggtgctggcttggggctggttctgctggccaagccagcggatggctgtgggggtcccagctcagtcttccaagggcgagactgtacagccttgctgtggggggttgggggcagggttccctcccggggccctgttggggttcccgcccagcggcagccagggtgggcagtgggtaccagcactgccatctcaggaaggcactttcagcttcggggtccccaggaagaactgcaggacgcggtcggccaggagcgccaggcagaagtccaggagcaggacctgggcaatgaccagcttgaactgtcggggcagggagggatggtgagctggagacctgcagcccagctcagggtcactgccataggagggacccatcaagctgagccccagggtcacctccacagggccactgacctccacagggatgtccacgagg

SEQ ID NO: 1560419 - DNA, 4001 bp, Homo sapiens
atccaaacaaagtccacgacccactacaaaagccagccagtgccactctgtgcaaagtgccaccacgcgggccgcactgcacatttcctccaaacgtgaggaccacggctctgcctacccgcggccccctggaaagatggcccattttagaacccttaggtaaatcaaaacacaagtttggggaaaaaaatcaggaaggcgtttcatccaaggcacctctgtaacccgggacacggagggccctaagaggctcacggcaggagaggcaacgtgttccccacacaacatgcgacctgcctcctccccaagagccaccgccaccagcacgccccctcctccgtcaccgctgcctctcacgcatttccgaccttccccaccgccccgcccccggcccaggagctaacctaggagctcgggagggcaggggcggggcagggcaagagcttctgttttgtaaaccactgaaggggcccttatttggagtgacaacactttacagctggcccgactggctccctgcagcaggtgtgccttggggagaaggaggttcaccagcaaaccttctccaggacggtggggaggagccggcaggtggggggctgctctcaacgaggactcagcgtggctcccaccaggactctaaggaagggggcgggggaggctgccgagatagctgcttgggacaacaagcaaaggctccctcaggtgtcaaccgccccaccctcagctgagcggaaccctgaggagaggaaagactgtctttttcccacagggtgcattccagccaagaggagtacggggtttcccggaacaggaaggcaggagaatggccctgaagggaatgtggggataggggacacggaggagtcttcggggggatgggggggtgtacagggcctgcatggagggtacagggcctgcatggagtgtacagggctctgcctggagggaagggtcaacgcggggccctgagcagtgaggggtgagtgtgccctgtgggttacagcccaaaggtctggccctgaaggggtagcgaggggtgggtactccggtggggtaaggtcagaaggtccctgtgcagggagggactggtcccttgagaaggaacagagggcaaatcctgaagagtcctggaggcccaatgtagacagcagaagctgggagctgacctaggagtgatcgggggcctgatccagacaggacagacacaggctgacaccggagagtcccaggtgccaacatgaacagttaaggcaggggctgaccccaaagaaatcaggggcccgcagctgaccccggagggtcccaggtgccgacctagacagcaaaggcagggctgaccccagagggtcccgagccgacccagacgacacaggcagggctgatcccggagggccccgccccgacccggacaggcagtgaaggcacaggcagggctgacactcgagggtcccgcgacccggacaggcagggaaggcacaggcagggctgaccccggagggtctcgcgacccggacggcacaggcagggctgaccccggagggtcccggcccgacccggacaggcagggcaggcacaggcagggcagggcccgcagccggcaggcccgggggccgcactcaccgagcagcagcagcttgagctcgcgccgggcgtcgcgcttgtcccgccgcagctgcttctcgatctcggcgttgatccgcttggactccttcacctcatcgctcaggcaacacgccatcatggactccagagtcatcgtcccggccccggccgacgcggccgcctgcccgccgccgccccccggcccccggcccggccctggccggagccgcctcggccgccgcccgccgcggccctccggcctcggccaccggccctcggccccgggccggcccgccccgcctcggccgccgcctggcgagccgccgggtccccgctcgggccgcgccagccgcggactcccgcgcggccgcactcagcccgcgccgccgccgcagccaccgccaaccgcagccgccgcaaccgagcgacagcgccggacaacctagcaggctgggagcgcagcccgcgacgggcagacggtgcggccaatgggaggggccggcggccaagcgcgcccaccatgggggcgggactagcggcctgggcggggcgtcggcgggcgcgaaaggggcggggcggggcgagggcggggggcccgcgggtttggttgcgccgacgtgggaagggggacgcgcagccgggagccggggcggggccgcccgggattgtgggaatgtggcggactcggcccggccaggctcggctccgctcggctccgttcggccccgctcggtcccgctcggctcggcccaggcgcggtggcggaggcgcgcacgcggccgctgcgctctctgggtctccaggtgcctgggcagcagtcgctgcccccgggaagcgccctgacattgcctgacaggaaccttcactcatccattaaaaagcgttaatggaggtcgggcgcggtggctcacgcctgtaatcccagcactttggaaggccgaggcgggcggatcacctgaggtctggagttcgagaccagcctgaccaacagggagaaacgccgtctctactaaaactacaaaattagcccggcgtggtggtgcacgcccgtaatcccagctactcgggaggctgaggcaggagaatcacttgaacccaggaggcggaggttgcagtgagccgagatcacgccattgcactccagcctgggcaacaagaacgaaactccgtctccaaagaaaaaaaaaaaaaaagagggccgggcgcggtggctcacgcctgtaatcccagcactttgggaggccgaggcgggtggatcacgaggtcaggagatcgagactatcctggctgacacggtgaaaccccgtctctactaaaaatacaaaaaattagccgggcgtggtggcgggcgcctgtagtcccagctactcgggaggctgaggcaggagaatggcgtgaacccgggagacggaacttgcagtgagctgagatcatgccactgcactccagcctgggcgacagagcgagactctgtctcaaaaaaaaaaattaaaaagcgttaatgggacacctactgtgtatcaggcattaatgggacacattctatatgccaggcacggaccagagattaatggagtgcctgctgtccatcaggtgtcaatcaggccttactgcagtgcctgcaccattccaggccaggtatacgcattcatgaaatgcctacaggataccaggcactgctgtaagcccgttaagctaaccctacccaagggatatcttttttttcttcttctttttttgagatggagtcttgctctgtcgcccaggctggagtgcaggggcgtgatctaggttcattgcaccctctgcctcacaggctctagtgattctcctgcctcaccctcccaagtagctgggattacaggcgcgccaccatgcctggctaattttgtatttttagtagagagcgggtttcgccacgttggccaggctggtctcaaactcctggcctctagtgatctgccctcctcggcctcccaaagcgctgggattatagatgtgagccacctcacccagccatatctttatccttactttgcagatgaaatggaagtggccaccagaatttataaaaacgtgtgttcccaccaccttgctgactactgaaaacccttttccctctctggcctccttggccaacccctgagcatcctctccgtttcaattcagacgtcagctcctcagggagacttctcctgactcctcagaccaagccaggtaccttctcttgagccacaacttgaaattgtatgttctggccaggtgcggcagctcctgccggtaatcccagtacttgggaggccaaggcaggtggaccgcttgagctcaggagttcgagaccagcctagataacatggcgaaaccccatctctactaaaaatacaaaaaattagatg

SEQ ID NO: 1560420 - DNA, 4001 bp, Homo sapiens
cttggcgtcccaaagtgctgggattacaggcatgatttatttatttattttatttatatttatttatttattgacaatgagtcttgctctgtcatccaggctggagtgcagtggcccgatctcagctcactgcaacctctgcctcctgggttcaagcgattctcatgcctcagcctcccgagtagctgggattatagctgtgtgccaccatgcccagctaatttttggttttgtttgtttgtttatttgtttgagatggcgtctcactctgtcgccagtctggagtgcagtggcatgatctcagctcactgcagtctccacctcctggtttcatgcaattcccctgcctcagcctcccgagtagcagggactacaggcacgcaccaccacatctggctaatttttggtattttggtagagatggggtttcaccgtgttggtcaggctggtctcgatctcccgaccttgtgatccacccacctcggcctcccaaagtgctgggattacaggcatgagccaccatgcctggcaaatttttggtattttagtagagacggggcttcaccatgttggcctggctgtgtcttgaactcctgacctcaagtgatcccacccgcctgggcctcccaaagtgctgaaatcacaggcttgagccactgcacccagccagagttcagaatcttgaaccgttactgacgtcgactcccccatctgaagcctccgcatggaagccatcaccctgttttgttttctcctagataattcttgttgccagaattattttatctgcttatgagtttacagactaaatgtcttggctccttcacaggaaatgagatccaggaagacagaaatatcttcccctgtttggctgcctcgttcctgggagctacccaataaatcttaaatgaatgaataatgaatgaatgaaccaatgaaccaatcaatccatcctttctagcccccaaaggagccctagacaagccctctccagccatggcagggaggtaaaggcgagagggagcgtcctggtgaaggagaggctggagccggcccctcccttacgggtgggctggccagaacgggttgcacacctgagctcatcattccctcgccatgacacagacaggtagggcgtgctgggcctgcccggcaggggcccggtagagccacgtctgctattgtatatgccccacacagtggacaggcctgggcacctggccgctggtcgcacgttggacaaggaacttggcttctctgaacctcagtctttctcatctggaaaatgggttccaggctccccattccctgggaggaggcgacggctccacgatgccaatgtctgacctagcctgatccgcctccttgccccgacacccctgccggctggccaccgcccactgcccaccacccaccgcccaccgaccctggactcacccaaaagcagcagcttcagctccccgcggtcctgcttcttctgctccaagaggatcctgttgatctcctggtccacccgggcggcggccttctcatcctccgtcaggcaccaggggcagcagcgccaggtcagcgagcgggccatggtgcggtggcctcagtcggcaccgggtggcatcgcccccgggcccctgctggccagggcaacccccagcccagccggccctggagagggctccgggcaaccgggtgcgcagggaggctgccttttccttgggggtcaccccccagggacctagacttccttgcctgaaacacccaggaagcccggctcggcggtggcaaggcttgagtgctgggaacagggtggggacgggaggaggtggggaggccagggctccccgcccacctccagacctgctcagacccggcccgacaggttgacggtgaagggtgccaggagagggtgaggtgggggccccagggagggcggggcggtggcgggaaaacccccaccgcagactgggtcctgtgtgaccagcagggcccttcttcctccttctggagaaggggcggattctcctcaggcttcacccggagctgtccccctcctcggagccaatcaggaaccgtcagacccgtgctactgctgatacattatatatatatcatatatatatgtgtgtgtatatatatatatgtgtatatatatatatatatatatatatatatatatatatatatatatatatttttttttttttttttgagacagagtttcactcttattgcccaggctggagtgcagtggcaggatcttgactctgcaacatctgcctcccaggttcaagcaattctcctgcctcagcctctcgagtagctgggattacaggcatccaccaccacgccgggctaactttggatttttagtagagaaagggttccaccacgttggccaggctggtctcaaactcctgacctcaggtgatccacccgcctcggcctcccaaagtgctgggattgcaggcataaaccaccacgctcggcccttctgatatatttttaagaaacagctcaggccaggtgtcatggactgtttccagcgactctgccctgacctcaggtgatccaccctgcagaggtgggcagcttgcctgaggtcaggagttcgaaaccagcctggccaacatggcgaaaccctgtctctactaaagatacaaaaattagccgggttttggctcacattagctggttttacactcacatcaccctgtatagttactactgtcatccctgtttgactgatgaggaggttgaggcatagagcaggggagtgaccggtggggctggcacaaggcagagccgggagcctatccctcacctgcggggccccagagtctagacgcctaccaggcagattccaggcagggccatcccttcattgtgcgtgcattcatggagcgccaactgtgtgccaggcacggtagccaagagacacagatcccagacctccttacctaaggttctagttaaagaacagataataaaataaattttaggctgggcctggtggctcacgcatgtaatccctatactttgggaggccaaggcgggcagatcacaaagtcaagaaatcgagaccagcctggccaacacggcgaaaccccgtctctactaaaaatacaaaaattagccgggcgtggtggtgcacgcctgtagtcccacctacttgggaggctgaggcaagagaatcgcttgaacccgggaggcagaggtggcagtgagctgagatcgtgccactgcactccagcctggcgacgaagtgagactccatctcaaaaaaaataaaaaataaaagaataaaaaatttggccaggtgagtgcgggagctcacatctgtaatcaaagtactttgggaggccgaggcaggaggatcacttgaagtcaggagtttgagaccagcctggccaacatggagaaactccatctctactaatacaaaaattagttgggcatgttggcacgcaccagtagtcccagctacttgggaggctgaggcaagggaatcacttgaaccccgaagatggaggctgcagtgagccgagatcataacactgctctccagcctgggcaacatagtgaaaccctgtctccagaaacaaacaaaacaaaactctccctctctctctatgtatatatatacacacacacacatacatatatatacacatacatatatatacacaatatatagacacacatacatatatgtatatacacatacatatatacacatacatatatatacacaatatatagacacacatacatatatacacatacatatatacacacataaaagtatacattttaatatacatatatgtatattatacataaaaatatatatgtgtgtatatatatacacacacgtgtaaaatatatatattttttaatacacctgagcccgttggatggtgaaaaattctgccagaaaaattaagcagagatgttgttggggaaggttcaaggtcattgctctaaatggatcaacaaaggtcgca

SEQ ID NO: 1560421 - DNA, 4001 bp, Homo sapiens
atgatacagccaaatccgcagcgagaggctgggtcggaacacacacaggcgcacctcccagaggcccccgacactccatcaaggcaagatcgcagcatcccacgacgggaacaagtttgtgaacttggcatttgcctcgctgacacctagcaaccgtgtgaagacgcttagctggggatccgctgcctctgttcatcaagcctgtcttccaccgcccacctcccaacccctagcaacccccgctccccaggaaaaataaagtgccacccacgtcgctcaatagcaccgtcccaaaaactcccactttagttcctgaaaaattcagtcaccgacaggagcctttctccttcctgaagcgttctccttggcaccctatatcctagaaataaacctcaaaaagtattccgaactcccgtctccttcaactcactgttccccagggggttctgccccgtgcccagttctagagcaaacaattaacatctcccccaaaagtagaggggtgagtcctctccaaattccttttaactggatcctacctgagacacctccccacaccccgttttcctcctgattagtcaatgtctagcaaaacacctgcccccaggtgtctccagcctgggaccttacccccacctcccttctcactaactcaccccaacttccttctccctgaacccccttccaccccacacactcacaagctccccatttcccctgatagcccccagaccctttctggaacaagcctgacccccacctgtatgctccagccactccctggctcaccccagctttgtccttctgccccttttcagctaaccctaacccctgggccgtcaatcacacccccccatcttcaccaaccccattcctcagtcctctccccagacaacctcaacatctaattccctctgcagccccctctccaatgaaccccacttcaaactccatccccagccccctctccagctccctgcaaacctcaaccccactcccagctccctcttcaaagaagctgcacccttgactcaacccctgttccccgctccaattaacctcaacccccaacaccatccccagcgtcctccccagctaactcagatttccaattccacttccagccccctccccagctaacctcgacctacaattccagccccctccccagctagcttggacctccaatcccactccaagccccctcggcagctaacctcgacctgcgactctagccccctccccagcaaactcaagacctccaattccaccaccagccccttcctagctaacctggacctgcaattccagacccctccccagccaactcagacctccaatcccgctccaagctccctccccagctaacctcgacctgcaactccagtcccctccccagataactcagacctccagtctcacccccagccccctcctcagctaactcagacctccaatcccacctccagccccctccccagctaacctggacctgcaactccagcctcctccccagctggccctgatttctaagtggagtcccaatgcccagacccaatccttccccagctaacctcgatctgcaccccctgccccgtccccagctaacctcgacctgcaactcccgccccctccccagctagccctgagccccaagtgcagtcccaatccccaaccccagcccctccccagctaacttcgaccccctaagcgcagccccgtccccaattccaaccccagcctccagttgcagcccgggtccccagacccagcccccctcctcagccgactccgacccccaactcggtccgcagccgaatccgagctgtcccagtcccctctccgggacgccggccgcgccctcacttcccctggcccggttcgcgggcgcccttacctgcgctcgggccccgcggccgcctcagccccgccgcgcagccgaaccctccgccccggcccgcgagcgctcgctcccctctgcgggggcggggccgacactcggggggcgggccctggcgtcccggcaaggccaatcgcgagccccggctgcgggaggccggagcgggggcggggcgcggggcaggcagcggggtaggctgcgcccaggagagtggggcggggctccgggcgcgggcggggccgggggcggggcgaagagcggctttccagggtgacttcgtgacgtcaggaaggcgcgagtagtttcgcgagttcgaatcccgcgctaggtgagctggttcgaatcctgcatgccagctccgggggctcatttgctggggaagaatgtcagtgatcataactgctgcaccgctttcttgaagactttataggctccctctcgtgggaccctccgcataaggccagaaggcgagattactatccacattttacagaggtggaaactgggtctcagaaaggtgaaacctaaggtcatttgcccaagcctgtctcatcatttccaagatttctcagtttcctaactcatggccctggatccacaaattcctgagccccaacacagatggaatgaaccagaatcctatagggaactggaccctgaaatctgtgttttgtttagttttcgttttgtttttgagacagggtatcactcaattgccgtggctggactgcagtggtgcagtcatagctcactgcagctttgaagtcccaggctcaagcagtccttccacctcagccttccgggtagctggggccacaggcacgcaccaccacatccagctaatttttgtattattagtagagacagggtttcaccgttttggccaggctggtctccaactcctgacctcaggtgatccacctttcttggcctcccatagtgctgggattacaggcgtgagccaccgtgcctggccctggctaatttttttttgttagagatggggtcttgctatgttgcccaaactggtcttgaactcctgggctcaagtgattctcctgcctctgcctcccaaaatgcttggattacaggcctggaatcttcattttccacaagctcccttgggaatattggaaaacactttgtatgtctccaaaagcagtacacagccctggaaggaagatggagccaccatattctgtgacctcagggatttcatcaggcgctgacactgtgtgtccttgccgccccacctgagccctgggattggagctgctggccaaaatccaagataaacttccccagggttcctgtcatccctgcaagaacctccctgctcatcctctggactccagtggcctgccctgcagggcacagagaaacctccatctccctgcttgccctcctccaggctctccccagctggcatcccccaagaggaatgactgtctagatagagcttgggaagggcacggtggctcacgactgtattcccagcactttgggaggctgaagcgggaggatcgcttgagcccaggagttcaagaccagcctggcaacatactgagaccgcaactctacaaaaaaattaaaatattagccaggcctggcggcgcacaccagtagtcccagctacttcggaggcgaaagcaggaggatcgcttgagcttaggaggttgaggctgcagtgagctttgatcacaccactgcactccagcctgggcgatagagtgagactctgtctcaaaaaaaaaaaaaaaaagtgttaaatacacaatgcaatatgattcggccataacaaagaataaaaccctgtcatttgcagcaaaatggatgggactggaggtcattatattaagtgaaaaagtgaaataagccagacacaggaagacaaatagggcatgttgtcactgatacgtgggaaccagagagttgatctcatggaggtagagagtagaatgatcaataccagaggctggaaagttgtgtaggttgagtgggggggaaatgaaaagaggtgagttatgagtacaaacattcagttagacagaaggaatacattctaatgtttgatagcagaataggatgtattctgctatca

SEQ ID NO: 1560422 - DNA, 4001 bp, Homo sapiens
cacgcttgtaatcccagcacttgggaggccgaggcaggcggatcacttgaggtcaggagttcaagaccagcctggccaacatggtgaaaccccacctctactaaaaatacaaaaattagctgggcgtgatggtgcatgcctgtaatcccagctacttggggggctgaggcaggagaattccttgaacctgggaggcggaggttgcagtgagccaagatcctgccgctgcactccagcctgggtgacagagcgagattccgtctctctctctctctctttctctctctctctctctatagatagatagatagatagatagatagatagatagatagatagatagatctgcaagctacgtatgtcctgcaggccagcagtatgtgaattggaaaacagagggcaggaaccagagctgtcacagtcatccctttgtctccagaaaaatgacaaaatagaagaagaatgaaggaatgtactcattattttctttcctctccctccctctagccatgtttctctcttctgggtccccaaattttattaccaccatgttccagctcagatgtcacctcctccaggaagccctcccttacctccaagctgagtcaggagttatctctgcgctcccccacccagcactgcgcactctgggtttttaccatctggggacaggtctttctctcctactggactctgagccccaagagggcagggcagggcagagccaaggctgtcttggtcacagccatgtccctagcattgcccagcgctggtcagagagtaggtactcagggagtgtttggaagaatgaatgagtgaatgaacaagtgagcagggaaaaagtgcagggctttaggacagaagtgggcctgcggtagaggggaaccaggtgtgaaaacaggagtcgttaagggggtgagaagtgtgggatggggactggggaccctaagaatgtccaagccagtggggaggagaggagagaggatggcggaggggttcagggagcactggagtacccccgtcagcgctctgttaccgcctagctttgtgactctgaataaaggacttcctttggctcagtttcctcttgggtatcatacaagtagttagctgtcttctggggctgtcgggaccattaagttcaggatcgaccgtggaggagagagcaccgaatactcatctcctccgaagctttggtggagtcgtactccctccacgtccacccctacccccaacacacacactcagaaggaatgagaacggacacagcttcccctacggtggccccaagctctgtgcgtgcctcagtctccctgaaagcacaggcaccaccacagttaccaagtttattggatccatactttggcaggggagggtaagctgtccggagggctcagagcagaacacaaaagaggcgcttgtcgcggaaggggttctccgcggcgggtactggcgtcaccagcgggtcatctttggcatgcgtctcgcagaaagccaggagttccgctgctgcctgcgacacctgcgagcacccgggtggagatgtcaccgccctgcccggctccttggagccgcccacttaggccccgcctcttgccctgtcccctcctcccaccttgccccgccccatacaggcctttccccttgtcttactccgccccctcgtcctggcccctcccctgtcctaccccgcccctcgtcctggcccctcccctgccccatccctcccctcgtcctggcccctcccctgttctgcccctcccctcgtcctggcccctcctcctgccctgccccgccccttgcccagccctgttcccaggggcatccttgcactatggctccgagccgggccgacacagccccggacagaccgcaggcccagaacccccgccctattccccaccccgacccagcaccttcatgcggtcgatgttcacctccagcttcagctgttccaccgtcttgcgggcctcggcaatcttggccatgttgttggacatggttgcggcggggaaggggttaaaagacgcgcgggagtgggggctgtgggggtaggttaggatacgtctgggtcccgaggtgggggcgagagggcgggccccggtaacaggtgcgagggtggaagggcgcgtgaatggggtggccaggggctggtggagggagggacagatgaaggggacaggaacaagaggagcgatggaggggtgcacggatggaggtagctaaggcaggtggggagagagcagggaggggcgagggagggaaggaggggcgcacagatgggaggctgagacagaaggacagggccacaggtgctggatcagaatccaggtgtcctcacccccgggggcagagcgagagccaggaggggggcccctcccccaggccaattagcagtggctccagggagaactgggaattaagatcgcggcgggaggggcacagagggggcctcattagggccttggcagcagctgccctctccgccaccctcagggagcccccccaccctagccctggtcacctcaaagcctcctctgctcattagcagccagggcagagggctgggggagcccaactcgggcacctgaggagaggcctatcggatggacagagggacaacgggacgcgcagaggcagagacagagtaatggagggagagactgaggcacgggagaaatgaagagacggggaggaatagagagagggagagactgggggaggaatgaagtgatggaggagaaaatagagggacaaatgaaggggggagcaaggaacagggtgatacaaggcgacaggcaccgaggggacaaagggacagaggggacagagcaggggagatggagggagggggtgtggggtgggagaggatggggagatggagggagggggtgtggggtgggagaggatggaggagatggacggatggggtgggagaggatggggagatggagggagggggtgtggggtgggagaggatggggagatggagggagggggtgtggggtgggagaggatggggagatggagggagggggtgtggggtgggagaggatggaggagatggagggagggggtgtggggtgggagaggatggaggagatggacggatggggtgggagaggatggggtgatggagggagggacgaaggagagagaaggggaaatggaggaaggggggagggaggaaggagcagagacaccaaggagataaaggaacagagacggggagatagagggacagaggaaagaagggaaggacaaagagggagatggaggggttggggagagatggaaacagaaagtgggagagaggaacaaggcgagagacaggctgatggagacgcagaagaattcattcactcactcattcactcattcactcattcattcccaggcggagagacggtggccacggagcaggcaaagggaccagctgtggggccgggaccggagcttcctacctgttgctgctctgggccgggctcgcggcggtgacagaggctgggaggcagcgtctgggtccctccggcccgccccgccccctcccctggggcgcagcccctacggacccgcctcctcccggagccaccgtccccgccgccccgccaccttggggctccctctctgggccctctctcttgtctgtcagtcctatctttgtccctctccctgtgtctctgccgctgctgtcctattgtgtgactctctctgtgcctctctcacactcactagaaaacacagtctctctaggtgggccccgggcctcgctacatttaatccacagtcacaacaaacctctccagtgtgtcccacagagccgctcactcagccacactcgccacctcggtgtcaccacccccctccagcctcatgctcactgtccctcacacagacaaaaactatcttgccctgtcacacggtagcaccacacaacctcacgaatgaccttgctcaacacaacctcacacggttgccccaaatgccacacacagccgcca

SEQ ID NO: 1560423 - DNA, 4001 bp, Homo sapiens
gtggggcagggatgaaaaactacacattaggtacaaggtacactagtcaggtgacaggtgcactaaaatctcagaattcaccagaatataattcatccatgtaaccaagaaccacttgtatcccaaaagctactgaagcaacaagccagatgcagtaacctgtacaggccacacctgtaaccccaacactttgggaggccgaggtgggtggatcgcttgagcccaggagttcaagaccagcctgggcaacatagcggacccccgtaactaaaaaaattacaaaaacaagccaggcatgatggtgtacaactgtagttccagatactcaggaggctgatggggaggcactggttgagcctgggaggttgaggctgcagtgagccatgatcatgccactgccctcctgcctgggtgacagaagtgaggccctatctcaaataaaattaaataaataaaagttaaaacaggctgggtgcggtggctcacgcctgtaatcccagcactttgggaggccgaggcgggtggaacctgaagtaaggagcttgagaccagcctggccaacatggtgaaaccccgcccctactaaaaatacaataattagccagacctggtggcagatgcctgtaatcccaactattcgggaggctgaggcaggagaatcacttggacccgggaggcagagtttgcagtgagctgagatcatgccattgcattccagcctgagcgaccgactgagcgagactccatctcaaaaaacaaacaaaaagaaaaaaagaatacatccatggatggataatgaatgagaggttgtttatattcacagttaaccctctcatctccagtaatgcaaccatcttcttcctgcttagccttttggagatgctgtccctttagtggtcaaattctgaagaaatcaggaaataatgcattcgacatgcccagcacaagtgaagatcaggcagcagaaatgcattcgacctgccacccatccatcaggagactatttactccactactgtaggggatactgacaaattaaatccatacctagtccagatatcaattccacaatttttttttttttttttttgagacggagtttcgctcttgttgcccaggccagagtgcaatggtgtgatcttggctcaccgcaacctccacctcccaggttcaagcgattctcctgccttagcctccagagtagctgggattacaggcatgtgccaccacacccggctaattttgtatttttagtagagatggggtttctccatgttggtcaggctggtctcaaactcccgacctcagatggcccacccgcctcggcctcccaaagtgtgtaagccatggcactcagcctttttttttttttttttttttttttttgagatggaggctctctctgttgcccaggctggagtgcaatgcctgacctcagctcactgcaacttctgcctcccagtttcaagcaattctcccacctcagcctcccacgtagctgggattacaagcacccgccatcacgcccggctaatttttgtagagatggggtttcaccatgttgaccaggctggtcttgaactcctgacctcaggtgatccacccacctcggcctcccaaggttgagattacaggcgtgagccactgtgcctggcccacattttttaaaaaaggggcaactgcagtgtagtagaacaaagttgtgaccaatgctaggatactctgttcatttcctgacccagccatgaatacactggaataactcatgcaaaatgccagctcgctggccccccgtttccccacccaacaaatgaaggggctcttacaggttcctttttgtcctgaaattcatcaccaatgcaaatttcttaaaaatcctttgtctggcagtccatgcctgtccttcagcatttcccagatctgaccctcaggactcaccaagacagaagagggcggtcggggatggagacatggttcctcagccctgtcctgagctctgtggccagggagggaagtggtgggagcctggggcacaggctcaggatgtgatgaggatgaagaatgctctcctcccttcctccaccagccccggcctttcctaattgagactcatcgagccgtagccggctcctcagtacagtgacttgcacacaagctccaaggagccgcgcttatctcctctggccagcctggcgttgcaccgtttgtccgcctgctggggcctggtctgtgttcccgtgctcccataaactccctgatgtcactaggaaaatacgcatcaaaaccacagtgagatatgacttcacaccttctggaatggctgtattttttttttttcttttgagacaaagtctcgttctttttgcccaggttggagtgcagtggcgccatctcggcccactacaacctccacctcccaggttcaagcgattctcctgcctcagcctcccaagtggctgggattataggtatgtaccacaccaggctaatttttgtatttttagtagagatggggtttcactgtgttggccaggctggtcttgaactcctgacctcagttgatccacctgcctcggtctcccaaagtgctgggattacaggcatgagccactgcacccgaccggctataattttttttaatggaaaacagcagatattggtgagtatgcagagaaattgaactgcgcgtgcattgctggcagggacgtaacatggcgcccctgctgtggaaaacagttccagcagctcctccagaagttaaacgtgggattgccataaaatccagcaattccacttcggggtacacacctaaaagaactgaaaacagggtctctaacatatttgtacacagtgttcatagcagctttattcacaatagccaaaaggtgaaaccacccacatgtccatcaacaacaatggataaacaacatgtggtatatacacacaaggtaatatcaaccagccttaactaaaagaataaaaatcagccaggcacagtggctcacgcctgtaatcccagcactttgggaggccgaggcgggcggatcacctgaggtcaggagtccgagaccagcctggttaacatggtgaaaccccatctctactaaaaatacaaaaattagctgggcgttaaattagccgggcatggtggcaggtgcctgtaatcccagctacttgggagacggaggcatgagaatcgcttgaacctgggaggcagagattgcggtaagccgagatcgcaccactgcactccagcctgggcggcagagtgagactgtctcaaaaataaaaataaggccgggcgtggtggcccatgcctgtaatcctagtactttaggaggctgaggcaggcagattgcctgagctcagcagttcaagaccagcctgggcaacacagtaaaacccccaaaaaatacaaaaaaaaaatagccgggcatggcggcaggcacctgtagtcccagctactccggaggctgagacaggagaatggcttgaacccgggacgcggaagttgcggtgagccgagatcgcgccattgcactccagcctgggtgacagagcgagattctgtctccaaaaaataaaaaatattataaaagaataaattcagatacatgctacaacgtgatggaccttgaagacattatgctaaaggaaatattccggacttgacagataaatactgcattgtgccgcttatctgaggtatcgagaggagtcaaattcatagagacagggattagaatggtggttgccaaggcctgggaaaagtggggagttactatttaatagggagcgcttaggttgaagatgatgacaaagtctgggggatccatagtggtgatggttacacaacactgtaaatgtatttatatttaatgccattgactgttttttgttttttggttttttgagacggagtctcactctgtcgccgaggctggagtgcagtggcgcgatcttggctcaccgcaacctccgcctcccaggttcaagcgatt

SEQ ID NO: 1560424 - DNA, 4001 bp, Homo sapiens
tgagagcatcgcttgaggtcaggagtttgaaaccagcatggtcaacacagcaagaccctgtctctataaaaaaagaacttgggatagtgagtgtagaacagagatgtcttaagaaaatgcaacagctgacttcaaacacataaaaagcattcggaagactagcctttctcagccttttgtttcgtttgtttgtttgtttgttacagacagagtctcactacaatgcccaggctggtctcaaactcctgacctcaagcaatcctcccacctcagcctcccagagtgctgggattacaggtgtgaaccactgtgcctggcccctttctcaaccttttgtaagccgagggtagaagaagggccagtatccagcagaagtttccaccagaactgtttgtaggaaataaagggggcataagtggagatatcccagaagtacaatcaacctggcaggatgtggtcagggtgaaaaaagggaggggacccccaccaacaggaggtctgcaaataaattgtggcccaatgattccaccattcttcctctgccttccctacagggctagcacagccaacagcccttactggacactcaatacataacttgctgaacaagtcaagtcgttaagtggaacagaccagaaacacaggagagaaccttgattcatcttgcccctcacccccacattccaccagcaagtatggtcagctctgctttcaaaatatatctccacccagaccactacacaccaccaccactgctgtcccatccatgccaccatcatctcctgacctctttttgctaatctccctgcttcactcttacccatccccaaccagtgtattctcaacatcaaagatagaataacattaaaaattggccgagcacagtggctcaagcctgtaatccctgcactttgggaggcagaagcgagaggatcacttgaagtcaggagttcaagaccagcctgggaaacagagcaaaaccctgtctctaaaaatcatatatatatccctccctgtgtaatttcccatgaccctaaccctaaccctaatcctgcacttagtacaagatccaaactctttaccctaccaagtaagatccagcccctgtcagcccctctgacattcttttctacctgtctcccccgctgtcatctgctgcaaccatacccgtcctgcctgcccctcaatttcctaaactggctcccacttcagggcctttgccactttatgttccttctgcctgaaatgctttccctccagatttgctcatggttgttttcttcctcggtttcaagtctgagctcaaacgtcctctctcggggaagacactgcctgagcaccccccgctctcacactagctattccgtcattttcttgtttctatctcgccgcccccttgttcggccacgcttgtgtctcccgtccctgtaaacctctctctgtcgctgcagaaggtgagcaccccgagagcgcggctaacgcctccctcgtcgccgtgttcccagcgctgggaacgatctaacaatggtccagcaccgacttgtgcttttgtggcccgaatcctgggcccttggcctgttttccacaggctccgccggcccacgcggcccgcaccttcttccagaggctccagcccggtcccatagctgaccagatcttcttcgctgtcactgtcccgcgccgccatcctgctcttccgggccccgccccctcgctacggcggccttggcaggccaaacgcctttcctctttctcctccgcgaaccccggtgatgctggaaggctgggtccgcgggcgggggaaggtgtcctagcggcccgagcctgcgctccggattctcaggcccatcctgtggtaggccgtcccaggcaggagttgcctcggaggatttggcagccacgacatcccatcctagccccgcgatgtgcgggtgaggaggagactcctggcataagctggaagccacccaactgttccctgcgaggcgacaccgatgcctgcccagccccctacccccgtccctcgcgccagccccctgccttggcagcagtcactgcccagccccgtccactcccaccgcccacccagccacctccagggaaatggctgagctcccagatttcatgctcgccccgtggggcttcgctttatttttattattattattttttacttttattttgggttcaggggtacatgtgcaagtttgttatataggtaaattgcatgtcgcaagggatttgggttacagattatttcctccccaggtaataagcatagtacccaataggtagtttttccgatcctcaccctcctcgtaccttccaccctcaagtaggtccaccctcaagtaggccctggtgttattccctttttttttttttttttttttgagacagagtctcgctctgtcgcccaggctggagtgcagtggccgcgatctcagctcactgcaacctccgcctcccagattcaagtgattctcctgcctcagcctcctgatagctgggattataagcgtccaccccaccacgccctgctaaatttttgtttgtttggttggttggttgttgtggtggttttttttttttttttcttgagacagagtttcactcttgttgcccaggctggagtgcaatggcacgatctcggctcacctcaacctccgcctcccgggttcaagcgattctcctgcctcagcctccctagtaggtgggattacaggcatgcaccactatgtctggctaattttgtaattttttttttagtagagacggggtttgtccatgttggtcaggctggtctcgaactccccacctcaggcgatccatccaccttggcctcccaaagtgctgggattacagatgtgagccaccgcacccggccatttttttttttttttttttttttttttgtatttttagtagagactgggtttcaccatgttggccaggctggtcttgaactcctgacctcaagtgatccacccgcctcggcctcccaaaatgctggtattacaggcgtgagccactgcgcctggcacctgtcattcccttctttatgtccatgtgtgctcaatgtttagctcccacttatacgtgagaacatgcagtatttggttttctgttcctgcattagtttgtttaggataatggcctccagctgcatctatgttgctgcaaaggacatggtcttgttgtttctttttttttttttttttgagacggagttcgctctgtcccccaggcacgccattctcttgcctcagcctcccgagtagctggcactacaggcgcctgccaccacacccagctaattttttgtatttttagtagaggcggggtttcaccgtgttaaccaggatggtctcgatctcctgacctcgtgatccgcccatcttagcctcccaaagtgctgggattacaggcatgagccaccacgcctggccagtcttgttctttttttatggctgtgtagtgttccatggtgtatgtggaccatattttctttatccagtccaccatttgtgggcatgtaggttggttccatgtctctgctattgtgagtagtgcctcaatgaatatatgcatgcatttgtctttatggtagaacaacttatattcctttgggtatatacccagtaatgggattgctgggtctaatggtagttctgttttaagttcttcaggaaatctcccaactgctttccagttgtaattgtaatttaattgtaattttcttttttttttttttttttagtttattttctttgtctagacagagtctcactctgttgcccaagctggagtgcaatggtgcgatctcgtctcactgcaacctccaactcctgggttcaagcgattctcctgcctcagcctcctgagtagctgggactacaggcgtgcgccaccacacctggctaatttttgtatttttttagtagagacggggtttcgcaatgttggcaaggctggtctcaaacttctcacctcaggtgatc

SEQ ID NO: 1560425 - DNA, 4001 bp, Homo sapiens
gaaaatgtcagccttgagaaactctccctgtgggtatgagatatgctcctcccaggcagacactgggaaccattccaaggagctcaccaaaccaatcttgtggaaggcacaccccaaagccctgctacaagcaggaggaaaaaggccttcaggcccctcattaagcaaaagcattgcccaagagaaggggtgaagacacagggtgatgcggctaacagtcagataaaccccaaagggaaggaaggaggccccagagggtatgtggggcctgctcacctcggtgtagttgatcttctcaccattgaacatccgctcccgggcggcctccacgcccctggacttggcctaggaagagacgatactgaggcctggtcccacccacactggccaccccaagtgtcagcccccaaacacaaggcttggtgctgtccccaatgagacagacagacggctgctgtctggttccctcccctgctgtctgggaagggtctactcagacatcagacactggggtccctgggatgctgcttagaacctaagccagggacaggtgcctcaccagcacagaggaggtgactgaggtctaatgagaggaagaactcaagatactcaaggtcctggggactcccaggagcccagctcacccaccactctgtcggttaccagttatgcctccccaagcagaacattaccaagtccaccagcatccgcatcacgtcctccgtcaccaggttcttggagtaatccaccaggatatgcccatggttggtgttgagggtcaagctgcagaaagatggagatgctgctgaccacaccctggtctccctagcggggagccatgccctaagcaggagctgttcccagaagaaacatcctccctgacccacgccccacaagggccgcggccacccagcacagtggtggtgtctgtcacctgctggcccaccaggatgatctgcaacagcagcccagagaaagaagccatcctcacagaccgtagatgcaggcagaccctggatgaggagcccggactgaagtgggggaccaccccttcccagggcttccactttctgccgtaagttactcaggcacccatccagatgacagggatggccatcgggacgtctagcccggagccacagtcgctcccctcccccgcctccaccagtatcagtgatcagagctcccttggccgcactcccgcccatgatttgctcaaacactccttcccacttcccggtcgtgcacaggtgtcttctgcaggaatcacgcccgacgtctccatccttccacccagctccctcaaacacccccgcccgggctgcccgccctgcagacgctcccaagctcatgtggccaggagcggatggaaagggacagccctttcccgcttgctgcgtcagccaaggcctctcttcacaactgcgaaaggagcccctgctcaaatggccagagctgcacggggaggaggaggggaaatgtccccacggaggggcccgtttttcctcgtaacgaagcagacccggggccgagactcccggcgaggctgcaagcccccaggaacgcactccaaggagactccaaggacgaagtgcggactcggcctgggccccagtccgtggcctggaggtcggggactggggtccccgggcaccgctgcccccgcctccagaccccaggcccgcgtgcccggttccgggcgccgcgcgtggcagcccccgcctccggcccgcccgcacctgaagtggttgaagcggtccttgttggcatcgaagaggcggcgcaggttcagctcggagcggtgctcgcggtaccattgctgcagcttctggaactgggggtcccgggtgagagcggccatggcgggactagaaggtacactgagtgagacgcgagccgaggaggaaggagcgccggcagcgcgcagcaagcgaggcgcgtgggcgcgcggcggcctttatggcgcaggcgcccggcccggcccggcccggccccacccctgagccccggccccgcccccgacccgcgccccgatacccaggccgggtgcccgctgagcgaccttgcccgcggccgctgatctggggcctcagctcctctctccctacctcttgcgccgccgctttgctggcctctgcccggaagtggcagtggggagggtgggcagagcccggggatcactggagcccaggtgttggaggctgcagagagctaccatcgcgccgctgcactccctgtgcactagtcggcttcattcattcattcgacaaaactctatagatcgaacaccttccacgttacaggcagtgttctaggcgctgtggatacatatgtgccaaataagcaagtacaacagatgatgtgtgtctgctggtggtaagggctattgaggaaaaccaagatgaaaagggtgctgagaatcggggttgcaattaagaaaaaagtgactaggccgggcgcggtggctcacgcctgtaatctcatcactttgggaggccgaggcaggcggatcatgtgaggccaggagttccagaccagactggccaacctggtgaaacctcatctctactgaaaaaaaaaatgcaaaaattagccgggcctggtgacacgtgcctgtattcccagctaactcgggaggctgaggcaggataatcacttgaacctgggaggtgaagactgcagtgagccactgtactccagcctgggtggcagagtgagactccatctcaaaaaaaaaaaaaaagatgaggtcagagagcaaaagggaggcaacaagatcacgtaagaccttgtaagtcattgtaagaactctggggctgggcactcctgcctataatcccagcactttgggaggtgggatagcttgacgccaggagttcaagccgagcctgggcaagacagcaaaacactgcttctaaaatactaaaaataaattagcggggcatgtggtggtgcatatctgcagagtcccagctactcgggaggccaaggcaggaggatcacttgagtccaggagttagaggctgccgtgattaccaccactgtactccagcttgggtgacacagcaacaccttgtcttaaaaaaaagaaaagaaaagaaaagaaaatagggaaaggctgacaacaaaagaaataagtggtcactgaggggtcacaggactttccagggaacagccctgtccacatggcccttttctaagaactgtcaactcttaagatttcactgagcttccacacctagcacaaccctggtagtgctgaacagtatctgttctactggagttctttttttgtttgtttgtttgtttgagatggagtctcgctctgtcaccaggctggagtgcagtggcgtgatctcagctcactgcaacctccacctccctggttcaagcgattctcctgcctcagcctcctgagtagctgggactacaggcgcacgccaccacacccaactaatttttgtatttttagtagagatggagtttcaccatgttggccaggatggtctcaatctcttgacctcattatccgcctgcctcagcctcccaaagtgctgggattacaggcatgagccactgcgcctggcctctacgggggttctgagaaacactccaatcagggttttctaagccagttactcatctacacagaagagaattcccaccccaaatcctctgtttcagaacaaaacctcaaccaatgggaaggcgagtctcagtagccactgccccattatcacttaccctgtgattcctcagatgactctagcccaatagtaaccactgactccctctgactcctccttctttttttttttttgagacagggtctcactctgtcacacccaggttggagtgcagtgacacgatcttgtctcactacagcctctgcctcccaggctcaagcgatcttttcaactcacccttctgagtagccaggactacaggtgtgcaccaccatgcccagctaattttttccttgtagagacaagctttgttat

SEQ ID NO: 1560426 - DNA, 4001 bp, Homo sapiens
ccaccccaagtgtcagcccccaaacacaaggcttggtgctgtccccaatgagacagacagacggctgctgtctggttccctcccctgctgtctgggaagggtctactcagacatcagacactggggtccctgggatgctgcttagaacctaagccagggacaggtgcctcaccagcacagaggaggtgactgaggtctaatgagaggaagaactcaagatactcaaggtcctggggactcccaggagcccagctcacccaccactctgtcggttaccagttatgcctccccaagcagaacattaccaagtccaccagcatccgcatcacgtcctccgtcaccaggttcttggagtaatccaccaggatatgcccatggttggtgttgagggtcaagctgcagaaagatggagatgctgctgaccacaccctggtctccctagcggggagccatgccctaagcaggagctgttcccagaagaaacatcctccctgacccacgccccacaagggccgcggccacccagcacagtggtggtgtctgtcacctgctggcccaccaggatgatctgcaacagcagcccagagaaagaagccatcctcacagaccgtagatgcaggcagaccctggatgaggagcccggactgaagtgggggaccaccccttcccagggcttccactttctgccgtaagttactcaggcacccatccagatgacagggatggccatcgggacgtctagcccggagccacagtcgctcccctcccccgcctccaccagtatcagtgatcagagctcccttggccgcactcccgcccatgatttgctcaaacactccttcccacttcccggtcgtgcacaggtgtcttctgcaggaatcacgcccgacgtctccatccttccacccagctccctcaaacacccccgcccgggctgcccgccctgcagacgctcccaagctcatgtggccaggagcggatggaaagggacagccctttcccgcttgctgcgtcagccaaggcctctcttcacaactgcgaaaggagcccctgctcaaatggccagagctgcacggggaggaggaggggaaatgtccccacggaggggcccgtttttcctcgtaacgaagcagacccggggccgagactcccggcgaggctgcaagcccccaggaacgcactccaaggagactccaaggacgaagtgcggactcggcctgggccccagtccgtggcctggaggtcggggactggggtccccgggcaccgctgcccccgcctccagaccccaggcccgcgtgcccggttccgggcgccgcgcgtggcagcccccgcctccggcccgcccgcacctgaagtggttgaagcggtccttgttggcatcgaagaggcggcgcaggttcagctcggagcggtgctcgcggtaccattgctgcagcttctggaactgggggtcccgggtgagagcggccatggcgggactagaaggtacactgagtgagacgcgagccgaggaggaaggagcgccggcagcgcgcagcaagcgaggcgcgtgggcgcgcggcggcctttatggcgcaggcgcccggcccggcccggcccggccccacccctgagccccggccccgcccccgacccgcgccccgatacccaggccgggtgcccgctgagcgaccttgcccgcggccgctgatctggggcctcagctcctctctccctacctcttgcgccgccgctttgctggcctctgcccggaagtggcagtggggagggtgggcagagcccggggatcactggagcccaggtgttggaggctgcagagagctaccatcgcgccgctgcactccctgtgcactagtcggcttcattcattcattcgacaaaactctatagatcgaacaccttccacgttacaggcagtgttctaggcgctgtggatacatatgtgccaaataagcaagtacaacagatgatgtgtgtctgctggtggtaagggctattgaggaaaaccaagatgaaaagggtgctgagaatcggggttgcaattaagaaaaaagtgactaggccgggcgcggtggctcacgcctgtaatctcatcactttgggaggccgaggcaggcggatcatgtgaggccaggagttccagaccagactggccaacctggtgaaacctcatctctactgaaaaaaaaaatgcaaaaattagccgggcctggtgacacgtgcctgtattcccagctaactcgggaggctgaggcaggataatcacttgaacctgggaggtgaagactgcagtgagccactgtactccagcctgggtggcagagtgagactccatctcaaaaaaaaaaaaaaagatgaggtcagagagcaaaagggaggcaacaagatcacgtaagaccttgtaagtcattgtaagaactctggggctgggcactcctgcctataatcccagcactttgggaggtgggatagcttgacgccaggagttcaagccgagcctgggcaagacagcaaaacactgcttctaaaatactaaaaataaattagcggggcatgtggtggtgcatatctgcagagtcccagctactcgggaggccaaggcaggaggatcacttgagtccaggagttagaggctgccgtgattaccaccactgtactccagcttgggtgacacagcaacaccttgtcttaaaaaaaagaaaagaaaagaaaagaaaatagggaaaggctgacaacaaaagaaataagtggtcactgaggggtcacaggactttccagggaacagccctgtccacatggcccttttctaagaactgtcaactcttaagatttcactgagcttccacacctagcacaaccctggtagtgctgaacagtatctgttctactggagttctttttttgtttgtttgtttgtttgagatggagtctcgctctgtcaccaggctggagtgcagtggcgtgatctcagctcactgcaacctccacctccctggttcaagcgattctcctgcctcagcctcctgagtagctgggactacaggcgcacgccaccacacccaactaatttttgtatttttagtagagatggagtttcaccatgttggccaggatggtctcaatctcttgacctcattatccgcctgcctcagcctcccaaagtgctgggattacaggcatgagccactgcgcctggcctctacgggggttctgagaaacactccaatcagggttttctaagccagttactcatctacacagaagagaattcccaccccaaatcctctgtttcagaacaaaacctcaaccaatgggaaggcgagtctcagtagccactgccccattatcacttaccctgtgattcctcagatgactctagcccaatagtaaccactgactccctctgactcctccttctttttttttttttgagacagggtctcactctgtcacacccaggttggagtgcagtgacacgatcttgtctcactacagcctctgcctcccaggctcaagcgatcttttcaactcacccttctgagtagccaggactacaggtgtgcaccaccatgcccagctaattttttccttgtagagacaagctttgttattttttgtacagacgaggtttcatcatgttgctcaggctagtctcgaatccttgggtgcaagtgatctgcctgccttggcttcccaaagtgctgggattacaggcatgcagcactgcacctgcaaactgagactgcctttttctagtaggttattttggtgaccagatggacggctgttgttctttgtctaaaaccatcctctcccacccgtgtttctacccctgcctgaatccatcagagatgagcacataacttatgccagctaaacagggtccttttccagggccctgcagccagcagcagaaagtctctgctttttatggtgttaagctgcctgtcagaaaggacagacctgagctctagcccctggtcttgaggaaaataacg

SEQ ID NO: 1560427 - DNA, 4001 bp, Homo sapiens
gcagatccttggtgttgatgaggaacaggaccaggaaactgctactgtttttctggagagggcagtcctggaaatcccgggtctggggggtgggcaggagggagtgagtcttggttactcctctcctggtccagctccaccctgtctccctccctgtccacccacgggatcttcctgctcctgcctctgacaaagaacaggggcccttgggttacagatgcagaggacagaccctaccccctccctccagccccttctcccgtcttccccatgccctccactcactgaataggagcgaactctgccagaccgaacccggctgagactgaaccccacctggtgggtggaaaaaaaaaggggagggtgtgagggacagtagagacctcccagctatccctttcagtagcaatagaaacctaacctcacatttactgaacacctaacatgtgctagatcccacacgctctttttcttttttagagttggggtggtgggtggacctcattctgtttctcaagctggaatacagtggcaggatcatagctcactacagcctcgaactcccaggttcaaacgatcctctcacctcggcctcccgactggctgggactacaggcacacctcaccacgcccggctaattttaaaaactttttgtagagacggggttctcactatgttgcccaggctggtcttgaactcctggcctcaggcaatcctcccaccttggcctcccaaagtgctaggactacaaagcctgagccaccgcgccccgcctgtcccccaagtcttaagaaaagtgcctagcacatcctgtgtaagacatcattactcccaggtacagatgacgaaacaggctcagagagatgacgggacttgtacaagatcacatgggtagcggcagagctgggaacccagaaccgggggattgcaccgtgctctcctccagcaaactcctcaaggtccctcaccagcagggacttctcttctgcctcccggaggcccagccgcaggacgctcaactccacctccagagagccattggtgtagaaaccgaagctgttcagctggatgtccgctcgcttctccccctgccggagaccaaggaggcagaggcagttcagacctctttccgcctgcccagccccaggggtctggcacgaggacctccagaagggcctcctggtacccctctatttaggacaggcccagaggatgacaagagaaagttgagagggacttcctccctgcaggggaagggtggtcctgcattctccgacctctgttctgagaacccaggaacagagatcctgcggcacctggaagtctccccactggggtgagcaccgcccggagaacagttattcacctcggcgtgcctgaccttcaccttcccgaagaacttttacattccagttgagctcccagcaatatttcaacagaaccccccaaatcccattaagtgcccagaggaccccactctatagccccccaggaccccgctgtgcggctccagggtctctagcgccccaaaagtgattccaagaatttaaaggactaagacccagttggggggaaggggggtgtagtccccaagagatggagcctcgcccccgaagggagggggccgaccccagcgaggcggacccggcaactccatccggaggaccgaaggggatcccgggacgagaccactccgggcccggaaacggggggcgccggaccactccaccgcctcggggacgggggagggcggacgagaccactccaagccagggggcttctccgagacaaagttgcgccaccgaccccagaccctcgcgcggcgggcctcaccgtcagcgccagctggtggatgcgcccggagcagccacccagcagcagcaccagaagtagccgctgcccccactccgcggggctcccgcggccgagccccctcctctcgctcactgccatctctggagccacctcctccccgactccgcctctggcgcccaagcccgcccaccgatgagccaatcgccgcacggcggggcccggcctttcggagtttccagtccgccaaccaatcagcaattgcctctccgcaagcccgcctgcttgcgtcaccgacggacagcaccggttccgaatgggagagccgataacgcttaacccccagctcactctcaccaatcgctataaagattgtccggatgtgatttaatgagcagtttatctaaccaattgtcatggatctgatatccggcccttaaagcggaatttctccacccactcttaactgtccgggactacattacccagaatgcagcgggagcagacaagggccacaaagcattaaataaactacctttcccagtatccccaaggacggacttcctcttcttgagccagggatgtggctcccagccagagctgaggcttttggtaaacacacgcatctgttcaggcctgacctgttttcctaatcttcctggtccacagagaggcctaaagctggcctcaggttaaagtttgaccctaggatgacctatgaccccaggctgagaccccagccttaggctaagccttttattccagagtgaggcaattggagccccacccccagattccaggctagaccggactccgggctgaactctgaccccaggtgaactccctctctgcaagttgagtcctaacttcagcctgaaactctgacaccccctcgtcccccacaccacacactgaggcttaatctctggtttaggccaccgatctggactagccctgactccagattggacctgaccccttaccgggttgctaatccttctggttaagcctctggcctctatcccctatccccacggtggtgctgacctggactgaaccccaattccagtttgagtctctgagcagaggtgaactcagaactttgctaggctgagcccccatttgagactagccacagaactcactgggttcaattgcccaactgcaatcagacattttctagctcagaagccaccagcaggtggggccaggtctcagcagagacatcagtcccagtgtgggctcccaaggctctcctcctgggctcagctgtatctctctgttctgggagcctgggtgctctgtgtaaggggaacgtatacccaagggcccccctgcaagacgcccagccttgtctgaggctgcagagaaagcgccaaagcccggagagaatgggagtgggaatccccagtgcctcctctcctctttcattccagcacctcaaagggatttacaaggtgtgaacagacttttatgggagaggtgacagacttcccttctccagggcccagatggcccagatgtctgggggaggggcggagtcggaatctcaggggcagtactgagaatgaaaccaggttaaactggaaaatgggcagatgcaggcgcgaactggaaggcagctggggaaaggcctgggcctggcgccccaaggacggcctgtcttcagtttcccagcggagactctgggggagggaaggcaggatgcggtgcgggagttaatggacctggccttggcgaaggcgcgtcctgggttggatcgaaaccctctcatccgccctgtggccggagggaccagaccattagtgggacgaacctagacgcctggagccgggccggctcgcaagaacggggtgacctcaggttgcccctgcaatggggttgaggaaggacttcttgagtttggggttttagtgtcttggccctttaaggaataattgcggggaaaggggaaaaggagatgggaagaaccgtttggagcggggaaggaagatgagaggacgagagggaccccggggatttggaaaaaatgggtgggggttctttaaggggtcggtccagcggcgtcgagtggcaacgttgctttaaaagggggcggagcgtccgttgggccccgcccccgaatcgcagtgcttgggctccgcgcgggtgggggcgtggcagagcgtgcaggggggcggggaagagt

SEQ ID NO: 1560428 - DNA, 4001 bp, Homo sapiens
ccagtagttttgggagccgaggctggaggatcacttgaactcaggagtttgagaccactctgggcaacatgatgaaaccccgtgtctacaaattacccaggtagcacatgcctatagtcccaggtactaggcagggtgaggggaggtggggggtggggcgtggggagtcctgaggcaggagaatggcttgagccctgaaggtcaaggctgcagtgagccgagattttgccactgcgctccagcctgggtgacaaaatcagaccctgtctttaaaaaatttttaaaaaaaagaaaaagagagggaaagaatgggccaggtgcagtggctcacgcctgtaatcctagccctttgggaggccgaggcaggcggatcacaaggtcaggagattgagaccatcctggccaacgtggttaaaccccgtctctactaaaaaatatacaaaaattatctgggcgtggtggcacgtgcctgtaatcccagctactcgggaggctgaggcagaattgcttgaaccagaaagtcagaggttgcagtgagccgagatcgcgccactgcagtccagcctggtgacagagcaagactctatctcaaaaaaaaaagggggggggggcggggaagaatggacactggggagtaagtagctgtctctaccacagagctttagatgaggggttgctggaagacttcctgaaagaagaggcaggatttggcagggttttagaagccagtcaaggtaagaggccacaagcaaactaagaaggacggcttccagcttccagctgaagtcttccatcattcccggggggcgttgccacggggacaggatgacagaaactcctcctctccaaacgccctcgccagggcagaagtcaaagactggaaaaacttttcttggaaatctctgccaacgaagacgtagaggaaggggttgaggctgctgttgacacagcccaaggcaaagctagcctggaggatgagcagcatccgggggtggtagatttccttgagcatcacccgtcgccacagatggaccaacagcaccacgttaaacggggaccagaagataaagaaagcgctcaccagcaccagcagcagcctcttgggccggttggcatggacccagccctcccgcaagagcttggcccggatgaggtgggcgcaggtgcctatgattgctaagggccccaggaagcccagcaggaagtggccaatggtccctataatgtgtccctccacgaccccttcaatccaaatctgggcagtctcattgtcagagttgaacgccaagtagcagtgcgtacagccattccattttctggttgtccggaatttcaggtgcgcagagcacaaggcggcggccaggagccacaccccaaaggccagccagctcgcccgctgcacagtgcggtggttcagggcccagacggggtagaggacagagatgcaacggtccacagagatgaagacaaggaggcagttactggcaaagtagctgaggaacacaaaggtgatgtagagtttgcaggcccactctccgaggagccactgcctggagacaatatagtacatggcaatgggcagagacagtgagagcatgaaatcggcaagggccaggtggaagaagcagacggtggagaccgtgcgtgccatacggaagacagtcatccacagcaccagcccattgcccagcactccgacgacaatggacgcagacaggataaccacagtcagtgggcggagggaccccacctcctcagacaggcatccggaagagttcatcttcctggaacaagagcgatcacgtgtcaggaccccaggttgcctgtcactgcagcctctggtcccctccgagaccccattcatgatttctccattccataatttttatggaatgcttattattattattcttttagagacagcgtcatgctctgtcacccaggctggagtgcaaaggtacaatcacagatcactgcagcctccacctcctaggctcaagagatcctcccccctcagcctcctggagtagctgggactacaggcacttaccaccatgcctggctaatttttttaccttttttttttttttttttttttgacacagagtcttgctctctctgtcacccaggctgtagtgcaatggtatgatctcggctcactgcaacctccacctccaaggttcaagcaattttcctgcctcagcctcccaagtagctggaactacaggcacatgccaccacacctggctaatttttctgtttttagtagagacagggttttaccatgttggccaggctggtcttgaactactgacctcgtgacccgtccaccagcctcccaaagtgctgggattataggtgtgagccactctgccaggccttaaattcttttttgtagagatggggttttgctgtgttgcccaggctggtcttgaactcctggcttcaagtgatcctcccacctcagcctcccaaagtgctgggattacaagtgtgagccattgagcccagcctgaatgctttttatgacacaataatattgttctttttttttttttttttttgagacagagtctccttatgtcacccaggctgcagtgcaatggcacgatctcggctcactggacactataatattgttctaagtactggacataactcgtgtaacaaaacaagccctcatggaacttacatcccagtgagagatgtcaggtgtaatacatataataaatttacttcatgatatactgctttagaagactacaagtgttatggaaaaataataaatgaaatggaggggccaggtgtggtggctcatgcttgtaatcacaacactttgggaggctgaggcagaaggattgcttgaagccaggagttccaaaccaaggtgggcaacatagtgagaccgtctctacaaaaaataaataattacaagtttttgtggccatgcacagtggctcacgcctgtaatcccagcactttgggaggctgaggtaggcggatcacctgaggtcaggagttcgagatcagcctgcccagcatggcgaaaccccgtctctactaaaaatacaaaaaacattagctgggtgtggtggcagccacctgtaatcccagctactcatgaggctgaagaatcacttaaacttgggaggcggaggttgcagtgaatcaagatcgcgccactgcactccagcctgggtaacgagagcgaaactccgtctcaaaaaaataaaaataaaataaaatttaaaaattagccgtgagatgggcgtagtggctcattcctgtaatcccagcactttgggaggctgaggctggtggatcacttaagttcaggagttcgagaccagcctggccaacatggcaaaagcctgtctctactaaaaatacaaaaattagccaggcttggtggtgcgtgcctgtaatcccagctactctgaaggctgaggcaggagagtcccttgaacctgggaggcaggggctgcagtgagccaagatcgtgccacttcattccagcccaggcaacagagcaagactctgtctcaaaaaaaaaaaaaaaaaaaattagtcaggtatggtggcacgtgcctgtagtcccagcaaattgggagactgagacacgagggtcacttgagccctggaattcgaggctgcaatgagccatggtcacgccatttcacttcagcctgggtgataaagcgagaccctgtctcaataaaaataaagtaaaaataatgagatggaggttcttttaactttggataatgtcagagtaactttgtcagacaaatggtgccacagacaaaaaaaaaattaaaatctggacaaaatattaaaaattactccactatttgaaaaaattggcagcagaaaagtctgtcaatccagaattttatattctgtgaaaatatctttcaaaaatgaaagtgaaaaaagggcattttcagataagccagatctgaaataatatatggcctacagaccgcaggaattgcttaagg

SEQ ID NO: 1560429 - DNA, 4001 bp, Homo sapiens
cgcctctctaccctttcgctagtgggcctagcctcagccctccccgctcacaccagctgagttattatttgtctagacacaaaccaaattataggccctgtccccgagggaacggtgggctccaggcggagggtcaggagactgaagctggagttaatcccggttcccctccacctccctccctctcttcccgaaactccaccccttccacccaaaccaactattgcccctctccctccccaccaccatggttttggaaatattttctctcctctgcttctaaaaccctcccttctggattccagccatttctactcaccctggcatctctccctcctcattgagaagacctctttccccaaattaatccgacttagtggtagcagaagaagccagctctgtggatttgggcttcagttgaaaactggggtcccaaccctccagcctggcactgactcactgtggggacttctgcttttggacctcagtttctccatctataaaatgggggcagggggagttggcctaggtggctccgcaaaccctttccagctctcagctgccatcactgaaacgtgccaagatttcaacactcctctttttggattgaaggactccagtatccccaggacctttgattggaaagatctggaattcccaggcctcccctccaatgcttcttccatctgggcccttccattcaaagatgttcacattcaaggtacttgatcataggattcccagggttccaggagcccctatgggtctttcatcctcttcagctgggattcccccagaaaagaaaacctcctcatcctcaccccaaacctgaagtcaagttcatctacaaagacagaggtgggggcggatacccccttggtgggctcaggaggaggggggctgatggtgggctctggagggggaactggggggtgtggccccatcctctccacttctgcgccaaacaaattccccaatgcatatccagcctgagtacgcacacacacacatcccacaaccgatgcctcacagatatcctagagctattcctcagcctagtttgggaggaggggttgtccagttccaggggggagagtgaggcggaagcaggaaagagttaatggtgacccagccaaatcctggaagagaggaagtaggggaggaagtccaccccccaggcaggaattcctgaaattggcgggcgggctgggtgcgacctgaggggcagtggggtggctccgtgaagggggcgctgggatcatggtgtcacttagagtccgcctgccccaggtcacaagcctcctgccccctaccccactcccaagcaggttcccagcccagaggaaagttccgggatgcggaggatttggaaggagagaagacagagctgaaggtgccaaaacagtgttataagagacggagagaaagagacagggcaatagagatgaagagacaggaagggagagagcaaagagatacacagagacagggagagatggagatagagtcagagacatccgcagaggtcccacaacagacgggggtgaggcagaggcaggggcagagggaggtgggacccagaaacagagagacagagacagacagacggagacagagaggcagagatcaagaaaaagacagagacatccagagacacagaaggaaagacacgtccagaggcagagggaccacagacacagagacatcaggcgggagttggagacagacgcaaagccagggagagcaacagagggggcgggcaccgagacggcgcgggagactgaggcagcccccgagggggcggggaggagcggtctcgccacgagcagggcaacctagtgagaccccgcagcatcgcgggcagccggggaggacccggcacttacctgcgcgcggcgactggacggggcgggcggcggcacctctctccgctgcgtccaggtccccggtcttgacaacggcgcggggacccagcggatgcccccgcggggcagaacagcggctactcctcccggcccccgggccagagccgccagccgaggccccgccccggccaggcccgcccccattaaccccacctttgccgctgccccttaacccctttcaggcttcaccccattaaacgcctccagccacgggtgaggctcatctgctactggaacacccccgaatccttccaagtccccagctggaaggtcccctctctccaaccacacacccccaaatttatcaggtcctcggctatgggaagaggaggcccccgctactgaccttccctgggttaagccatttcctcccttagagaccccaggcttcagtcattcatcctctggtcattaaccttctgcatcttcctccccaacaacggagagaataaagggttctgttaggtccccaactccaaagtcagggccacccctagaaggagctctggggttgcatttccagcctgactcttggtcagaccttaggctagtgacatctccgtgcctcagtttcctctttgaatcaaggtggtcactcatggtgcctgcttgcttccttcttttctttgctttgctttgctttgcttttttctttcttttctttcgagacagagtcatgctctgttgcccagactggagtgcagtggcacaatcttggctcactgcaatctctgccttccaggttcaagcgattctcctgcctcagcctcccgagtagctgggattacaggcacacaccaccacgcccggctaatttttgtatttttaatagagacggggtttcaccaagttggccaggctggtctcgaactcctaagctccagctatctgcccacctcggcctccaaaaagtgttgggattacaggcgtgagccaccgtgccccaccttttttctttttttgagacaggttttcactctcttgcccagtctggagttcagtggcacgatcatggctccctgcggcctcaaccttccaggctcaagtgatcctcccacctcagcctcctgagttgctgggactacaggcgtgtgccaccacacctggccaatttaaaaaattttttttttctatagacaggggtctcactatgttgtctaggctggtctcaaactcctgggctcaagccatccttctgctttggcctcccaaagtgctgggattataagcctgagccaccgaggccggccatcatggtccttttctcctggcggtctcatttaatggtgtcaatgctatcaagtctgtaaaatatgccaaccagaccccaacactccccatctttctctgcctcacttttcccctaccctttggggaaggcaacattctcttatttttttctagttgtctgccttcctactaggaagagtgtcatttttgtgtctggcttgtttactgttgcatgtctgttgcctagaagactgctgggcaggtgataggtgtgaaacacattgttttctggccgagcgtggtggctcacgcctgtaatcccagcactttgggaggctgaggcaggcggatcacgaggtcaggagatggagaccatcctggctaacacagtgaaaccccatctctactaaaaatacaaaaaaattagccagatgtgatggtgggcgcctgttgtcccagctaatcaggaggctgaggcaggagaacggcatgaacccgggaggcggagcttgcagtgagccaagaccgcgccactgcactccagcctgggtgacagagcaagactccatctcaaaacaaaaaacaaaaaacattgttttcagggagtgaacaaatgaatgataagtgctcctaaaacattagcttatttttattattaacatcacatctttcataaactaatcatgagaattcattattggtcaagggacttcagatagatgtggcatataacactaaaaaatgatagctgtcaggtttgatttttttttttttttttgagacagagtcttgctgtgcccaggctggagtgcagggacatgatctcagctcaatacaacctcctcc

SEQ ID NO: 1560430 - DNA, 4001 bp, Homo sapiens
cacctccccgcaaccgccccccgagccatgagccattctgccccagggaggtgtgagcatcccagcagcccccccacccccaccccagcagccgtactgtccccagaggtcacgcactttcccaggatgcccttgcccttgggttggatcttcatccacttccacagcgggtgggcgtcgtccccgttcacgcagatcttgctgaacatatcgaatttgacgttgtagcccgcggcgaactctttgatctcttcgttactccctggctcctgtggcggccaaggtgtgtgagtgagtcgggggctggcaccccctcagtccgggccccctgcacactcccaggccctctccaggctggagcccaccccgacccccacccacccgcctctgcgggccccggggacgcagcagcccacctgcttcccgaactggttacacgggaaggccaggatccgcaaaccacactcagcgtatcgggcgtgcaggtcgacgagctgagtgtagtttacttcggtcttgcctcactgggaggccacgttggtgacgatgcacacgaagcccctgcgaggatcggcggcgtcagcgcagaagaacacggccccctcccagggcccgaccccgcgccccaccccaggcgagcgcccaccggtacttgtccaggttaaccatgtgcccgtcgatgtccttggcggaaaactcgtgcatggagcgcgcacagcgccagtcgtcccgggacgcgcactgcaaggcaaaggaagctgagcagggagcgtggacgggaggctgagcccgggaccctgaggcaggaagggatcgggagcgggtcggtggcggggacaccgaggccctgcggccctgaagacctgaacgctcctcctccttaaacgcacacgcccccttgtacttctggtccggttttaccggagacccggaggccgggagagggttccaaccccaaaatgtgccacattagccggtgtgggggccccgcgcgcaccgggtcctgggacttgggacattcgtggatctccggtcgcaagctgcggggacagggcttcttccgccggcgccgcgccctcctgcgcctgcacgctggggccttccgccgccgaggggctcgcggccgccgcctgccccggctctggcaccgctgcctgcggcgcccgggggagcctgcgcccgcgcggcccatacccgcccgtctcccgcccctcctggctcccccaccccgagcgccgctagcggggacaaagggcccggaggccgtagtcaggactgcgcgactgtgacgccaccgcgctaggccaaggtgcgggggcggggcggcgcccgggggcgcgtgatccgggatttccagccctccgcgcccccaaccgctcgggcgcagcagccccgctcggcccggagacgccccgccgtggccctcaacggtccagctccgccccagccgtcccggaccccgccccctgcaagcctggacccccgaccccggccccggcacgcgcgcctgcaacggcctggacggccccttccccgaccacgacccgcgcgcgtggaacaaccccttccccttccccgaccccagcccgcgcgcctacaacggcctggagggccgcggagcgcgtcgcagtacggtcacccgcgtccgtgcccggccgggggtggggagggggagcccccagacgccccccaccaaggtcactggagcctgagggttccccacgccggcgagcggaggcagggatcgcgcgcccgccccaacggtcaccgggccggcaacggccgcggcgctagctcaccatggtcccggccaggccaggcgcggccagagccccacagagcagcgccggcttcagtaggcggcaaaggcggccgaggctcatcgcggcggggctgggagccagcggctcctcccctcgtccagccgaccaatggacgcgcgtcggctttccgcgcctcctttcccacggccacgccctccagagcgctcattggtcagacgcgtcggtgttgagcgctcgcgccgacgtcagccaatgggaggccggagtgggaagaaggcggggaagggggggcgggaccggacgtgcggacttgttgttggcgactgcgcatgctcgcttgtgtctaggaggccgtggcctggctggcggcgcgtcgggaggcagcgcagttatccggctggttgacagcagcgcggccgcaggccagacaacctgagaatactacttaagactcgtcgagggggtttggtttctccaactcgcagaaaagtgtccccaactcttatttacctttttttttttaagacacggggtcttgctgtgttgcccaggctaacgtgcagtggcacgatcagggcacactgcagcctcgacctcccaggctcaagcgaacctcccgtctctgcttcccgagtagctgggacaacaggctcatccaccattcctggctaattattgttttgtagacatgggggtctcgctatgttgcctaggctggtctcaaacttctgacctcaagtgatcctccagcctcagcttcccaaaagtgctgggatcacatgcgtgagccaaaggctcggccgggatttgccttttttttttttttttttccgagacacagtttttttgctcttttgcccaggctggagtgcagtggcgctatctcagctcactgcaacctccacccagcccccgggttcaagcgattctcctgactcagcctcctgagtagctgggattacacgagcgagccaccacacccagctaatttttttgtatttttagtagagacggggtttcaccatgttggccaggctgatctcgaactcctgacctcaggtgatctgcccgcctaggcctcccagagtgctgggattacaggtgtgagccaccgcatccggccaagggatttgcctttttaatgtaaatgaaaccaaactgagttgggtttgcttctcatcacagctccatcttatgggggtgtccctaccctcacccctgccatgggcgcagggggtcagtgactccccatcctgggtctggttgctgagccgcttgtataatgtgggcactgagacctgagagtcatcaagacagttaccacttaactgagaacctggagtttcctgggctcccacccccaggggcagctgcccacgcagggacgcgcggtatgtgctcagaaaataaacacaagtctggagggttttcttacacttctaacattacaaggtatgggcacacccgagcccatactgccccacatcttggcttccaactctgtttttcacttcgtggcttggacatgtggcaacagaaacactcatctcatacttgggaactgagtcaccgtgattggactttgacccctgtacaggcaggggtttggatttttttttttttttttgaggagtcttggtctgtcacccaggctggagtgcagtggctccatcgcagctcactgcaacctccgctttccgggttcaagtgattctcctgcctcagtctcctgagtagctgggattacaggcatgtgctaccacgcccagctaatttttgtgtttttagtagatacgggctttcaccatgttggtcaggctggtctcgaactcccgacctcaggtgatccgcctgcctcggcctcccaaagtgctgggattacaggtgtgagccactctaccccgcctaggtgcttgggatttgtatgttgtcctcaaggtcttaaccttttctgaccctgcactgagtatttcttcagagacagactcagggccgggttgacttggggggtgctatgagcctgcccccgccactgcccccgactcaggcctgccagatgcagcacagaggcgtcatggatggtttggtggcagaggcagtgaagcaaggatccctgagcagggctggccgaatcctggtcttgcataagtctgttcacatggctttgctcccgcccagcccctagaggctgagttcttggagtcaactcccattgtc

SEQ ID NO: 1560431 - DNA, 4001 bp, Homo sapiens
aggcaggccgtcatgagtgccggtggaaggctccaagggcgtgggcaggggctcgggcggggccacacacttgtggagctagaaatagtggggcaggtccttctctatcacctgtcggggaggaaagctgggttagggcagctacctcccaagcccccgagcctcaagcgggctccctagagaggacctaccaggggctcctccatgggtccgtagcgcttcaccacgcagccgttcttgtcgatgaggaactgtggagagacggtgtccaaactgtggggccacccctgcaaggggctgaggctgcccttcctgtccgctgcccatctgggccacggctgtggccaggggaagctggtcccctaccccccacagcccccttaccttggtgaagttccacttgatggcactggaaaagaagcacatggacgtgagcgtccccagcagccccccacagtccccaagctgtcctgtctccaggaggccacaagggtgtgagcttccccggctgcctccacagccacagtgcccccaagcccccccagagccatcttaccccaggaggccatgcagtgtgagagtcccaacagccccccacaggcccccgagccatcctgtccccaggaggccacaaaggtgtgggcatccctggctgcctccacagccctctatgtccccctgagccatcttacccccaggaggccacgcgatgtgagagtcccagcacctccccgcaaccgccccccgagccatgagccattctgccccagggaggtgtgagcatcccagcagcccccccacccccaccccagcagccgtactgtccccagaggtcacgcactttcccaggatgcccttgcccttgggttggatcttcatccacttccacagcgggtgggcgtcgtccccgttcacgcagatcttgctgaacatatcgaatttgacgttgtagcccgcggcgaactctttgatctcttcgttactccctggctcctgtggcggccaaggtgtgtgagtgagtcgggggctggcaccccctcagtccgggccccctgcacactcccaggccctctccaggctggagcccaccccgacccccacccacccgcctctgcgggccccggggacgcagcagcccacctgcttcccgaactggttacacgggaaggccaggatccgcaaaccacactcagcgtatcgggcgtgcaggtcgacgagctgagtgtagtttacttcggtcttgcctcactgggaggccacgttggtgacgatgcacacgaagcccctgcgaggatcggcggcgtcagcgcagaagaacacggccccctcccagggcccgaccccgcgccccaccccaggcgagcgcccaccggtacttgtccaggttaaccatgtgcccgtcgatgtccttggcggaaaactcgtgcatggagcgcgcacagcgccagtcgtcccgggacgcgcactgcaaggcaaaggaagctgagcagggagcgtggacgggaggctgagcccgggaccctgaggcaggaagggatcgggagcgggtcggtggcggggacaccgaggccctgcggccctgaagacctgaacgctcctcctccttaaacgcacacgcccccttgtacttctggtccggttttaccggagacccggaggccgggagagggttccaaccccaaaatgtgccacattagccggtgtgggggccccgcgcgcaccgggtcctgggacttgggacattcgtggatctccggtcgcaagctgcggggacagggcttcttccgccggcgccgcgccctcctgcgcctgcacgctggggccttccgccgccgaggggctcgcggccgccgcctgccccggctctggcaccgctgcctgcggcgcccgggggagcctgcgcccgcgcggcccatacccgcccgtctcccgcccctcctggctcccccaccccgagcgccgctagcggggacaaagggcccggaggccgtagtcaggactgcgcgactgtgacgccaccgcgctaggccaaggtgcgggggcggggcggcgcccgggggcgcgtgatccgggatttccagccctccgcgcccccaaccgctcgggcgcagcagccccgctcggcccggagacgccccgccgtggccctcaacggtccagctccgccccagccgtcccggaccccgccccctgcaagcctggacccccgaccccggccccggcacgcgcgcctgcaacggcctggacggccccttccccgaccacgacccgcgcgcgtggaacaaccccttccccttccccgaccccagcccgcgcgcctacaacggcctggagggccgcggagcgcgtcgcagtacggtcacccgcgtccgtgcccggccgggggtggggagggggagcccccagacgccccccaccaaggtcactggagcctgagggttccccacgccggcgagcggaggcagggatcgcgcgcccgccccaacggtcaccgggccggcaacggccgcggcgctagctcaccatggtcccggccaggccaggcgcggccagagccccacagagcagcgccggcttcagtaggcggcaaaggcggccgaggctcatcgcggcggggctgggagccagcggctcctcccctcgtccagccgaccaatggacgcgcgtcggctttccgcgcctcctttcccacggccacgccctccagagcgctcattggtcagacgcgtcggtgttgagcgctcgcgccgacgtcagccaatgggaggccggagtgggaagaaggcggggaagggggggcgggaccggacgtgcggacttgttgttggcgactgcgcatgctcgcttgtgtctaggaggccgtggcctggctggcggcgcgtcgggaggcagcgcagttatccggctggttgacagcagcgcggccgcaggccagacaacctgagaatactacttaagactcgtcgagggggtttggtttctccaactcgcagaaaagtgtccccaactcttatttacctttttttttttaagacacggggtcttgctgtgttgcccaggctaacgtgcagtggcacgatcagggcacactgcagcctcgacctcccaggctcaagcgaacctcccgtctctgcttcccgagtagctgggacaacaggctcatccaccattcctggctaattattgttttgtagacatgggggtctcgctatgttgcctaggctggtctcaaacttctgacctcaagtgatcctccagcctcagcttcccaaaagtgctgggatcacatgcgtgagccaaaggctcggccgggatttgccttttttttttttttttttccgagacacagtttttttgctcttttgcccaggctggagtgcagtggcgctatctcagctcactgcaacctccacccagcccccgggttcaagcgattctcctgactcagcctcctgagtagctgggattacacgagcgagccaccacacccagctaatttttttgtatttttagtagagacggggtttcaccatgttggccaggctgatctcgaactcctgacctcaggtgatctgcccgcctaggcctcccagagtgctgggattacaggtgtgagccaccgcatccggccaagggatttgcctttttaatgtaaatgaaaccaaactgagttgggtttgcttctcatcacagctccatcttatgggggtgtccctaccctcacccctgccatgggcgcagggggtcagtgactccccatcctgggtctggttgctgagccgcttgtataatgtgggcactgagacctgagagtcatcaagacagttaccacttaactgagaacctggagtttcctgggctcccacccccaggggcagctgcccacgcagggacgcgcggtatgtgctcagaaaataaacacaagtctggagggttttcttacacttctaacattacaaggtatgggcacacccgagcccatactgccccacatcttggct

SEQ ID NO: 1560432 - DNA, 4001 bp, Homo sapiens
cctgatgctcacagtcaagcaggacttgggaataatgcagccgagcagggcgtggatctcgaggacacagtggccaggtagtggaataatgcgtggcacatgctatactaactgtaacaggtggacaacgtcagttatcattattgcctccaaagtgccctgggtactcccagggtcttagaagggagggttccaagcctacagagagccacaaggggtctcacactgttcacacacacacaaaaccacagagggtctcagctgtacacagagaggcctaggcaccactcaatactgtcacaaaggaatacacaagggaatgttcacacaaagatggaatcaaattaagttacagccacactcacagagccccagacacacaacaatgtcacaaatgtaacttacattggcacacagagctaaatgagagtttcaagccaggcgcgatggcttaagcctgtaatcccagcactttgggaggccgaggtgggtggatcacctgaggtcaggagttcgagatcagcctggccaacatggtgaaaccccatctctactaaaaatacaaaacttagccaggcgtggtggcacacgcctgtaatcccagctactcaggaggctgaggcaggagaattgcttgaacccagcaggaggaggttgcagtgggccgagatcgtgccactgcactctagcctgggcgacagagccagactctatttcaaaagaaaaaaaaaaaaagaagagcgtttcagagctaaattacaggcatatgcaggcacagagggtcatggtagaacccagagccccaggcacacttgtacacacaccactaagtcacaatgggacgcacactggtaacttacagcaacgcttggagctacagatagaattaatggtaaaacacacacagcccaagaaggatcagagctgctacacacggtaactccagacacatgtacaaacactccaacgtcacactcagacacacaggggtaatttatatttgcacagggagctacagatggaatgagacacaacacgcacacaaccagctgctcacagccacagatttggagccccagacacacacaggtaacttacagtgacacacagagccgcggtcagaattagtggttaagttacacgcaggaactctatcagaggcccaaagctgctgcaggctagcagccccagacacacgtacacacacttgcaagacaattcacagtcggaagcacatgcgcccacctggaccggaaggggagtaagaagtcaattccgagcacacaggaccccccgccctccatgacctcaagcacgcggtcctggagagacgcaggaagcccccacccccggcagccccgagacccgcaacagccaaggacggtgggagggggcccaggcaggagggggctgcctactcccggcgcgcccagggctccgcggcctgtgggcctgggctggtcccgatcctgtctccatcccaggccggagccccagttcggcctcgcgctcacccctggcttaccaggcagggggttgccaggcctgagggccctccccgccagatgaacccgcgggcccccagccaaaccccgcaacccagtgcgtcgcgggccggcagtggcgacccagaccccgggccctgccctgcgtccgcgccccactccccagctgcacccctcgcccgggggccccctgccccgcccccaccccgatcgccccggccagagccatgtgcagaggcccccgacctctgcagcggccgctccgccccctccccaagcccgcggcgccccctccctccggtggcctcccccgcgcgcccggtccctgagctctagtcgcccggtccttactcgaacatggatgcggcgcggtgggcgcgccccgggcgcagggcagggcagggcagggcagggctgggctgcgcggggctgggctgcgctgggcgtccccgcagggcaccggcctggccttccgcggccgccgcccccacccgacccaaccgcccgcacaaaaggccggagccgccggaggccgccgcggcgtcagcgacacccccttccttcccccgccccgccgcgtcacggcgccgcccccagcccgggagggaaggcggggaggggccgcagaggcctagaaggagggagaagccggggagagagggactggacagagaagggaaagcagaggggcagagagacagagaaggaaacaaagagactttattaaaaccaaacatcgtggaggcagctgcctgcccgcaggttggggagccccctcccctagtacctagaaaagggtccctagcaactactatgcccctggccagaagctcctggacctcccagggaggaacctgagagccggggcgaaggtgggggaggactggagatgctgggaaaccgaggtgtatgtatgggggagggggcctgaagctggcgggaaggggtggggccggttggccgcctcctccttccctctcccagtctctgagcccgggttcctggtcccaggaggtccggtgcctccgtttctagggacttcccagttttggtcagccaggccaagtaccaagtcagaatccagcctccctggctcttatctgtgctgagaccttgcgctcatcaccccagtgctgggagtcccactaactcggtggtaagggcttttcccggggacagcgcaggaacgggcaaaatcagtccttttacggaaggagaagcccggcctctaagatgggaagtgacttgttggggtcacctggtaggtaggcggcagagttggattcgatcctgctctgacgccataacctgcgtcccccctcccccgccccgtctgcaagaggtcagagtcaggtggtgtcctggactcctggcccaaccacacagaaatgcgagtcccacctcacagctccggggctgtggctccccagcgctctccagggtacgctgtccccgcctcttttgaaaaaactcccttcccaaccctctccatcaacccttcccctcctcctgcaaaagaagcccacctgacttctccattttgatgaatggcaggcccagaacttcagagtcttttctgaccctctcttttccttcacaccacatccaatccgtcacaaactgtgggctccacgtataaaatcaatcgctccattctaaactcttcttcctccgctgcccacgccctggcccagcctccatcctctcctgcctgatctccctgctcccatccctgcccctactgtctgttctcacctgcagccagagagagcctgggaccacctgagtcagttaactaccctcctggctcagagccctgccccagctgtacctcactccaggtaaaagcaaagtcctcaccttggcacccaaggcccctgtcagctctctgacttcagctcctcatctccccctggctcacaccccccatccagcctacccgctgttcttctaactcaccaggcaccttcctgcctcctaccccaagacctttgcactggttattccctctgcatggacagcaccccccctatcgccgtgccctacctctcatgctaacccccacctctaaaacccccatccaccatctgacatttgctgcctcccaccggccaatggaagagaggccctcctcccaccaccttcctctgtccaactgatctctttagatttctctttggtctgtttcttctagtgtaatgcttttagttttttaattaaataatatttatttcaggtcaggcgcgttgggtcacgcctgtaatcccagcactttgggaggccaaggagggtggatcacctatcaggagttcgagaccagcctggccaacagagtgaaaccccatctctatcaaaaatacaaaaaaattagccaggtgtagtggcttgcacctgtaatcccagctacccaggaagctgaggcaggagaattgcttgaacccgggaggtggaagttgcagtgagccaggatcgcaccactgcgctccagcctggaca

SEQ ID NO: 1560433 - DNA, 4001 bp, Homo sapiens
gaaatttgtccttaggtcttttagtgacatgagctaataagttctcttttttccttaaaccaggctgagtttggtttctgccacctctaactaaaggcatcataactcaacacctcatttcctccaaactggctccttctggaccttccacactggtaagggccccaccattcacacagaccagatgcctggaaatggtccttgccttcaatctctctcctgacagccagttagtcaccatgtcctgtctcttctttgtcctcaaatttctcacatgtatccccttctcttcaaccccttggcccctgacctagtttaggactctcaactcagacatatatcagagtacacactcatcacccaaatccagtctccagattctctttccagaagcctcactccctggtatagacctatcaatggcttcccagtgcctgtgggtgaaggtggcatctttcaccctggcactgtagcctccttgagccagcgtgacaatctgcacagcctcgcttcctactaccctgtcacacttagctctgaagtatctcacaatctctccaaatatgtcctgaatccaggtggattcaggatgggctcaaccccatacccccccatttcttggctccaaatacttccctctgctcccaccccgatccccacctcatctccagactctaggcacatgactggaatgccatctgcctcctcaccctccatcccagcttctcccaagttgtactctgtgccacatcagccaaaaaagcctgtgaaatgccataccccattcttcctcttactgatctgaaacatacacgaacaccataaagcctctgataaggcctgcaggaaagaaacctgtctaaaacatgttttaaggcagcatctcccaaaggtctaactccagcacatctgttcaagtgacaccttcgaacattcagcccatcagtattccatagacacttccacacccctgtgatgtggccggccgtgcttggagccacgccactctttctacatcctgttcacctttcagagctcagtttcagactagccttctccagaatgcctttgctgaccctcgcccaagcctcctgccctccatgcctggggcttgttattaagctctgggggctaacaagcatccccagccagctgggatgatagggcttatcttttcaacgccgccccgtgctcctccagagcagaactggggcttatgctctccctcctctccaacccccaggcccagcagcagccatgtctgggaagaaggcagagacaaacacaaagaagggggaggatggagctagaagaggacaaggccaggccagaggccaggggcagagggatggactgagggccaccgacctgccctgcctcaccccacgcccccatggccccgctcactggtgtccgtggtctcgtactggctgtcccgctgcagctcaaagatgtctacttccactcgggccttggctgggacctcgatgatcccgttgatctgctcccgggccaaggccaaggccagacgctcaccgcggccacacactgtctgatcatccaggattgcagctgaggggacacatgggttggggaccagactcctgagtcctgaggaaggagggggctgtggtcttagactccagggctctagggtgaggtgggtatacggaccaggggtctagacacctggatctgaggttggtgggagctaggggtctggactcctgggtcctgggggaaggaggaactggaggctgggattccttgctgctgaagagagctgagacctggaccctgacggactggcatgcctgggtccccagaggagccccagggcctgaggatgcaggggcagggtgcgggagggcctcacccatgcgcagtgatgagagcacctggcagctggggctggcgaaggcaacaatcagcagcagcagcagctcagccggcatcttcctcccctcctcatggggacgcagctgccgcggcccccactcgccacctgcagggagaccccccagaccaaggggagattactatgtggtgggatggaaccccttggaggcctgctggatggggtggtcacagaagccttggggacattgttggcaagcagttcacagctctgcagagccctgctctgtttagaagctggcaatactgagggcattgcaagaagggaagctcagctcagaggggcactaccagggtggaggtcacagtgctcaggcgctgagtaggacaggctgcaagagagaggatgggcacagctaccaaaacaggagggaggcgtgcgaggttctcaggtaggagtgaattcctgggaccagccccacccaaataggaaaccaggaagtgccaccccccacccagtcccgcccctgtctctgggcaggcagccgttactaggcaacagaaaccggctggagaggatgcggtggttgctaggcaaccccatcccaggcctcacttgccactttcctaacatccccagttcccacaatcccatggggagagaggcctggacatccgaggtctggaggagagagtatctgggagttaggaaacttcgggagagatggagagatggagaaaaagagagagaggcacacacagaaccccatagatgaatggacccagagcagtaaaagggggaaaaaaaaaaaaagcaaagagagagaagggaggaaacagagaaagtgaaagagaggcttagagaagggaaagacagagagactcagaaagagagaaaggtcaaaatagatagaaatacaagggaagagaaagacaagacaataggaaaatgggggtagaaatggagagaaaagaggagagttacagggaggcagggagaggactaggagggagaaagagggaagagacaggaggatgaggaggcaagataaagaaaggacagagcagggagcggaggaaagaggggcaggctggaggtggggaaaccaaggcacaggcgagacacaggaagagggagacagaggatggagaaaagataggaaccgactcggatacaagcaggaagagctggaagggaggagtgagtaaggcagggagtggagctgcctgccagaagtgggtgccataccactgccccccaccctactggggagaagaagtaaagggggagatggtgcatctttgctcttcacaactctccacccctaaggagtcagggattcctctaggcaccccagctttctgcagggcaaccactgggcaaggagtttggccagatgcacagctccacttcccctggctgagggctgtgccccacgggaagggatgcttgggtttccatggagtagggttactgtggggggcacagaatgctgtgaagtgggcctggacaccggaccccactcagtccccatggaaggacagcttgagctggtgaaactgtggaatgagaacttcgagggaaggatagaggcacaagtccttctcaccatctcaagtggcctgcaaaacctaggctggggatcagtcccagctctgcccctgactcactgcgtgatcttgagcaagtcactgccttctaggcctctgagaagaagagagtgctaggtgggagggtatgctggacaggctggggactgcaaactataatgtggattaaggtgaaggcttgtcaaggatggaggcacaagggatgctgggagacccggaggagcgctcagagtgggaggagtgtgaagggcggagctaggagagaggcaggagtggagtgggtcatcctgagacaccagggactcctggggcaaatcagggagcagaggacaaaggacagaaagaccgagggagagatgggacagaaggacagggacccacaggtggcagccaaaggtgggagcagacagagaaagacagggttgaggggcagcaggtggacacagagatacacacagaaagacagcccaagacgtaggaactgaggctaagtgagagagcaagagacagacacagcctagaagtgagacagc

SEQ ID NO: 1560434 - DNA, 4001 bp, Homo sapiens
agccatgcctgaaatttgtccttaggtcttttagtgacatgagctaataagttctcttttttccttaaaccaggctgagtttggtttctgccacctctaactaaaggcatcataactcaacacctcatttcctccaaactggctccttctggaccttccacactggtaagggccccaccattcacacagaccagatgcctggaaatggtccttgccttcaatctctctcctgacagccagttagtcaccatgtcctgtctcttctttgtcctcaaatttctcacatgtatccccttctcttcaaccccttggcccctgacctagtttaggactctcaactcagacatatatcagagtacacactcatcacccaaatccagtctccagattctctttccagaagcctcactccctggtatagacctatcaatggcttcccagtgcctgtgggtgaaggtggcatctttcaccctggcactgtagcctccttgagccagcgtgacaatctgcacagcctcgcttcctactaccctgtcacacttagctctgaagtatctcacaatctctccaaatatgtcctgaatccaggtggattcaggatgggctcaaccccatacccccccatttcttggctccaaatacttccctctgctcccaccccgatccccacctcatctccagactctaggcacatgactggaatgccatctgcctcctcaccctccatcccagcttctcccaagttgtactctgtgccacatcagccaaaaaagcctgtgaaatgccataccccattcttcctcttactgatctgaaacatacacgaacaccataaagcctctgataaggcctgcaggaaagaaacctgtctaaaacatgttttaaggcagcatctcccaaaggtctaactccagcacatctgttcaagtgacaccttcgaacattcagcccatcagtattccatagacacttccacacccctgtgatgtggccggccgtgcttggagccacgccactctttctacatcctgttcacctttcagagctcagtttcagactagccttctccagaatgcctttgctgaccctcgcccaagcctcctgccctccatgcctggggcttgttattaagctctgggggctaacaagcatccccagccagctgggatgatagggcttatcttttcaacgccgccccgtgctcctccagagcagaactggggcttatgctctccctcctctccaacccccaggcccagcagcagccatgtctgggaagaaggcagagacaaacacaaagaagggggaggatggagctagaagaggacaaggccaggccagaggccaggggcagagggatggactgagggccaccgacctgccctgcctcaccccacgcccccatggccccgctcactggtgtccgtggtctcgtactggctgtcccgctgcagctcaaagatgtctacttccactcgggccttggctgggacctcgatgatcccgttgatctgctcccgggccaaggccaaggccagacgctcaccgcggccacacactgtctgatcatccaggattgcagctgaggggacacatgggttggggaccagactcctgagtcctgaggaaggagggggctgtggtcttagactccagggctctagggtgaggtgggtatacggaccaggggtctagacacctggatctgaggttggtgggagctaggggtctggactcctgggtcctgggggaaggaggaactggaggctgggattccttgctgctgaagagagctgagacctggaccctgacggactggcatgcctgggtccccagaggagccccagggcctgaggatgcaggggcagggtgcgggagggcctcacccatgcgcagtgatgagagcacctggcagctggggctggcgaaggcaacaatcagcagcagcagcagctcagccggcatcttcctcccctcctcatggggacgcagctgccgcggcccccactcgccacctgcagggagaccccccagaccaaggggagattactatgtggtgggatggaaccccttggaggcctgctggatggggtggtcacagaagccttggggacattgttggcaagcagttcacagctctgcagagccctgctctgtttagaagctggcaatactgagggcattgcaagaagggaagctcagctcagaggggcactaccagggtggaggtcacagtgctcaggcgctgagtaggacaggctgcaagagagaggatgggcacagctaccaaaacaggagggaggcgtgcgaggttctcaggtaggagtgaattcctgggaccagccccacccaaataggaaaccaggaagtgccaccccccacccagtcccgcccctgtctctgggcaggcagccgttactaggcaacagaaaccggctggagaggatgcggtggttgctaggcaaccccatcccaggcctcacttgccactttcctaacatccccagttcccacaatcccatggggagagaggcctggacatccgaggtctggaggagagagtatctgggagttaggaaacttcgggagagatggagagatggagaaaaagagagagaggcacacacagaaccccatagatgaatggacccagagcagtaaaagggggaaaaaaaaaaaaagcaaagagagagaagggaggaaacagagaaagtgaaagagaggcttagagaagggaaagacagagagactcagaaagagagaaaggtcaaaatagatagaaatacaagggaagagaaagacaagacaataggaaaatgggggtagaaatggagagaaaagaggagagttacagggaggcagggagaggactaggagggagaaagagggaagagacaggaggatgaggaggcaagataaagaaaggacagagcagggagcggaggaaagaggggcaggctggaggtggggaaaccaaggcacaggcgagacacaggaagagggagacagaggatggagaaaagataggaaccgactcggatacaagcaggaagagctggaagggaggagtgagtaaggcagggagtggagctgcctgccagaagtgggtgccataccactgccccccaccctactggggagaagaagtaaagggggagatggtgcatctttgctcttcacaactctccacccctaaggagtcagggattcctctaggcaccccagctttctgcagggcaaccactgggcaaggagtttggccagatgcacagctccacttcccctggctgagggctgtgccccacgggaagggatgcttgggtttccatggagtagggttactgtggggggcacagaatgctgtgaagtgggcctggacaccggaccccactcagtccccatggaaggacagcttgagctggtgaaactgtggaatgagaacttcgagggaaggatagaggcacaagtccttctcaccatctcaagtggcctgcaaaacctaggctggggatcagtcccagctctgcccctgactcactgcgtgatcttgagcaagtcactgccttctaggcctctgagaagaagagagtgctaggtgggagggtatgctggacaggctggggactgcaaactataatgtggattaaggtgaaggcttgtcaaggatggaggcacaagggatgctgggagacccggaggagcgctcagagtgggaggagtgtgaagggcggagctaggagagaggcaggagtggagtgggtcatcctgagacaccagggactcctggggcaaatcagggagcagaggacaaaggacagaaagaccgagggagagatgggacagaaggacagggacccacaggtggcagccaaaggtgggagcagacagagaaagacagggttgaggggcagcaggtggacacagagatacacacagaaagacagcccaagacgtaggaactgaggctaagtgagagagcaagagacagacacagcctagaa

SEQ ID NO: 1560435 - DNA, 4001 bp, Homo sapiens
tgagggtccagacaaggaagggttctctcctggctgtcatgctcctgtctggttgccatggtagcgcaggcctcgtccaccccacagacagccagggcgggggaaaggtccaccacccctcccctgcctcgaggccacagcccgtcccctctgcccaccacctcaccttcccagagatctcgggcccctgtctccccagggaaggggttgggggctcctagtatgcccatccctccccgatcctggcttctcttcgctcctcctttccattgcccttccccaagcagctggctcaatcagcgctcagaataacccccccactccgccccaaaataacccacagctgtggcctggcccccgcggggttaacactcacgctcccctccattcccagtggctgctcaccctccagcccctcctctgcctctcccagacccacccctacctggcttctgctcttagggaccccgcgtcccactccctactgaggcccaggagggcagcccccggccccacccttctcacgggggctgcatgctcagttcctaaccacagggattagggagagcagcctcccccactccagggcctgaggaggggcatccccagtcctccaggactctgaaggcccaacccccagaacccacgccctcagggatcacagagtccagcctctggacaaccccccgctccccccgcctccatctctacctcctcatgagcctccgtttccacttccatctgcatagggctaaagtccccaacactcatctcctgccctgtcagggactcaggagactgagctcccagcctgccttcctcagacggaagcgctatcccctacctcctcccgtaaagacccaggagtccttctggcagccccttcctcccccaggccttgggagtctgggcattcggtcctgttctttcccaggacccaggaggccaggcccctcctgccccaagactctggaactccagtgcccagcctcctctccctgcaggaaccaagagtccaggtccccagctcccctcttcccccaaggacccaggagtccgggttccggctcctgtcctcccttaaggatccccttttggtttcaaaccctatccttcccaacatcctgggtgcccccccaccgagctctggcctccctagtcaccccacttagatcctgtacatagcacagcctgtccccaagcggggaggaggaggagggtgccagaaattcctagggtgtccctgtcttcattgccccccacagcatccaacagagaagagaggagcggccacttcgatcaacagctccccccacaacctcgagttgtgctgcagacggcatcccgtttcctcccccctcacctcccaacacacacacacaacatcggtctctccccacccgaatcctgatgcttggaagaggctggaagggtgttccagaaccttgaggaaggggtgggagcttggggcgaggggtgctgggggcctggatgccctcaaggtccttggcgggggtattaatagcagactcatagctctgacatgggaggggagagcgagaggagagagggagaggaccggctcgcgatggggggactgatgcagggaggggggtacagggagaaggtgagatagagagatggaggcacagggatatggggcatcaggtatgtggggatggggagagggagccaagtgtcagagaaatgggggcgtgaaaggtctgaggtgtagggactcaggaaaaaggggctcagagagggagagagagagggtggaggagagtccctgagggacaggggagctaggtgggggtcaagacccctgcccaccgttcaaaccccctccctccacgaggcttcttgccaacttcctctgtcctagatttgggggtccacattcccaccaccatccctgcatcccctgtccccgccttaccttttcatgaccctgttctgttggggggatggcgggggggccaggaccggaacccggcgtccagcgaccccaagattccgaggagggctcagagagccgatgtcggggggcaggccccggggcggcggcagtggtggtggcggcagcagcggcagcccggacctcctgtctgtccctggctccgtctctccttcctcttccttggtcctgtcctgccctgtctctcccccaaggttgcggccacctggactaggcgaggacgtggctacacatgttgctctggaagttgggccccggacattgcagaggctgtcggggtgtcctcttgccgccccgaccccgtggggatcccccctccgcccacccggggtgcccccctctgccgcttcagccccggctcctcccccctttccatgtgtccagtcccgcctctccctggctcactcgcacccccgctttgtgccctcagcccccccacccccccttccagcgtctgtgtctatctgtctgtctgggtcacctctgaagctagtggctggtgtgtgcgtgtgaggagcgggagattgcctgcttggggaactgcttgccccttcctcgcttggccacctctagacccccccttgactcccccactctcaaacacaggcagaaacacacatacactcacgcacacacgcacgatctcacttccctgggattccccctcaacacccccagagcttgaggagggacacacacacagacacacacacacagagtggggggtctaatgggggccaggctgccactgctgataggggctgtttggacagacaggaggacacaggcagccggggacgcccagacgcctggccggacgcaggcaggaggcacagaacccaggtacacaccatccatctgggtttgggggggccggggggaaggagcgggagccccacgacacccaggcaggcagctcagggtcggtacagacagacagacccctccctccctccgccgccgcagcgcttacagacacaccccccctccaccagccagccccagacacccggacacacagatcctcaccgggcagatggcagacgctcgagagacccctgggggccgggccgacctacccaggcaacacccccagcaggcaccggtggccgagggaggctgcgggaggctgcgggcgagggtggcggcggcggccgcggcttggaggagctggagcgggagggactcacacactcgctgtgttctcgcacacacacactcactcgggatgcgattaacattcagtccccgtctgccactgccgggagacccacagccccccctcctggcctccctggggaccccttctcctgccaggcttggggagggggccgccccccacccctagctaccagcctctgccttcctcctgggacaagggagtgaggggctgaaaataaaaagggaggaagaagtcaggctggggacaggcaggcagggactcagaacccggtatggagacaccagcttcagagctagactccagggctgggggttgctgccctctgcccccgccctgccttgaggctctggaaacaggaggcctttccctgacttcagtgttcgccacactaagacccaagctgtggcttttattgccccagaaggccaggcctgaaaaccaggtctcgaccctggtcccaggagtcccaccccccagcccctcctccctcagacccaggagtccccttctctactgggacccaggaatttggggaccgcctccaagtcggagtctcttttaaggactcagtcatcccgactctcccccgtacaagccaccctcagggacccaagactcgtggatgtcacccttgggcaccccgtccttccagccctctgaagaaatcaacacgcctgcaccccttcttttattgagggaccctggcctccatcatctgtgggtaccccatcatccggaagggaagccacgtctgtcccctcatagatgcaggagtccagaccacaggctgttccccgggggtcccacacccagatgcccagcattcccctcctgctagag

SEQ ID NO: 1560436 - DNA, 4001 bp, Homo sapiens
gctggagtgcaatggcgtgatctcagctcactgcaagctccaccactcccagcttttttttttttttttttttttgtatttttagtaaagacggggtttcaccatgttagccaggatggtctcgatctcctgacctcgtgatccgcccgcctcggcctcccaaactgcagggattacaggcgtgagccacagtgcccagccaatatatatatatcctgagtagctgggattacaagcacccaccaccacgcccagttaatttttgtattttttgtagagatggggtctcgccatattgcccaggctggtctcaaactcctgagctcaagctgtcctcccaccttgggctcccacagtgctgggattccaggcgtgagccaccgcacccggccctggatttaacttagtatattaaaggtgggagagctttgccaggcccctcgggttggcagggcgcttcccagggtggaagcagggtgcccagtgctggaggatgggcttgggatggggctcagtccccagggggccaagccagtccctaagacgctaggtcggtcccacgccccggcttgcggcggtgcagctcctggagacggcagcagagggcgccccaggcctgggtttgggccccgcctctcccaccagccctagggcggtggggggacaggggtccccttgacacctggagagctgggctaagagaccccccctctagcgtcagggtctccctccctgaggagagggaggggctggaggggcctctgagtgggttgggaaggaggggcagctggggcatagagctcagccaggcccatgtccggagttgggacctccttgctggccacgggagggggcttgttatctggggcgcagtgagccctgttgggggggacaacagggaccccagaacccagtcaatcgcccttctcttcttccgtttcctcccgggatctgggcctggggtggggttagaagagaggaacttgaaggctgccaggggttggggggtgggaatggagtcggggttggaatgatggaggctgctctgggatcttggaggcctctgggaggggacggggagaatgctggaaggagggagatccagacctgcagaccccgaaactgcacccctagagtgaggagggagaccgcctgtcctccagcccagccacccagagccgggtggggaccaggaggtcccagggaccagggaagggtctgtggggaaggagggaaggggcctgggcaaggaaggggcagaggccacagtggcggggtccccatcaccagggcgctgggaaggggtctgcaggggcgttccaggggcgtccctggagctctcaaccccgcgtctaggtccctgcccctgggtctcttcctctgggttctggtttccttgctccggggacacccgggtcttccccatccctgatccctggggcccgtccagcgtcccgggatcccccttccctgcgtagtcccggcacccccatcctgactccggacgtccccagggctcccgaccccgctcccgccccgggtccccctcgtcctgactccgggcgtcccgcgtaccggggctccgaggggcgcgcgcgcctcccgccgcagcaggctgagcacgggggtctcggtggccgccgccaggaagtgcagctgcagcagctcgggccgagcctcgggaaaggcgagcagggccgccacgcccggaggcaccagcgcctggcacaggccgcgggtcagcgaggcggggtcgcgggcggggggcgcggcgaccaccagctccaagctcaggttgtgcggcagccgcggcgccagggcggcccgggccagggcggcgcgggcgcgggcgcgggcgagaggcgcgcggggcaggagggcgcccaggcgcacggagcccccgaggcgcgccaggacgccgcacggctgagggtggccccccgcggaccccggccccagcgccagcgccaggcccagccacagcgcccgcacaaactccatcgcaaagttgtcggcgtcgctcgccacggggcgcaaccaccgggaccacggcgcgggtggagggccccggccaggttccgacgcgccctccgcgctccgcccgggcggcctccgggttcccagcaaccgcgcggggggagtgggacgtgccctgcccagggcgggatgggggggaaacagtgcctcccagtggttgtttgaggccggcggcggtgacacctggcgggggccggggacgcctaaccactgcccatccctgctctgattcaggccacagatggaacggaggtgccaggaaaagactgcgctttaaaattggccccgacttgccgggcgcggtggttcacacctgtcatcccagcactttgggaggccgaggcgggcagatcacgaagtcaggagttcgagaccagcctggccaacatggtgaaagcccgtctctactaaaaatacaaaaattagccgggcgtggtggcgggagcctgtaatcccagctactcgggaggctgaggcaggagaatcgcttgaacctggaaggcggaggttgtagtgagccgagatcgtgccactgcactccagcctgggcgacagagcgatgctccgtctcaaaaaaaataaaataaaataagaaaataaaattggcccggacgcccaccccgttcctctccaggatccctgaccccttccaccaatgtcgaccattgctcaggcagggaagttgaggcccaggaagggtcttgcttgtctcgcacatccagggagctgtcagtttctaaccaggccagcccaggggtgtgttctaacatccagtgcaccctggggaaactgagacaggcatgtctgatggaaacctatagagtagatctgccctccagcagtgggcaggcaacttgggccacagaactcctcttcacccttcaaaacccagtcccaaatgccctgccctgaaaaacgttccctgcttgccactgagaaaatgcagaaagcaccactccctgccccatttcagtcctgctgctacccacccccaacctccacacatttccataacggcctaccatctttttgttcatttccttcttatttagtgaccatctcttcaactcagctctgggagggttggggtgggtctggtttggttgctggcacacagtaggcactctataattgcttgtggcttgagcaacggcccagacaaggatgcttgctcacatgcccctcctccagtgctctagagccttccatagctccccgctgtctaccagtccccaagcctgcctatgtcctctgggcctcggggggtgccttctggggccctggcatcccacaggcgcctgatagatgggggcggctgcatccgtctatccatctagcagaggacctcctccctgcccaggcattcctcatcctgtcctcccgacggtgtctccccagatcccgcggggcagcagaacagccgctgtgttgggaacattcagctctaattaatggatctacactccggcgattttctcacacacacacacacacacacacacacacacacacacaccccaaacgtcatctccttttggagccagcgttggagaggtaggaaaaaaatcctccatgaaatgaataaaatgccaagtgccagccagtaaaatggattggattttgagacgactggggagggacggagggagggatggctcggttccaggaacccgcaggccaccccctccagccccctggccaggtgtccccgggggcaggacaaggggtcccctccctgggtctgcgagaggtgctgggtcctggtgtcctcagggaccactggggccccgtccctccctgggttcggctccctctgaggagcaagagttcctaggggcagagactgtgtctgccctccgggaactcaccctcgtgccctgcctcagtttccccatctgtacacgggcaacagtaggcgttcctactcccagctgccatgtggaacaagtggccacgtggaggag

SEQ ID NO: 1560437 - DNA, 4001 bp, Homo sapiens
aatctaaaacagtacctaacatgtaatgacactgatcataatagctaaattgtataaaactatgtgacaagtacttttctaaaaactgaaggaggccgggtgtggtggctcacgcttgtaatcccatgactttgggtgcccgaggcgtgcggatcaatcactcgaggtcaggagtttgagaccagcctagccaacaaggcgaaaccttgtctctactaaaaatacaaaaaattggccagatgcggtggctcacgcctgtaatctcagcactttgggaagccgaggcaggcggatcacgaggtcaggagttcaccaccagcctgatcaacattgtgaaaccccgtccctactaagaatacaaaaattagccgggcgtggtggcgcgcacctgtaatctcagctacttggctgaggcaggagaatcgcttgaacctgggaggcagaggttgcagtgagctgagatcatgccattgccctccagtctaagcgacagagcaagacttcatctcaaaaaaaaaccaaaaaacaaaaaattagaagggcctggtggcaggcgcctatagccccagctacttgggaggctgaggcaggagaatcccttgaacctgggaaggggaggttgcagtgagccaagatcgcaccactgcactccagcctggacaacagagcgagactccatctcaaaaaaaaaaaaaaaaaaaatgggccaggcacggtggctcacgcttgtaatcccagcactttgggaggcagaggttgcagtgagccgaggctgcgccactgcactccagcctgggtgacagagcgagactacgtctcaaaaaaaaaaaaaaaaaaaagaacatgaggaggtgttgggagttatggacacaggggatgggtcagatgtgtttcagagtatgcagagcaggctcctgggaccatacttacccgaactcggttgatgccaccatagtggggcaccatggccagctccagctgaggtttccgctcttcttcatcctcttcatcttcctcctcttcttcttcatcactgccctctgagggtgggggctttgtcccatgcagattgtgcatccgaagcatcatcagtctgggagaaattgtggggtgagttaggcactagattccaggattcttaggaaggagagaggctggaaacccagactcctggatctgcgagaggcagaaactggaagccctaactcctgggtgctgaggaaggggctggaaactgagcctcctggtcctggaaaagcctcgggtcttacctgttgctctgggcgctctcagcctgggtcccagcacacaagtaaagtgtaagaggaagctctgtccggttgtctcccaggtgatcccggactatgtcaaagctgagacagggggcgcctggggatggaaggcggggtttacgagttaagacgggacagtaagagctcagtccccacctccctcatggatcaaccgcctccggtatgaaatcacttctcttagaccccagccttctcttcccgagcacctctcaggttaaaggctcgggatcagccacctcaggaccctggagtccggactcagccctaccagtctgcgctcggtggtagagcacataggcctcctcgtccatgaccagctcctccccttcgcgtagcggcggcccccggccgggcaggtagacctgggccgggccctcggaacttgtgtcgccggactcggcttccatgggttccccggtttcacacgtgcgccgccgacccttgcgcgccgccatcttcgaaccctctcgctgctgacacccggtaagagcgtcacttccgggtttcgctttccgcctaatgagatccgccctactgcgcggttaccttggaaactcctgggaccgctaatcggagagggtgcggaaacgctggaggagaactcaggtaatggcgccagcgaaagaagcctgcggatacggagaaactgcatcttcgcgtgactttgggcgctgttcctcgcggtagtggcaaggccttctgggagttgtagttctacgggaggcttgttttccccattgtccagtttgattccgagagcgttctttccagttaattaattattcatatatgcaaatttgctctttcactggcaaggagactgagtttctactccccgaggacccataaggccggtttcttttcctctctctgttgtgatggctttcatttgtttcaaaaatgctttcttgtagacaggatggatattatctgtaagttaggcggttcaatctaccctctaggggcagtcaattgcctaaccagacattcacatttcagctctggtcagcgagcacttaatcagaaagtccaccctctggaggcagctattacaagtgcttcgtctctctttatcgcccatcagcaccagcggtttggctaattgacataatgaaatgttagaaatagattctcattggtgagattaacagcattcaagataatgcggattggctgggatatgtcagacactctcctagcttgcatgaacaggatattgagaatgtagcaagccttggtacctatagccataggaaataaaaccatacctttgatcttaatatgttttgtctccgggatctatctcaccactctcttggggtctcttatctgccccagtaccctctcgactttcttttcagggtctcttcccacctcctctttcttggtctttgtctccccaggcacctcctttcagagtctctgttctctctctaattctgtctcctcttcccctgtgggacttttgtgtttctgtttcctccagagaatttgaggggggctaacagatacggagcttaggcttggactgaggaggcataaaaacatggtttattccaaacactgcaatgtggaataagagagtgggaagggaagttggtggagaagtgtggactcccagaccctcccctccgcaacccagccccagacccggctggagatctgggcagaggaggctttttggaggtctgctgggtcatcactgaagggtcgcaaataagggttggatttggagaggatgtgcttggtggcaagtggggtggtccggaggtgcggcagggtgggaagttttggcttcagggaggttgggttcatcgcggtgcaagggaaggcggggcttccgttggggacgtgtcctaggtcagagtagggaaaagcgaccgagggtggaagaggaggagggggtgtcacggtttgatgtcaagggtcacagtctggtcggggcacagtctggggttcgggtcacagtttggggtcaggggtcacagtctggagtcggatgaccattttaggagtcggatgtcacagtctgggtcaggggtttctgtgtggcggggccaaggtctggggtcacagtttggcgaacgcgtctcacagttttgagtcccaatggatgaaaggttaaaaacgggcttccccggaggcgcggctggggccggggagctgcacagtgatgtgggggccacggccccgggcgtggaggtgggacgcgggagtggcgtgaaccccccacctcccgccccatctggtgacgttaaaaagcccttgtcgggtttaaaaaaaagtccggtgggctccaaggcccccgccccctcgttctcaggctgggtgatagttgagggaccaaatcctctccggcttgcggttcctccagaaccagggggcgcaggacgctgctccaggcggggtccggccagttccactgctttccttcccaacccacgcgggtcctgtccactgcgggcgccccctcgggccgtggcctgcgctgaccaagggggcggtggggcccccggggccgcgtcatacctcggactcgaggctagagaagtgcgccgagcccctgcgggtgcccaggtccccgccccggtgtctccggtgggaagctgtgggcagcggcggcccccagtgcgcggcgtgcggacacctgcgagcgtggcgggagggcccggtaagcctgcgcgcagg

SEQ ID NO: 1560438 - DNA, 4001 bp, Homo sapiens
gcactaacctctctcacagcctagaggatactgacctctaagtcctcccctgtagagctggtaactttactggttcttggtgacagaaatgaatgtcctctcctgctataagtgccagtgccctgaccctcactttttggtactttgaggttagaaaaaaacactgacctgacctcttcatctgagtggtccagagacccagacccctcactatatgtgggtggtccctaatggacaagcaccaaattatgataatgatgaacctgacctttattatcaaggagctattccagcctcagtcctttgaaggaaagctataattcccaattcccattattcaaatggtggcaaaccttggtgccattcttagaggatagtgacccctttgagtaactgatgaaccaaatccatttttttgtttttttttttgagacacagtttcgctctcgttgcccagctggagtgcagtggcacgatctcgactcactgcaacctccgcctgctgggttcaagcgattctcctgcctcagcctcccgagaagctgggattacaggcgcccgccaccacgcccagctaattttttatatttttagtagagacagggttccaccagttggccaggctggtctcgaactcctgaccgcaggtgatccgcccacctcagcctcccaaagtgctgggattacaggcgtgagccaccgcgcccggccaccaaatccattttgaggggccagtgacaagttctttcagagggagataaccctacatcacttttttttttcagagccaatgacaccataccttagaacaattattaaaaaagtataaccttagatccatattctgtaggaaactgtgacctaccctgctccattccatttttgttaaaggagacacaccaagccatgtattttaaaacatggactatggacttggtttgaaggatatgctgactcccaatgtctttatatctaaaaggcagtaactattaattctcaccattggcagtacagctcaacaagatttagggtgggtaatgatgccaggtcttggttttaatagggaagatgatctgagtaccaggtttggaaagcctggccctattctttggggacaaaacacagtaacctcaaagccctgcttctaagtgatattcgctccaaatccccatcttctgaaggacagggaatgcagatccctctttttcggggttggtcttattcttgttctcttaggagacaataaccctagatccccatttgcaagcgactgtgacctctgatccaatattataatgaatagcaacatcagatacctgttcttaaggctcaaggacccaagacctcaataatggaagaacagagacttgtaacccgtttctttaagtgttagtaattctgatccacgagtaattctgatctccaagagatggtaaccccaagactccttttcctgggaggaagagggctcggatccccggtatggggaggcacagtgacctcgagctcctatctaagcacatgaaagaatctgatggatgtctgaggagctttgggaaccctaatcaccaccctacacgggcgccactagtactcacggcccagcttcaccccgggcggcgggaagctagtgcctgcgccggggcctccgctgcctcctccgccgctgccgccgggtccacccccggagctcgaggccccgacgcccccacccatggccccgacagatgcctttccgccgccggtgccgcctgggccggaggccgagcctccggggccgccgccgcctcctccgcctccgccgccgggctccgcgaacgagctagtccgcgccctgcccgagcccccagggccgcctcccgaaggcccgccgccgctcatggcgccgagcacaggcccaggctgcggggctcgggctgcccgggctgccccagccgccgccgctgccgccgcctcccccgggccctggcctcttccaggccgcgccgctctggcttgggctccggctccggcccagcgcccgccgcggggcacgccgggagatgcagtccggctgtcgtccgcgccgccgtcaccgccctcggcccgcacagagagccgcgtggcacgccgggaaatgaagtccacaaaagcctcagagtagaccgcgggaatgatgggcgggaatgacgggtcacgctgtacgtcgggaaatggagtccagggtaatctgtcagccgactgtacgacggggagccctgaagcactttaggaagcagagagcctgatgcacgctgggaaacggagtccactcactcagtctattagctgtgtatgcctcccagagctcggtgcgctctgggaaattgagtcggcccgcgtgaacctgcgggtctcgggccgtgaggcaagccgggaaatggagtcgtcgccacgccctcaccgcattgcaggtgtaaagcgatttttaaagcacgccgggaaatggagtctcaggtggtttttaagccccaggtggatactgcagttccggagatgggcgaggaaatggagtaggtttacgcgctcctctttccaggtacgctgggccgcagtccctgccgggaagtgtagtcagcaccaaggcctcagtgcagttgccacagcgagccctggtgtgttctgggaaatggagttcgacgtatcctccccattgactgagggggcgggatcgcccatgagctccaagcatgctggggaatagtccagacctgaccctctgtgaggccagtctgcggaggcttgccgggaagcgaagtccaatggccaccatcaggggcgtgtgaacgaaaggttagagactgcggcagttccctggagagacttaaaagtgtttcagcgcctccttcctcgcccccaggtccttctttaagaaagagccgaggtcgatcaaggactgctggaaaatggatccaagcacctttaagttccaggtgaccatagatcaggaaagaaaaaatgtcccctctctaaccgcaactctgcaaagattcgggaaacaaagttcccggcggtttctcagaacactaactagtcttcggatacagtctagcttttcctagcaatgtggttcgcaccaggaagctgaatggagcattaaaaagacggaaatgtcatttctgggcctggcgctgtggctcaggctgggcgccagtagctcacgcctgtaatcctagcactttgggaggccgaggctggcggatcatccgaggtcaggagttcgagaccagcctggccaacatagcgaaacccccgtctctactaaaagtacaaaaattagccgggtgtggtggcgggcgcctgtaataccagctactcaggaggctgaagcaggagaatcgcttgaacccgggaggcataggttgcagtgagccgagatcgcgccactgcactccagtctgggcgaaaagagtgagactccgtctcaaaaaaaaaaaaatcctgtcttgaaccaccattcagttttcagtttttggtttgttttgagacagggtctcgctctgccgcccaggctggcgggcagtggcgcaatcacaggtcactgcagcctctaactcccaggctcaagcaatccccccacctaagcctcccatgtaggtgggactacaggcgtgcaccatcacgcccagctaatttggtttggtttgttttttggggtggtggggggtagcggggtgggcttcgccatgttgcccaggctggtctccaattcctgggctcaagcgattctacctcagcctccaacgtgctggtatttcaggcttgagccacggcaccgggcctcccactcttgtgttttgcatcctccgcttcctaaattacaagatcccggaaagccaaaaataaggaagccagctgcctcaggttttgtgtactcagtgagtcgtcctatttatcgattaatacccgaaggagagtagcccccaaaaggcgctgggaaacagagttcctgtgtctgtatgtgtctcttcctcccccggaaa

SEQ ID NO: 1560439 - DNA, 4001 bp, Homo sapiens
gcccagtcccctcccttgcccagataaaccatggccaaaaatgtccaacagtgggcacagcttctaaatgttctcctttaaggagaggcctctggtgggcctaccaaacctaacttacagggacacccaggagctaggcctgggcctttgccatttccgtttttttttttttttttttttttttttttttgaggcagggtcttgctctgttatccaggctggagtgcagtcgtacaatcatagctcactgcagccttgaacccctgggctcaagcgatcctcctacctcagcctcctatgtaggactacagacccacgctatcagccccaactaactttttaatttttttgtagagttggggtcttgctattgtattgcccaggctggtctcaaactcctggccttaagcaagcttcctgcctcagcctcccaaagtgctgggattacaggtgtgaactactgcacccaaccctttgtcatctatcttttcttcacttggagaaaagtgagaaaattaagacttagtgactatgacagttaagcaactatcacaaccaccaaggtcagggtcaagttctctcaccaccccagcccctgacccccaggactcagagacttacctgattccacgtagcaaagttgactttgtcggctgcattaaaagccatgatgttatattttttggttgtattcctggagtggatgagaagaggtagtgtcaatccaatacagcaattcaatcattaatttaatcagtcaatgctattgaaccattaattcaatcaaccacccaactggatcgttaattcaatcaaatcattactttaattcaatcactcaattcaattgaaccattaattcaattcaatcattccattcaattgaatcattaattcaattcaattcactcaacaaacccacccagcttcattcagcctgttttgcctggcaacactggatacggaagactccaaggattcccagtctgccagagaagctagacccatcctctcctgaccccaggcagaagaagagcagatggagggacgaagatttgggggaacccaagatgtggagattattgtgaactcagccttggggaggagggaggacaggcagggagtatttcctggaggaggaagatactggagttgagttttgcagaatcatcaagaattcacccagcagagtcacagtttaggggttgaggggaggcactcatggcagaggaacaggatgtacaaaggcctggaaaggaaagacagcctgaccactttgaaacaggacgaggaatatgtccttacagctggcctgggcatcatgggaccatatactcctcgaaggttaggccagggggctggatcaccgtgtattaatgcactcattcattcattcgttcaaaaaagcagtgttgtccccagagaagcctcagcttaatcccagccctgccctccaagtctctcccggtctggagggagaaccacagacagggccagaaatggctggctaagaagatcgtgaaggttttcatttttggggggtggagaggagtgggagatggggctggggacttacttaggaactcgaacgacgtattcagtgacattctggctgctagggccctgcggaaagaggaagcggtgagtgaggggtcgccgaggtcgccgtcggaacccccgaaccccgccaaatccacactcactagggccgccatgggcaatggtcagtggttccgatctggtccgacccgggttcctttcgtctcctctggcgtgcgcgtccctcgatcccggggaagccgccgctcggtgtcgggtctctgtgcctgagcgaggaccccaaccctaggcgcctctggcgctgggaaaaggtaaccggaagaggcgctcaagctactcggtctacgcttctgcggccgcctaacccggaagcgaaaccctcgagcagccgcgtcgcgatggcaaccttcttagcgactgtggccacctcagtgcgcagtcacttatgctcctcggcggctatggtcacctcaaaaggtccaccgcggtccctttttagactcagcaaacctaggccgagtctgagataaactaacgggcctctgtcgctggcgctcttgtatataacgcggttaacttcatcaaatgggggaccgccctctctcgtgacgtcagcacccaaggaccgtggggcatcctgggtgggaagagggagacgaatcccccttgcgggctcccaggcactttgcgcatgcgccttgccgctctggacctggggggcccagaaggccgcgtcaccatagcaaccgaggcctactcgggtcgggtcgaaccgccgcttggctccccatgggtctgtttggggttcatttcctccccctaccccgaaggggtggaccccgtcattcccgcaaaatgaccggggcggggacccttgtgacgttgagccgagccaggaggggtcagagcctgggcggggtcggggcgcgaccaccccaagagctgctggccggatgggtctttgcaagtccaagctgcccgagatgggcagggctctgaggccccaggagaagggtaacgtcgcgggggcggctggctggcttcctggggggaagggaaggaagctgccgagaacaggagggagatgcaggatcccctaccccgttccaggcatgcacacatcccccgaatcatggcagtaacacaactgcgcatgctcacggcgcaaccattcattgctccacttcgcaaatactccagcacctcctgggttcggggccccgcaaggtgaatctgtcaaaccagctccccacggaggattacagtgtcctctcgagggttacagtgtcgtggaagagacagagtcacagcatgggaatctacaacccaggaaggagcaggagaagcacagcggggctctgagggctcagagaagaggggaggtttcagttgggcactgagggatgcataggagttggctaagcaaagggaaggcgggcaagacacaaaagttgggccatgaactacagacaccgtcgatgtgtctgttttcatttatttctcatccaccactaaatgtcaggaaccgccaacccctaggaatataggaatgagggaggcagaaatagtccttgccctcatggagtgtctggcttgggggagacaagaacgagtaaacggctgggcacggtggctcatgcctgtaatcccagcactttgggaggccgaggcgggcggatcacctgaggttgagagttcgagaccagcctgaccaacgtggagaaaccccgtctctactaaaaatacaagattagccgggcgtggtagcacatgcctgtaatcccagctactcgggaggctgagacaggagaatcgcttgaacctgggaggcagaggttgtggtgagccgagatcgcgccattgccctccagtctgggcaacaagagcgaaactccgtctcaaaaaaaaaaaaaaaaaaaaaagaaggaaaagaaggaaaaaaaaagaacgagtaaacagagaagatcatgacagactgtggccattgctgtggaggaaataggtgtctcagacaaggagtgatggggggaagctctagatggaggctagagaaggccagatggaagttgtggccagaaggaactggggcaggcagggattttccaagcagaggaaacagcaagggagaagtgagtttcaaattcaaagaactgaagccccctggggctgggacaaagagaaggggagtatgggttggggctgggacagagggaaggggagtaggatatggggctggaacagagagaaggggagtatgggatgagactgggagcgtgggcaagtccctgcctctcactgaacctcggttccctccactgtaaaatgggatgatagagtcctcaggatgctttaaggagatgccgtgtgtgaagggcctggcctgctcaagttcacgtctttgtttttttttattttatttttttgagacggagtctcgctct

SEQ ID NO: 1560440 - DNA, 4001 bp, Homo sapiens
gaaatccggccaggtcgactggggtctccagcacgtcacgggtggtccctggctccggggacacgatggacacaggcttccgacctgggggagggtcagaagaagaggagagggtggagacaagggagctcctcccccaggttctaccccatgtctggagggagctttagacctgaacaactaactcaataacccagctcttggccccgcccctggcactaggccccgcccccttcccgccgcctactcactgagcaggttcactaggctgctcttgcccgcattggggggtccagtgaccactacgtgcacccctgagcggagcctctgcccgcgcctggcatctcgtagatgtgcacccagggccacctgcagtgcccgtacttcgatgtcggctgtgggtgagagaaggcaggcagagagagacagtgaggggagcctttgagggctgatatgaggtgtcttcctcccccaccaccaggtagacccaccttgctccaggaccccctcctccaggttgtcatcctcgccgaaatcgatataggcctccacgtgggccagagcctggcggggcagggagagcagaggtggtgtgtgcacccagaaacccaccttcccacacccaatttgtccagcccgacttcaggggccagaatggcggctcataggccggaagctttcacgcagggaatgaatgcgggattgagagggggtctcatgcaggggttgcacagatggggtctctgagggagagaatggacaaatgggggacttgctttggtgagggtctcggcccagccacggcagaggtggcccagctctccgtccagctgcctgagggcctgccgccgctgcgcctctgtttccgcgtggataaggtccgccagcccctccacttcggtcaggttcagcttcccattggcgaacgcccgtctggtgaactcgcctgcctccgccggtcgaagccctggcacgctgcctgcaggaaggtcccagtctgacaccccctggtccccacccaggcccattgggaggaccaagcatctcacccaacgctgcaactcacccaaggcctgcaggacgccgctcaccactgccgggcctccatgcacgtggaactccacgcagtcctcaccggtgaaactctggggacctaatgtgacagacaggtgacaggaggacagcacagccagtgcaaacccttggaagggggaaactgagtcatgggacctacaggaggctcggaacctggggaccctcacctgggaaccagagcaccagtgcgcggtccagaggctccccggagcggggatcgctgagcaggcgcaggctggcgtggcgagcaaggggcaggtctcggggtgctgtgagaattcggagggcgtggccgctggcggggccgctggtccggatcactgcgatgccgcagcggccttggccagagcttagcgcgaagatggtggcgccggagccgggggctggtgcgccgctgctccggcgcgtgcacaatctggaaccggaggggaggcgaatcagcgcacctgggaggctcagcctcagtgtcaagtagaccgagggctcgatgatcgcgagatgctccaggtgggggggttctgcggctgggggatgcacaaattggatgttctgaaggccgaagggtgaccggattagggactgtgaggccagaaggagacccagatatgggctctgccgcaagggtcatgaacgattgaggcacggaagaacgcgaatgattgctctgccgcagggaattgggcccctaaaacccagggagtgggtctggggtccaagcagcaccccaagctgtcgcaccccttcccctgtagccccacctgcgaggcccacgtgccgcttgggccgccagggtccaaagcccccgccacatggatttacaacctgcgacccgcctgcccgacctgcctgtgtggcttcaagtctgggcagggggccccgcccactccgcggcttgactagtaaagtgctcaactattctcgaccaccattgggtatcttaggatacgtcctgcccaccgtctgaagatactcgcttccattggctggtgcaagggagagcgggagcgggaggcggtatggaggtaggtgtagcgaaatgttgttccccgggcaacatgagaccaaatttttagggtcctagcgcagcgaggctgacaataggaataaggaatggaagaaaggacagagtttggcacagggcagtgcaaattacagcgaggggaggttttgagtcccgcattttccatctgctcactccgcagccttaggcgtggcaaggacctatgtgcgttcagttttcccgttcaagaaaggagggactacacctctttacgttcaggttcagaccggaaactcagagcatctcggtgaccgggagggacgagtactggagaacccacgccctgatccagggaaaatcttgcccgaacttctggaaagagtcctacttgctttttccggaactctccagattctctcccctccccagcgttcccttctgccgttccctcggcttcggatgcccttcctcatttgacaaactcgtcttcaaggcctagctccaagatcccctcctccaggaagtcttcctggaacccccagcacagccctctctccactgtggacttccttggctctctgtctctctggtccaggtctgcacctgcagagccaagtgtccggtcagtctctggctccccgaaagccagaaaggggagcctcggagattgctttcaggttaacccaggacagcactgaaactcggaataaagcgctgatggtggaattccaggcactggctgggcggggtctccgggagcgccttcgcatggcggattctctggttctggatcagagcgggcgggcggcgcacttgcgtgttaagaaaaatctgtctgacagaatagagttctaatacccccttacctcgccctgctcaatatttttatttactttattattttattttattttatttttgagacagggtctcactctgtcgcccaggctggagtgcagtggcgcgatcacggctcttgcaacctccaacttttgggctcaagggatccgcccgcctcagcctcctgagtagctggaaccacaggcgcgagccaccatgccagtctaacttttcggtgtttctttttgtttgttgtttttgtttgtttgttttgttttcgtttttttggtggagacggggatctcactacgttgcccaagcttttttttttttttttttttttttttgagacggggtctcgctctgtcgcccaggctggagttcagtggcgcgatctagactcactgcaacctccgcctcccaggttcaagcgattctcctgcctcagactcccaagtagctgggactacaggcgtgcgccaccatgcctggctaattttttgtatttttaatagagacagggtttggccatgttggtcaggctggtctcgaactccttgcctcaggtgatctacccgccttggcctcccaaaatgctgggattacaggcgtgagccactgcgcccggccgaggctttaatattttaagttgtaaaataggaacaaatgatgacatatttatatttcatctgccattctctagttgttacatctgtaacaagctagttattacatctgtaacaagctagttgttacatctgtaacaagcgtacagcaagcgcctactgtgtgctcgcattgagaaccagacctggcccctcgttcctaccctcgctgggctttcagtctaacagactgagctactcagaatagtcaggggttggccaaatgccaggtaaaacccaggtcgcccagctaaatgtgaatttcaaataaacaatgaataattttttagtactagtatgtcccatgtagacataggacatagaaacatttatgtatgtatgtatatatatgtatttgagacagggtctcgttctgtcgcccaggatgcagtgcagtgggt

SEQ ID NO: 1560441 - DNA, 4001 bp, Homo sapiens
gccgttccctcggcttcggatgcccttcctcatttgacaaactcgtcttcaaggcctagctccaagatcccctcctccaggaagtcttcctggaacccccagcacagccctctctccactgtggacttccttggctctctgtctctctggtccaggtctgcacctgcagagccaagtgtccggtcagtctctggctccccgaaagccagaaaggggagcctcggagattgctttcaggttaacccaggacagcactgaaactcggaataaagcgctgatggtggaattccaggcactggctgggcggggtctccgggagcgccttcgcatggcggattctctggttctggatcagagcgggcgggcggcgcacttgcgtgttaagaaaaatctgtctgacagaatagagttctaatacccccttacctcgccctgctcaatatttttatttactttattattttattttattttatttttgagacagggtctcactctgtcgcccaggctggagtgcagtggcgcgatcacggctcttgcaacctccaacttttgggctcaagggatccgcccgcctcagcctcctgagtagctggaaccacaggcgcgagccaccatgccagtctaacttttcggtgtttctttttgtttgttgtttttgtttgtttgttttgttttcgtttttttggtggagacggggatctcactacgttgcccaagcttttttttttttttttttttttttttgagacggggtctcgctctgtcgcccaggctggagttcagtggcgcgatctagactcactgcaacctccgcctcccaggttcaagcgattctcctgcctcagactcccaagtagctgggactacaggcgtgcgccaccatgcctggctaattttttgtatttttaatagagacagggtttggccatgttggtcaggctggtctcgaactccttgcctcaggtgatctacccgccttggcctcccaaaatgctgggattacaggcgtgagccactgcgcccggccgaggctttaatattttaagttgtaaaataggaacaaatgatgacatatttatatttcatctgccattctctagttgttacatctgtaacaagctagttattacatctgtaacaagctagttgttacatctgtaacaagcgtacagcaagcgcctactgtgtgctcgcattgagaaccagacctggcccctcgttcctaccctcgctgggctttcagtctaacagactgagctactcagaatagtcaggggttggccaaatgccaggtaaaacccaggtcgcccagctaaatgtgaatttcaaataaacaatgaataattttttagtactagtatgtcccatgtagacataggacatagaaacatttatgtatgtatgtatatatatgtatttgagacagggtctcgttctgtcgcccaggatgcagtgcagtgggtgtgatctcagctcactgcagccttgacctcctgagcacaagcgattctcctgcctcagcctcccaagtagctgggattacaggtgcgccccgcccagctaacatttattcttttatctgaaatttacatttaactagacggactgtatttttatttgctaaacttgacaactctatgggatcctctccgaggttacatcctgaagggagtcggtgttaaccggacgaagagtgcatgaggagtgttctaggcagccaaatggtgcgtgcaaagttcctaagcagggcttgctgtaattatgtatcacagccctactggggtggttgaagttattgtcaccaggaatcttccccaaccggcccgcccctcccacgtcctcccttagtcaacttacgcccatctcacattccaaacagcgtctccagggtccggagtttgcagatggggaaactgaggctccgaggcggggaccagaagaaagcatgggtggggacaagttggagaatgcaccatcagtgcgggcggggaccagcagcagggagcgaggtaggcgggcgagaaggaaacccagaaaacaacacgggcggagacgcgaaccaaagaactaggcgggcgaactcagctgagaaccctagagtgacgtgcatcgggccgggaaggagaatcgaggttcggctcgggcggggacgagaagcagcgctcgggcgagcgaggaccgaggccggcgcgggcgggcgcggcctttgtctcctcctcccgcgcgctccgcggctgcaccggccccatgagcccgcggctccccgtcgcccgggccgtccgtagcccctgacctgacctgtcctcgccatggccgaggccgcctccggcgccgggggcacgtccctggagggcgagcgtggcaagaggcccccgccggagggcgagcctgcagccccggcgtccggagttctgggtatgtgtgcggcggctggaccagacagggttgcaggtgcctggggagcccgcgtcaactacacggggaggaggatcagggtcaaacgtaacctggcgtggtgtctggacgaggggccggctcctcccggcactgcggctgcggcccggcgggcggggctgggacggtgcttcgggctggggtcccggcgcggagacgcggacacgcccctccgagagccccaggcttgggctgcgccctgccacccccgggctgcgggatcgcggcgggccagggatgtgcttgagagagcctctccgcgaagaatacagaatcatacggtcctgggttcaaatcccagcttgactgtgtgaccttgggcgcgtgacttaaacgctctgggcctcagtttcctcacctgtgaaatgggggtaagaaccgcacctagtccctggggctgctgcaaggacggcgctgtcataatgtggtgaagcgctcagggctgctagtgagcgccccatcgattgtggttttggaggcggagctgggcctcaagaatgagtaagatttgtaagggaggatctggggggaagggcatttctggaggaaggcctggctggtacaaggacgtggagggaggaaaataagccaagcccagagctcccggggccttgaatgccaggtggagtggtgaggagccctggcgggggcaggaggagccaagactggaggccgggtccggatcccagagtggcctgacccgggcctgctacgccgccccctagataagcttttcggaaagcggctcctgcaggctggtcgctacctggtgtcccacaaggcgtggatgaagacggtgcctacagagaactgcgacgtgctgatgaccttcccaggtacccaagcccgcccgcccgcccgcccagtgcccagatgcggctctcctgagctcggcttcccagaacgggaatacgtaggaggccttgggccccctcgtggcaggagccatcggtccctgtgccccttggcagacacgaccgatgaccacacgctgctatggctgctgaaccacatccgcgtgggcattcccgagctcatcgtgcaagtccgccaccaccgccacacgcgtgcctacgccttctttgtcaccgccacgtatgagaggcgagtcccctgtccctggcctctcgctgagcctgccacccgactccccgctctaccaagtgccaaccatgctatccagccgccctgcgtttgtcccaaaggctgccaggtgcaccatcctcagctccaggatggtgggccggggcctccctgtgagcccacctcctccgccttcttcacagcctactccgaggggccgacgagctgggtctgcgcaaagcagtgaaggccgagtttggcgggggcacccgcggcttctcctgcgaggaggactttatctatgagaatgtggagagcgagctacgcttcttcacctcccaggtgaggccggctctgggcccccgcatgcatcctgtgcctatgagttccctgagctcacgccctcttcctcgcaggaacgccagagcatcatccgcttctggctgcagaatttgcgtgcc

SEQ ID NO: 1560442 - DNA, 4001 bp, Homo sapiens
ggggcctccagcagttccacctgggtcctcacgccctgctccgtgtacggccccaccaggaagtagttgtcgccccattcgtcccctgtcaccttcgccttcgtctgcagcaccgtgtagatgccacccactgtgggcccaagcgtgtgagggcaggccccggccgaggtccatagttctggggcctggggtggggtgggccggggatgtagggggcactcaggccccagacctctagctcagggggaagaggggactgggagcccatagtttggagtaggggttggaagcttggatgaggggaacacgagggctggagggcagtcctcctgggtctaagggagaagggggctggggtcaggaccctgaaggaggagggggctcaggctagacttctgggtctgagagagaaggggctgggtgccgggaccccttggtctgaaggaattaggcactggggctctaaggatggcagagctgaggactgactacccggactcaggttcccgagttcccagctcacaggagctgggtttaaatcgcagccaggctccaaaacccagtgagggagaccccctcatggccaatccagcttctcaccattgcccaagagaagcctgcatggtcattccctgcccccagggaccttgctgacctgcctcccaatttcctctccctgactagggacaccagcatgcagggctctgcctctcccatgaccctatcccagacccaggagccccagcccccagcctcctcccatcctggagcccaggccctggcgatacccggctgggtgttcacgggccccctctcctcctgggagacacagtccctttctcctccaagacccagcaaagcaaccccccagaccctgctctttgaggtgtgagattggcttgttcctggggatttcagccccagccttctccaaggccagaacctcagctttctgaagcccaagacacagaaatgcaggctcctagcccctcccatcctagggcccagcctctgactaacttaggacttcccagccttcccctattccagtacgcatgtgtcccaggccatgggctcctctactcctaggaactaatagctcaggccctcagctccttcaaagcccaggcattcattacagtctccagcccgtcccatctttattcttaagcagccagatcctcaggtcctcccaccgccgctcaggcctcctatctcccagtcagctctctctcaaatctggagttttatcccctagaccatgctgttagggtcataggtctgaaaccccggcagcttcccaggtttgcacgcagaaatcccatccccccatccccttccctgttcaggacccaggtatctagtctctcggaagcctgcctccaggacctaggagtctcattttagcgccctcttccctaggacccagaacccgggcttccagcctcctttcatcttaagtcaaacgaaccatccctctcccacccacctccggcttcccagcccctcctcaaggacacagcctccttgcccaggtcacaagggttcccctagtagccccgtcctcctacaactcagagttccgggcccccatccactactgtccttctcgtcaagggccccgacgcctggcgtgctcacccttgttagccacctcccaggccacttcgaagagcactgcgttctccaggtcgaattcatcctcccagtcctccagtcctggcagtgaggacatggacaaagtgcggtttaaaggcatggctggcgcaggaaggggggctccggggatctccaggtagggaccccggaggtgtctagggaatgcaccaggtagggtgcggggccgagtagctggtgcccgacgggaagcttgcaagacgctcggcttcctattgcaagaccgcacccctgccccgaagcgttgggacctaggcagaaggaggccgcagcgtcactgagcccactggcgcccctgcagtgaaacctcgcagccgccaggaggcggtggccgccccccccagccagcgccattggcccacgcccgggggcggggatttccgcgtgtcctcattggtggaacgggttggagtcgctgtgtcccggccccgcctcggccgtgagacctccagggggcggagcttgccgctgcgctttacggaaacgagtggccttcagctctgtcaatctggagctggaggcctcaaagtggggaggaggaggagggtgggataaagaggaaaggagcgtggaggacgtgtggttactcaaagaacagctaagaattttgcaatcggcctgagcggggcggtggtggggctgagcaaaaggaggaggagccaggagacattgggaatggacccaggagttccggacgcccgtcttccagcgcagcctcggtgggagggcggggcataaagtcccgccacgcccccacaatatttacatatttatgaggaaccatcgagatctttgaagaaccagctagcctagaggagccagaacatctcgctcctcgcgcgtttccgtttccgctaggactctggcagttggtgagcatcatggcaaccgttgtaagtgtgggtgcatggagggtgaggagcgagctagcagtctcgagtttgagagaggaggatgctggaggccctgactcctgggtctgagggaggggggatctgggggttcagactcctgggtctgaaagaggaggaagctcggccacccagatctgggggagaaggggacatgggggctggacttctggatctgaggcggggagggggctgggatcccagaatctcgggtctggccccatcatgctataggaactccaactttcaaaatcatcttggcgcaacggccggttccgcagtccttggcgccagtgtgtgatgaggagggttgtaggaccttgcgcttcgagccatttgggagccttggattgttagtggtgccaatggcacttgagttccaagctggaagcacaggcaggtacctgttcagtgtgtctgagagcgcgagggcgcctagtgagcctttagtgggaagaaattgtcgaggaacaagagagtcttagtggagaggactgaaggattagggacccagaaatcgggatcttgtcatgctaccgttttggccattttcatatttccagtatttcacacgggctacgtctcagtgtaaatgctcaataaattatcacttgaatatttgaatgaatgaatacatgtgaatgaaggagaggccaggaaacttggcctggcacctgctcaattacctgaataaagaagcgattttggcctggcgtggtggctcatgcctgtaatcccagcactttgggaggccgaggcgggcggatcacttcaggtcaggagttcgtggccaacattgcgaaaccccgtctctattaaaaatacaaaaattagccaggtgtggtggtgcaggcctgtaatcccagctactcagaaggctgaggcaggagaatcgcttgaacctgggaggcagaagttgcagtgagccaagatcgcgccactgcattccagcctgggcgacaaagcgagactctgtctccaaaaaaaaaaaggtaatgtgacctgaacttagggactgggctgggcttacaggtgcctcaatttccatgatgagcccagtcaagatggaggaagggagggggagaaagttgttggtagctggggatgagatttgagtctgttgctgtcaccagggcaaggaggaggaggaggtggatagggaagtagaagaggaaggctatgaccagaactaccgtggagaaagtattggaagtatgaggggacggtgtgtgctgagttttgaaatgaccttggttttcatgggaacagcgggcagcaaggttttggagagacttatgatgaaagagaaagtctttataggagacagtccttggtaaggggcctgtttatgttgagagagctacatttgggattcctggattcatgtcttttttgtggggtggggatgcctag

SEQ ID NO: 1560443 - DNA, 4001 bp, Homo sapiens
gtcaaggtgggcagacagcctgaggtcaggagttggagatcagcctggccaatgtggtaaaaccccgtctgtactaaaaatacagaaattaaggccgggtgcggtggctcacgcctgtaatcccagcactttgggaggccgaggcaggtggatcacgaggtcaggagatcgagaccatcctggctaacacggtgaaaccccgtctctactaaaaatacaaaaaattagccgggcgaggtggcgggcatctgtaatctcagctacttgggaggctgagacaggagaatcgcttgaacccgggaggcagaggttgtggtgagccgagatcgtgccattgcactccagcctgggcaagaatagcagaactccatcttaaaaaaaaaaaataggccgggcgcggtggctcacgcctgtaatcccagcgctttgggaggccgaggcaggcggatcacctgaggttgggagtttgagaccagcctgaccaacacggggaaaccctgtctctactaaaaatacaaaattagcccggcatggtggcaggcgcctgtaatcccagctactcgggaggctgaggcaggagaatcgcttgaaaccaggaggcggaggctgcagtgagccgagatggcaccatcgcactccagcctgggtgacaagagtgcaagtctagctgtgcctgcaagctgcctgcaccctgggcctttgtctgtctcacttagctgcctgcgtacctttcccccaccggcttcctcccttggtttatgctcgtctcctgcaacggccccccacccgccctcttgccctccgtgtttcctccgctctgcacagtctcatgcctggcctgtctcttccagtcagacaggagggcaggcctagaacagcacgagccctgcaaatacggatggatacacagaagcacgggagaaaggaaggagggatggaaggaggaatggatgatggatggatgggagggaggagggaaggaggggggaaaggaagagagaggcatgatggatggatgggtggatacatggaaggagggagggaaggatgacgggtggagggaaggagggaggttgaaaggagggatggatgatggatggacgggtgggtggaagaatgggaggaaggaggaatgatgggtggatggactggcggagggaaggaagggggaacgaaaggagggagggagggatggatgatggacccatgggtagagggatggatgatggatgggtgggtggaagaatggaaggaggaatgatgggtggacggacgggtagagggaaggaaggggagatgagggagggagggagggagggagggagggatgatggacccatgggtggaaggaaataaaaatgggaggaaggatgatgatgactgacggctggattcctacctctgtccatcttcttgggtccccaactcatcaagagcccctgtcactcagtccagctggaatgcaggggagccgccacccacctcccttctccctcactgctgggcacctagtcccagccaagcccttggtggtggcaggcagccagcggggatcgagtcccagctctgccctcccagctgggcagtcctaggtcagcatctccttcgccaagtctcagtctcctactctgcacctcgggtgtgagcgtgacccctgccttctggctgctgccgggaggatgggcgaggtgagccggtggacaccacactctcccacggtcccgggatgtccactcggggtgaagcgtgaggagctcgggatgccccaggcctcagtccccctccaaacaaggatgaatctccgctcttacacccaggatgtcggcgcccgcgcccacccctcccatccagggacccaccgagagcgctgggcctcagtgtcccccctgcatcccggctcccactcacctactgacagggcccccagggccagcaccagcagtgaagacacgcaggcctccatgccgctgtggagacccagtgtgggtgctggccccggccccgagcctccccacacgcgcttcctgtgggggaggtgaggtgacggtcacagccccgcccaccgctgcacaccctccaccctccatccttgagcattttagaaagtgtttctcaaagaggactcgagatgaagccacactaccatcatcacacctgacaaagtaacacttttttttttttttttttttcagagatggagtctcgctctgtcgcccaggctggagtgcggtggtgcgatctcggctcactgcaagctccgcctcccgggttcacgccatactccggcctcagcctcccgagtagtgggactacaggtgcccaccaccacgcccggctaattttcgtattcttagtagagacgaggtttcaccatgttgaccaggctggtctcaaactcccgacctcaggtgatccacccacctcggcctcccagtgctgggattacaggcatgagccaccgcgcccggccactacttcctgcctctgaattggtctctagggacctcccaggagtggaatcacacaggacctgttgcgttggcgtctctcccagcatgacgtcctcaaggtgcatccaggctgtggcctgtgtcagagcctcgctcctttttgtggctgtgtcacatcccattgtgtggctggaccacgctgtgtttatgcattcaccagcggacggatatttgcgctgttctagtttttggtcttcatgaataaagacactggccgaaggcggtggctcacacctgtaatcccagcactttgagagactggggcaggaggatcgcttgagcccaggttggggctgcagtgagccgtaattgcaccactgctcttcagcctgggtgacagagcaagaccctgtctcaaaaataaataaatttaggccgggcgcggcggctcacgcctgtaatcccagcactttgggaggccgaggcgggcgatcacctgaggttgggagttcgagaccatcctggccaacatggtgaaaccccatctctactaaaaatacaaaaatcagctgggcatggtggtgggagcctgtagtcccagctactcaggaggctgaggcaggagaatcacttgaacccaggaggcgagatcgcaccactgcactccagcctgggcaacacaagactgtgtctcaaaaacaaaaccaaaccaaaccaagcagctatggatgatcctgagacctgggtgtggctgtgccagtaacacttcactcacaataggggcggacgccaggtttggtcccgagggccatggtttgctgagaccccagggccccattttctgtcccaacttggtgggaaacctcatcctcacagctcctcgaccctgaatcagccactgagcgactttccgggtgcccagaagcggaacgcaggcaggttcctggaaggcggtgccccgggagggcatgggagctccgagctttcctccatgacatgtaataaaacgatgctggggacttcctgacaccaggacgtgaggtgcctgccctgtgtgcccagggccacggctccccaccccgagggtgtgcctggacggagctggagccgccggagtgctgatcgggggcatctgtggtcctgggagccctgagacgctgagatcaacgcccaggcggctgtggacccgcgacgaagctttgctggatgcctgcagaggcagctcccgtcccactagatgcacctggtcacagggaggaggaactctgggggctttctggccgcccctgtcccgcaggctgggggatgctgcccaggcctgtctgacccaagtcatgggaacgtacaggccgcgggacccggctgctccccgtgcctcccaggacaggcctcccagatccacacctggcgtagccagggtcccagtgggactggccgtgtgcagtcactcatggacgtggaggctgcctctccctcccaagcacagcttctctggcctctcataaagtagttttatttagatttcaaacaaaccaaagcagggaaaagagt

SEQ ID NO: 1560444 - DNA, 4001 bp, Homo sapiens
ccctgcattcttgcccctcaatccatttgccacacagcagagtcactttttttgtttgttttttagacagagtcttcctctgttgcccaggccagagtgcagtggcacagtcatagctccctgcagccttgacctcctgtgctcaagcgatgctcccgcctcagcttcccgagtagctgggacagcaggtgcacgccaccacacccggctaattttttaattttttgtagaggtggggtctggttgtgttgcccaagctggtcttgaactcctgggctcaactgatcttcctaccttggcctcccaaaactctgggattacaggtgtgagccatggtgcctgactggcagattaagttttttaaaacatggccagtgagattgtggttttctccattttaaaaacctacaggaggctgggcgcagtggctcacgcctgtaatcccagcactttgggaagccgaggtgggagaatcacctgaggtcaggagttcaagaccagtctggccaacatggtgaaaccctgtctctactaaaaaaacaaaaattagccgggcgtggtggcagccgcctgtaatcccagctgctcgggaagctgaggcaggagaattgcttgaacccgggaggcggaggttgcagtgagcccagatgatgccactgcacaccagcctgaacgacagagcgagaccctatctcagaaaaaaaaaaaaaagcttatgggggcttcctctttattccaaggaaaaatcagtgtctgcatggttgcccacaagacttagggactgcccacccctcagccttatccccaagtcccaccatctcctcttgttcagcctgaccctgggctatgctggcttgtcctctccttaggtctttgctgcctccatctctcaccctccaagacgaaggtcaactgtcactttctcatgaaacacttgcttgactgccagccccttgaccatgcctgtggtcccccaacccgtggcatgtgcctgctgtcccagctacttgggacgctgaggtgggaggattgcttgagcacaggaggttgaggctgcagtgaactatgactgcaccactgcactccagcctcagcaacagaggaagaccctgtctctaaaaaacaaaccaaaaaagtgactctactgtgtggcgaatgggtcacggtcactctaccactgtctgttatgagattcacgaatagaatgtactagacacaattatttattcatgttttcatcagtctttaacaaattccctgaccaggatggagaaatctcctctctcatctaccttgttcatggcctcgtccccactgtctagaataagactccacacggcgtaggggttccgtaaatacccatggaattaggaccttccagtccctgtcactcggtgcttcattgatttctgttcttttttggagatggagtcttgctctgttgccaggctggagtgcagtggtgcaatctcagctcactgtgcaacctccaccttgcgggttcaagcaattctcctgcctcagtctcccgagtagctgggattacaggcacctgccaccaagcctggctaacttttgtatttttagtagagacggggttttaccatgttggccaggctggtctcaaactgacctcaagtgggctgcctgcctcaacctcccaaagtgctgggattacaggcatgagccaccgtgcctgtcctggttcctgttcagctgccagtactcctgagacgtcctgagctctgctcagtgctcgggtgtctccagtgccctaggctgaggcctggctctcccatccctgctgccctgctaaggacccaggccactgggctctcacctgttgtgggaaaacagagccactggtcaggctggcgaggaggaggaggagcaggaggcaagcggcccagatctgggagctcagtgccatcgtgccgtctgtctggctgtcccactgctgggtcttgagcttgctctggtgtctgggaccgagtgacagtcgcttttatggggcctgccaggggaggcggtggtctgagccccctcccctttgctctgtctcatttccaagaaggtggtggcgccgaaaaggcgggagagataagcgggaacagagcgacagggaacagggttgtgtcaccctcagccggcagaggtgtgttcagggggtggggcagacggggtcacagacacacactgctcaccagccatctggggagccctttccccatcacgatgtcattctgctgatcgggaaaaaagttcccccttttgcttcagcggttaagcagtttgatgagcagaatcaaggttccgctctcctccactcacttccccatcgcctacatgcacacggggcatggccagcagccgccaggctcctcaggagtgtctggcatgttgggggaagcatccattgctttaagctctcaccacacgtgcataggttctggcagggaacactagatagccctgagcagggcaagcatcagcgtgtgcccgatccgcacgtggtgttttcccagtgtcagacccttgagatgtggctctggtaactggaaaatgtttgagcaaacttttggccataaatgacagcagtaatatggcccagcacagtggcttatgcctgtaatcccagcaatttgggaggccaaggcaggagggtcgcttgagcccagaagttcaagactagcctgggcaacatagggagaccccatctctacaaaaaaaattttaaacaaatttagccaggcgtggtggcacacatctgtagtcccagctacttgggaggctgaggcagatcgcttaagcccaggaggctgaggttgcagtgagctatgattgtgtgactgcactccagcctgggtgacagagtgagaccctgtctataaaacataaaatagcagtaatagtaatagctaacatctacagtccgatgagtacattttatacgatggcacatatgttgactcacttctgcaccaactcagcctgtgctgcctgttctcccagcagcacttactgccccaccttcagctctgctctgtattcaggggctgccttctcagtcacccaaccccagaggcctgggctccccagaccctgctcccttttaggaacctcctccccgtcggacactcatttccttcactttacagaaaaggcactgaaggcagagatcagggcatggcccaagcttgctcagccagaggcagagctgagattctagcctggacagcctgactccagggcttttgctcttacccaccaggtttccccatctcccctaaaacacagcagggcacagcggtatgctagacctggctcaacatagcagaccatgcacatctcgaaactctgcattcagtggcatcatgctggtatcctgaaatcagcagcagtgggagtcttgacacccagaaattggcaagcactacaagccagggatgtttttggggagccggttccttaggacaccactagctgggggatgaacccaggctgcctgactgcagtgccttcattcctttccactaccaggcccagctcagggtgcacacggcccaggggatcaacaaaccttggttccagatgggcccttgcacattttgcctctttgcctttttcattccagggccatccagtgtcagccaagtcaccagagcccggggatgttgttgtcgaggaatgaacacttcttcctggttgctgaaccactttcaaggcccactcaagcacagaaatgcacaggccctgccatctgcctcctcatccacaccacgtgggaggctcctcttgtcacagcctgggtaacaaagcgagaccccatctatacaaaaacttggctgtggtgctacgcacctgtagttggtcaaggctgcagtgagccgtgattgtgtgccactgcaccccagcctgggtgagagtgaaaccctgtctctaaaaactaaatgaataaagatggcctcagatgggaatagctaggaaaaggagacagggct

SEQ ID NO: 1560445 - DNA, 4001 bp, Homo sapiens
tttatcctccccaccggctgatcaccttccaggtccagcttgaccatgccagcgtcatcttccagctcattggtgacttcgcactcatagcgcccgtagtcttgcagcgtgacgttgcggaggaccagggaggcatccccaggcccgtcgccctgcagctcagcccgcccacggtagctgccgaatgcccggtgctgggggcctagtgccacgaagacgtcggtgaaggccagcgggtccaccacctttgtccacttgagccggacgccgtcgtgaccgtgggcggctgcctcatagtggtagcggcagggcaagacgatggtgccaccacggtggcttaccacctgcccaggcgctgtctgtaccactaccgagcccgactcaccctctgaggacaaccaagcagggttcagaggaggggcctaggggcagaagggggcctctggggaaggtgtctctggggaggggaacgtgggaagactcgggtgggggtcggggaatcagaagggtccaggggctcagggagagggcgaggggctcagatggggagtggctgggggaaccgcggacgtcaggaacgccctacccgctacccctctccgcacttggccacttctgcttttcgcggagaagaccacttttagcggccctgactcacccagcacgtgcacgaccttcttccggccacgctgcgcccccgcaggggctgtgagcagcaggacgccccaggccgcggcccagagcgcgccgggaccgagggccgcccgagcgcacacctggggggcgggcacggggcgctcagtccagcctcccagccttggcttttcggaggcctggctccctcccgggcctgccttccccacagcgaggacctctctcacgcccatgtccccaccctttccggggtcctggagaactccccctcctcctcttgggacctcacatcctagcttctgcaagaacccacgcccctagactcccccccgccctcagtcctgccccagatcccgcctcattcccccccaccccaaaacccgaggctcgctgccccgcccccttctggccctggcccgggccggggataggggggtggggaagagctggaggagcggcggcagcaaggttatccgtgcgccaggagactgcagcaaaccgggccggggcgggcagggaggggggagagctggagagaaagagggagagacgcggggagagaacagggacagagagaaaggcagggagaggcagagaagagagtgcgcgacacagaaaaaggggaagggaagagagagaggcagagatggagagggagagacagatggaaaagaagagacagatgtagagggagagacagagatggagagggagagacagagaggcagagggagagacagaggggcagaggaagatacagagatggagagggaaagacagagatggaaagggagagacagagaggaagagacagagaagcagagggagagagagagaggcagaggaagagacagagatggagagggagagacacagatggagagggagagacagagaggcagagggagacagagaggcagagggagagacagagaggcagagggagcgacagagagggagagggagagacagaaagggagagggagagacaggagagtgccagaggcagagagactcagagaagaggagggagagatagggacagggaaagacagaaacggagaggagaggaaaaaggcagagaggatgacagagatggagagaggcagggagaaatggagagggagagaacctagagtgccaaaaagagagatcaaagagggtgagagacagagaaaaggaagagacagaagaaactcagagggatatagattcagaggcagagagatatagaatccaagattggggagacggggcacacaccacccgcgcccgcagccccacttaccatcttgcccgcgcggcccccgccgagcggcccctacgcacccggactgcgctccccgcacacccggttaagactgggcaggtccctgcaggcggcgcaatcccggcgtctgcctgcaaggggaggaggaaggcgggcgaggcggggtgtattaaaggggccgcgggggcccacgctcccctggagcagtggctggagcgcgggcggagaaagaagcgctctggacttggagtgcagagctagttccctcaccctgctagctgaacttaggccagggaagaacctctctgagcctcagtttaaccatctttgaaatggaggagggggctgagtcttctatcttggttactgtgctttggcaggggacctgggggatctggtgaaagagatcatttggcctgcaggccacctgtccattgggtagtcatagtggagtcctggtctccagcaccccaaaggcgctccctgtgcagggtgggggcctcacgatagtcacactctgctgtggactggagccacaggccccaattcaagtctgcccctcactggctgtgagaccttggaggagacagttggcctctctgagcctgctgctgactctttggtgaagatccagtagctagacatacagtagatctccggtaggggttgggaggggcaagaaaaagggacatctaggccgggcgcggtggctcacgtctgtaatcccagcactttgtgaggccaagatgggaggatcacctgaggtcaggagtgcgaggccaacctgaccaacatggagaaactctgtctctactaaaaatacaaaattagccaggtgtggtggcacatgcctgtaatcccagctactcagggggctgaggcaggagaattgcttgaacccaggaggtggaggttgtggtgagccaagatcgtgccattgcatatcagccggggcaacaagagtgaaaactccgtctcaaaaaaaaaaaaaaaaaagaaaaagaaaaagaaagaaagaaaaggaaaagggacatctggtcaaggtccctgacttactccaggcccaagtcgcccctaaacctggcctttcacccaatttcaaaaaatcaaacaatagcaaacagtgagtctttctcctaacaccttggcttccttccaggactcagtttcccctaaaatgagcccaacccgaccagataggagaggcagagttgtggtttctgtggtccaacaggctggggctccatctcttagctcagccatgccttggggactgagcgggggaatgatctcagaccaggaccttcacctcctgcagccttggtttccccatctggaatatggagtgagatccagcatgtagcagtcaaggtatacagtaggtgcttaataaatgtatcatgctattagttatgatttattggtagagcaggaacttttctctctggccatgaccttgggcaggtctcttgtccatactgagcctcggttttcccatctggaagatgagccgtgcataccaaccagaggccgccttctgctatcccagcacctctcactcctggcaaccacgatggcagtgataggtgggccctcatgggggccaagaagaggatcccttgcccctgcaccctgaaacacttaggcagtgatattttggaaattgaaagggtttttactgaaaggatccatggggggatgatgggtaagttctggaaggggtagaagcgtttgtgtgggagttggagcatggtgacagctgtgggaggctctccttgcaggaacacttggtcgttggtctccatcccacccactggactgaaactaccatagccaagactaaagacacccggagatgtccctcctgtctctaaaacacccaacccccgcttccccaggtagggctgactgggcacgtaaacagagtcctgggtcctgagtccacagctctctcaatgctgcttcttgtggagggctagggggtcggagggtggtggctggtggaagaatgcgggccactgaaggcaacggtaggccagcaggtgggggcccagcgcatacagcagattgcacacga

SEQ ID NO: 1560446 - DNA, 4001 bp, Homo sapiens
ggtcactcaggtaataagcagagtcagaagtaaaactcaggcagtctggctctggcgtcccctctacgctaaactgcctcctatgccaccagttcctgcctcaaggcttactgtgggttatttaaatgcgtcgttaagatgtagatctttgtgtccaacacaggtgtcagcagccacatgtgtctaccgagtacttgaaatgcagccagtatcaccgaggaactgagttttaaattttatttaattttaattcatttaaatttaaaaactcttacttgattcggttattggaaagattttaaatatgtctggaacaagttgcatctacgatgccccttttataattgtaaatcttataaaatctaaacacagattaggtatttccagtgaaaaggtagcatctaagtgagaagtgctatgaacacactggattttgaaggccaagtctggggaaaagaaagtaaaatagctcattaacatttatgtattgattacatattgaaatgatcatatcttatatgtagcaggggtcggcatgctaagacctgctgcagcctgcaggctaagaatttgtgtgtgtgtttttagatggtttttgaaagccaaaagaagaataatagtttgtggagcatgaaaaatatgaaattcaaatttcagtgtccttaaaggaagttttatttgcatacaaccacattcatttgtttatacatcatctgtggctgattctacatttaccacatcgaagttgagtactttcaaaagagaccagatggcccccaaaagcctcaaatatttaatattgggccctttatttaaaaaaatgtgctggcccctgacacactgggttaaataaaaatatattattaaaattaatttcacctgtttgtttttactttttcaaatgtggccacaagaaaattttaaattagatattgtggttttcgttacatttctagaggacaaaactgaggtacagcttttaaactctcaacattaaacattattctttcttctcgaatcccccttctctcttcctttgcttcaaacctggccttgcctgagttcctagggatggctcaattcatgctggggatccagagagttgattccagaaacacagatgaacacacgtgtagacacactcccccacacgtgaactcacacatgatgagtgacacacagaatgaaattactcgtgttctacaggatgacccgagacacccactcaggccaaacacagcgatcccgtgacccccaccgacggccacacaggtgaacctgcagacacacacccctcagcaggaaaaagcaacaccagcaaaggatgtccacgtggccacaaacacacagagccccaactgagagtctggggcaatgggatgcacagggaagatttcaagagaaatagtaggtgactgtcaagctgatactgaaccagatgaaattgctattcttccaagtttagagtggctcagtatcggcgatttcatttggttcaacttaatagctattgaacgcatgaaacagaaatccattcccatgtgccacaggcaaatccaactctctttctcactcagtctctttcattcgctcactgtcgcactccctctttctctctgcctcccagggaacatagacatacacaagtttgtagcaagatacgcagatacagaaatacggacatggcacgtctcacctacatgtacttgggatggccgctcacacagggcaatgtatacacagacctgcacactcagcctcacatgctcactgtcccctacacacatatggtcactgtcaggcacatggatacacacatgaaatcatgcacacacagttccccaacacacgtggtcacacatatggcagtagttttccccacatggctgtatacacacacacacacacacacacacacacacacacacacacctgtctcatcgcagtgggtctggccgggctctctcttctctccggcttgctctcccagcctctctgtggccagagagctggaggggggtcatttgaagaccagcgcaggcgggggcgggagcgagcgctgacgtcagtcaggctaagctgggccaggggctctgaggtcacggcccagccgggcagctccacccgcttcccgctattactcccacccccctcagccagacgggcctcccttcccaggcccccatgtctacccgcgcccctcctctagtcctctctgccatcactccccctcctctccctccctcctctatgtcttcttctctcttcctcccccctctcgtcccttgtctcccctgatttttctcttccacctcacttgcattttgggggttcccctcatccccccatcccctatccctgtatttccctccatccctttctttctccctaacccactatttctcctcatctctttgttggtaccctcatctctctccccattaccacatttctccaagtttctgtctttctctccatccctttcttcctctccacttctcttgcctcctctcaccctcatttctttctcttcttgctttaaagctctccccacctcccccttctcaccttccccagtcacccccgccctgcttctccccacagccgcctctcctgtccccagaatccatctctgggttgggccccccagggacatgtctcagcaactggcagatggaacgaaactcacacacgtgcgtgctgtgggtgtgcctgtgtgtacgctggcccgaggcacggctgcctggaaccggagctgtgagtgaacatctgtccattcagcgcctaactgacgtgggtctgcgtgtgtgcaccagggtctggggtggagagctggggcgctgggatttgtatccccagggactcagggatgaacacagagagttgtcggtcagctgaccctggggagccagccggggtctgtcagtgctgtcacccatcagggaaactgagtcagaggaagggtgaaaagagatgcgggacctggggtgcccgaaccccagcccctcaggaccagatctgtgataaatgtctgtttacatgcccttctttccatgaattttttaaaaaaactatctgtatctaattctgttcttctctctgctcctcttactgtgaactattgatgtctcactttcggccttggtagctgcctcggtagctgcctcgttcttttctccctgcctgtgactccaacgacctttggtgtctggcacgggccagctccaggacaggctgaaagacatggagcagcagagagaaattcccccgtgcttctctctcctcgtctgtccctccccaaatctctgtcattttgtatctgtcaccccatctctgtttctcggtccctctatttgggtctctgcctctgtgtattcctgtctgtttctcctcctcatcccccctcacagccattctctctctgcttttacctgggagtgtctgtccctttgcatttctgaagtctccctgactttcttcttgtgtggctctctttctttctgagtgcctctccctgactttctcactgtgtgtccatgtgtgtgtgtctctttctctctgtctctttttccctctatctccctccctctctagctctgtctctatcctccttccgtctctctgcatccccatctctctctttttttttttttttttttgagacggagtctcactctctcacctaggctggagtgcagtggcgtgagctcggctcactgcaacctccgcctcccgggttcaagcgattctcctgccttagcctcccgagtagctggaactacaagcgcccaccaccacacctggctaattttttgtatttttagtagagatggggtttcactatgtaggccaggctggtctccaactcctgacctcaagtgatccatctgccttggccttccaaagtgttgggattacaggcgtgagccaccgcacctatctctttgtaaggctctatctctgtatgtgtttctctgtctctgtctctctcattcagtttc

SEQ ID NO: 1560447 - DNA, 4001 bp, Homo sapiens
tgtcatatgagccccttgcacccattgggtcccacactggcctcagcatctctcccatacctgtcccatcatctcttctcaccagctttgatgccacatatccaggtcccacctctctgcgcccagctaattaatgctctttatttattttttctttttttgagatagagtctcgctctattgcccaggctggagtgcagtagtgcgatctcagctcactgcaacctctgcctcccaggttcaagcgattctcctgcctcagcctcccaagtagctaggattacaggcgtgtgccaccacgcctggctaattttttatttttattagagacagggcttcaccgtgttggccaggctggtctcgaactcctgacctcaggtgatccgcctcccaaaccacatctttgtcccagtactgatcgcttcctggagccctcaggtgatctcatcacctgagatgaggcctcaggtgagcctcccaaagtgctgggattacaggtgtgagccactgcacctggctgagctaatgctgtttccactggactttaagccctatgaggatggagatcaaggctgtcttgtgacccattgtccccagcatcacccagcacctggttgggcttagagcagaagatctacaagtcatttttcggatgaaagagaatcttgtagcatatgcttctcacctgtggactgtcctggtggccatacctaggaaaacgaggccagagtcagcggatgagtggggcttctaggggggagggcaataggtgtgatgctgtggtggggacagggctaaatgggagtggggaagacaggaggggatagctttaagaagcagttaccagagtaggtttccccggatcttcttgacagtcctacagtgcagaggcagaaagaggagttactatgggcctcacctgtgccccctcccctgctctagcccagcttacctctgactgtgcacatgctgcaagatgtaggcccagatgtcagccccctggcccagacacagcctgtggggacagtgtgtaagcatatgcctggggcagcacacagggtgtgggatcctcattcctagggtgatggtggtagggagtttttactagggagttctcacttcttgaggagggaaggcccaaacttttttttgccttttttttttttttttttttaagagacagtctcgctctgtcgcagtggtacgatcatagctccttgcagcctcaacctcctgggctcatgcgatcctcccacctcagcctccagagtagctaggactacaggcaggcaccactacacccggctaattggtaaaacattttttttgtagggactggatgtttgcactaagtgtggtgttattctcattccctgggaaggcgggtggtgggggagcgcgggagaggcgggtgctccctttctcctgggagtgggttatcccagtcacatccagaggtggaggtgggggatgtactgccaggaagtgccatctcatgaccagacgtggggcatcactcctacagcttcaatccccgatggggtggccacggctaactcctgagtgtccttcttggttaggttaagggagggaggggaggtgctgcggggacagcctcactctggagatcctatttccataaggagcgaggtcttagctaactcgtggaggatcctcaccagtgctagggacctcactctggggagcctcccagggtagggagccctcagtaagtcgggtcactctcgatggggaattggggggagtcgagtcctcaatgaggggtggagttctcactcccggagactcaatctccagggtggggtgtcctcactccaggagcggtcctcacctgcgcagcgtcgattccggggcccgggccgccacgggcacccccatctcttcgaccgcccagcaacccagttcccgcgcttcctgcgctagctccatgacagcgccgcggcggcgacaccgcctccctcagcctcttcaagtgtggcgcccgcctctgacgtcacgggcgcgccaacagtgacgtcatcggttgccgggcagacagcgggctcgggcgctgcatagtaatcttagcgcggtcaggctgggtcttgcagcgctcactcttcccaggtaggtctccttgagtggaaatgaaaagggcgtggagagactgcagccccgcccgccttccctcgttctcccgctcactaccagctaacccgaaagaggcaaaacagtccttgatgcttccatttattttctttttcttcttttaactaaacacttttattttaatagagatgggatctcacttgttgcccaggctagtctcagcttctgggctcttgaactcctgggctcaagcgatcctcccgcctcggcctcccaaaatgttgggattacaggcgtgagccaccacgctcaccccctttattttcttgacaaaatgggacttgcgtcctaggaggactggaaccaggcaatgagatcctggacttactgctctttgatttcagaaacaggtgtctcatgtctgagtggagggtaggggcagagagcatgaccctaacatttccctggcatgcgttttcccattcattcgtgcttaccattccataaactcagggagctgaccctgtgctgggtgatgctggggacaccatggtgaccacaacagccctggtccctattgtacggagctcacagttgagtggggagacagacgcaccaccaggtaggggtggtaaaaataagcagcaggggtgggtcaatttgggacacagcaggtgtgagaggtctgcgctagaccagcagtccccaaccttttgagcatcagggactggtttcatggaagacaatttttccacagtctgggggatggagggtgggagcagtggatggtttcgggatgaaactgttccacttcaggtcgtgaggcattatattctctgtctctctctctctttttttttttcttccctgtttttttttttgaggtgaagtctccctctttcacccaggctggagtgcagtggcccgatctcggctcagcgcaatctttgcctccggggttcaagcgattctactgcctcagcctcctgagtagctgggattacaggcgcccgctaccatgcccagctaatttttgtatttttagtagagacggggtttcaccatgttggccaggctggtcttgaactcctgaccttaagtgatcagcccatctcagcctcccaaagtgctagcattacaggtgtgagccaccatgccccgcctaagcattagattctcataaggagtgcgcaatctagatccttcgtatgcacagttcacaatagggtttgcgctcctgtaagaatctaatgccgctcctgatctggcaggaggtggagctcaggcagtgatgctcacccatacgccactcacctcctgctgtgcagcctggtttctaacaggccatggacttgtattggttcacggcttggggtttggagacccctgcccctgccctagatgaaatacttctctgatgctgactaaccaaccatgcttaaaagcaaggcccgaaaggatcaagctattatttagctgcattccagaacaaaattcaagaatatttatagagattaaaaaaaatccagcatccaacactgtaaaattaacaatatctgacatcagtaaaaaattataaggcaatggctgggcgtggtggctcatgcctgtaatcccagcacttcgggcggttgaggtgggaggaatgtttgaggctaggaatttgagacccacctgggcaccacagcaaaaccttgtctctattaaaaattaaaaaaaattagccaggcgtggtggtgcacgcttgtagtcccatctacttggggggttgaaacaggaggatcagttgagcctgggaggttgaggcttcagtgagctatgatggcaccactgcactccagcctgggtgaccctgtctcaaagccaaaacaaaaccaaaccaaaataaaata

SEQ ID NO: 1560448 - DNA, 4001 bp, Homo sapiens
taggtgaacacccaaactgagaagagaggagggtaatgagagctctgtggaagagatcacagcagatctcaaattatccctgggttcattcattcaccagacattgatgcacctactatattccagtagagacacagtggtaacaaaacacagagctccttcccagaaagggaagaacaacatcttgacaggcaggtacgaggagtggtcccagcaggtacctcactttgggaggctgaggctggcggatcacgaggtcaggagatcgagaccatcctggctaacatggtgaaaccccatctctactaaaaatacaaaaatgagctggggtggtggcatgcgcctgtagtccctcctactcaggagactgacacaggagaactgcttgaacccgggaggcacaggttgcagtgagccaagatcacgccattgcactccagccagggtgacagtgagactccgtctcaataaataaataaataaaaataaaaataaaaataaaaatagaatgaagcctgatgtaataggaaagaagggaccctgagataggaatcgctgactcatcagctgtgggggtgcaggagagggagaatctgggatgactaggggtttcagggtttcagcctgagctggtgagaaaagaagggatccaagaacagacaccagcaacacaggaggggcaagtggatgggcaagtggaggggcagggccaaggccagggcactgtaactcctgctcccatcaccaaaggcggctccactggtccctgcggccacctcctctgaagcaggctcccaggaccccaaagtgagacccagacaatgttggggacacttccaggccaccgtggggagaggcaacttagcaaatgttcgccaggtgccagcagctgcgctcgcccgtaggctcctcctaacccgacagcttcctaactgttcacacctgctttttcgtcgctgcaaaacaaagacgcacaggttttacataggtcacccccggggcagtctcacagccagaaagagacaagagcacagactccctctggggactgtgctagggctgtggcctcaaaccgaatgggctcctgggtgaacctgctgcgacctgaggggggtccctacaacctgtgcgagcctcagctactgcacctgtacctgggaggtgctactgtcaatctatcggttacggcaaggggcggtggagtgattcctcttgctggccaatttcacttcagtttgcacctggcacaatcaacactggcagaattaacaaaactagacaaatatagcctcatgatcattcatgcctagctctcggtcagtattcaacttctttcttgttcatggtgtgttaccctaggcaagtcacttcccctccctgggtctccatcatctcctcagtaaactgggagcacagaataaagcgcgtgggaggattaaaggggacactttggtcgcccaacacttgttcactgcataacgataattccaagagcgacatcacagtaaagacccaggcgccgatctaagcgcgtttcagcctcacgcgacgcctacgaggttgagctgcgtcatcggccccatttcgtagcggaggaaagcgaggcactgggcggtcaggccgcttgccggaggtcgcccagcgtcccagccgaggacgcggaactcagggccggtcgggtgtcagcgctccggagcatgcgcagaggcagcacgccatcggggtcttcaggggcccgcgcagttcctggcggggtcgaacccgaactcaccccgagggtcctaactccccacctccgctgcccatcctctccagccctatggcgtctacaaatccagacctgcggaagccccaactcacccagcgcctcgccccgaggaatccgccattttcccgccttccacctcaaggcccgacccgccggcttttcaaagccggacccgcccccttgcttgcgggtcggaccatttgtggagacgcaggaggggtggctgcgaggcgtgaggcagcgccggctaagtgtggagagcgcggccccagacgcgcgcttcgcctgtcctcccctcgcacttggtctcgcccaccatcggcggtagtgggtaggggcggtgggtgggacctgatctgtcggacagtaggggcggggcttttcgcgatgccccgcccctaggagcgctggcgtcacgcccccgtccccgcctctccggaacccggaagcgggagcgcgcgggggagcggcgggcgcggcggggcggagcggctcgagcagcggcgggctggcaggcggtcgtccggccggggacccggcccgggaccggcggcgcgcggcggccgaggccaggtgagtaccaggcagcctcgggttggcgactcgagctcgaagcctgcctttgggggctgcgcagaagagggacggagctgagggctgatgggggacgcgacggcaggggtcgagggggcgggaacgagcctgggggtcttggagagattgctggggatgaggtggaagcgagacggtgaaggagaaagtggatggggatggagctggtgagggagttcgagggcgtggggggggtgagtcttgtggctttgagcagcttctctgaagaggacgtggcttaagtggtaattggggggtcgcaggaaacggcgttgtggggaggcacggaggcgggaacgagaggcccaggctgggggagtgggcaaggccaggggcgggacagccggggtgcggttgaggggaaggggtgcgagaccgatctggggacgtctgcccgcgcgattgaaggaagggtgtctgagaagagggcggcgcctggcccccagtgggcgctcagtaaatgcggggggttctgaactaactgatgcggcagccggctattgggaagcggggaaatgggagctggaagggaagtaaacggagtagaagtcacggtaagaactgagggtaggcttagggagggagggcccggagaggagggaagagaaggaaggggttagagtggccccgtgcagatagatgttgagatgcagcccctggagattccgtccccccaccctcccctcttgattcgtgtccctcctgacttcacacttaacagctgggtgacctgggacgagtcccaacaccctctgtgccagtgtcctcgtcttggaaacttcaccaccctccccttaagacaggactagcaggattctgggattccctggatccaaggaagggacctcagggccggttgtggggccggaactgtgtttcaggagggagtgtgcatgcaccctcatgtacaggactgtcgccacctccgcagagctgcatccttggacttaaatgggtaaaacgacatacaggaaatctgtcccccggttgctctgagctcagccctggagaggcacgacagccacgagccctcctttctttcctgggcaccctggaggccaggggtctttaagggatggcttctctgcctctttgtctgaggtgggagcccgtggggacactttccagccagagagtcccaactcggtttgttttttgatgttggagtcttcagaatcttaaggtgtccaggagcagccggaggtgacctgggctacaggaaagttattcacatctgacaggcctggctcttgtggccctggcagggactttgtgcagggtgcttttgattggcattcatttctcccctttcccaactgtagggatctttatctgggatctgccagaagggctggggaaccccagcttatgtttagtttatagctcattcaggagatgaacccggatagctggaatataaagagggccacagaaagataagcacccccttcacttccagaatatcctggcctttaggaaaggtggctttggcctggcttgccccaggacatgcagtgacagcccacagtcatgcctcctgcaaacattgaactgtaggcttgcactggcctacagaacaggaccgggatcttctgatcccgcagccctgcaatcgcctctt

SEQ ID NO: 1560449 - DNA, 4001 bp, Homo sapiens
tccaggctctgtccaggacgcatgtgccccaggcctcagtttctccagtcaagcactaggggtgcagagaatccaggggaagagagaaccccacagcctccctgcccagttccgggggtccagggtccgtgggggctgtcctggggcgcccaggcctggaggaggagagacaggcgggaaaaccgcaggcttcccaggtccggcgcgctgtccgtggtgctgaaaccgcgcccgtcccgcgcgcccggcctcgctagcccggcgggccccacctacaccctccacctgcaccctccacaccccacctcacaccccactcgtggatacacaaacacacacgcatccctccatggtcgcgtgtgtgagacctgcctgcggctcacactactgcccaccggtgcacaccggccccgggcgtacacgcgcacgcccgccacctggtcccaacacacacaaaccacacgtcccaccaaaataaacccaccggaggcgcacacgcccgcgaccaccacgcaaacacactcctggagacacacctctccggccacaggctcgcgccccgggaaccccgccgcggtcacgggcccctgttcacacacagcccacggggacacgcgccggtctcgctctccggccacagcacgcacagcccaggaaccacgaccgcaaacatcagtggcggtggccccgcgccggccctgctccgagccttccacgcattagccggctggatccacagcggcgtctacacacccaccgccgcatgcgcgcaccgcccgcggctcgggtggagcggctcccggggacacagcctggggacccgcacgctttccaggcccgcggccccgggcgcgcctcctcgcaggcggggcgcgggtggacgccgtgggagccgcttaaccccctctcccccggcctccctggggcgcgtccttcccgggcgcccttcgttcctcctccctcccgctccgccgcctctctggggcccacgttcccctctattcgtcctctctgcccctctgcgctcagaccctggccctgcggcccaccccacccgccgcgccgcagggcggaggatgtcggggtgcgtgggaggggggcgctccgcggtcacccggggagcccccccagaggcggagcctcgcgcgccggggtcactccggggcgggtcccggacacgcccgaggtcaccgaggagccccgaggtcaccggcccggcgcgccgccccgccctccccaggcgctccaaggacggctccccgcgcgcccggctccccgggccccctcgcgccgaccggccctcccggaggcggtacctgaagtcgctgtacgggtggatgatccaggcccccgccgacttgacgcgctcctgctcgcgctccacggccttctggctgccgaacatccgcagcgagaacttgttgacgcccggctgcaggagcgcgccgaactggcgctgcatgaagctggcctggctgccgcgcggctcccccgccgggcccgcctcctcgctgcccgcctcctccgccggccccggccccggcgcgggccccgaggccgccccgcggcacgagaacgacaccttgggcccccgcgccgggccctcgggccccgcggggctgcactgcggctcgccgcgcccgcactcgccgttcgggctgcccttggccgtgctcgccgcgcccggggtgccggggcggccgcacgagctgtcgcggctgcggagccggccccgcgggccgccctcatccgccgcctccgggggcaacgcctcggcccggggcgggtgctgggggggcgcgggcccggggcccggggggggcgcgggcggcggcggcggcggcggctgctgttgggggggcgcgggcggcggcggcggcggcggccccggcgcgggggtcgcgcccgggctctccccgggccgcccgccgcccccgcgcgcgtccatggcgaggcggcgccgggcagtgcggagcggagccgccgccgccgccgccggccggagcccgagggaggggggaggcgggggcggggcggggcggagccgcggggggcggagcctcgcggcgggggaggggcgggggaggggcgggggcgggagacccgcctcggctgcgccccctccccgcgcgccgcctccgctcggcgccgggaaactcgggccgcggggtcgggggcgccccaaggtcacgcggcccgaggcctcggagccccgcgcgggcctctccccaggaggggaaactgaggcccgcgacgtgtaaggacgcgcccaaggtcaccgggccccgctgcccggccggagccgcctctcctgcgccgcggcttccacctctgtccggagggcaccggcgcggggagggtggacgcgggcctgggagacgggagaggccgccacggccagcgcctccttgctttctgtgaggtttgaagacttccacgacgaaagggtgtttctaaaggtcacaggagcccttgctgggtcgcctgtgggccctggacagagacccttgagtgcgtggggaggggcaggccggcttgggcgccgttctgggagactcaggcactcctctccctggtctgcatttgaggaaactgaggccaagcccagccagacaaggaaaactggaaaagccacccgagggtgtggggttcccacccacccctcaaacagtgccctggggagccgtgcggcgggggtctcctctaggtctggtgggctttagattggggtcacagggagacccaaagcccactagcgccttcgcacgggtaccagagccccctgccccggggttgcctcctttccccgacccctcggactccgggtgcagctgtgcccccagtgcctccagtccccagctctgagacaggtgcttcccaaggctctgcttctgggccgaagccggctgggcgtgggtgctgcttggtgccaggtgacatgaggcctctgtccctagccacccagcccaccagacagccgggagggggcaggtgaggaagctggcaagtgagagagaggagacagacagtcacactcgaagaagtggaggctgaacatccccacctggaggcaggaggccctcctgggaccctcctggcacctggcctgacgtcctctcagccacgatgtcccgtgtgccgggtgccccccacccatctgcacctcgaggccaccggggcagagatggccctcttcctacacccaggaggcactcagtggtacttgagggagggccagcatgtgcccggctgacagtggatgggctgagcccgaccgtgtctctcgcctcggcctggctgccccacaccctggggatccctgcgcccccacgccggccccgccggccacctccgcataggcgggcaggacagctgtttgtcccaaggtggtgcgggagaggccgggcgggcggcacagttggcagtgccaggctgtggcccgccccgaggcagatgcgtgctccagctgaagggggttcttttatgttcaccctgggaagatgtcaggccgggcaggtcgccagagccccagggctcgcggctgggagcagggaggaggcgggacccgcacggcacgagaaccgcccatgcctggcagtgggagaagcagaaagacgcctcctgcaggcgccggcagaacccgcaagtcacaagggaggctgtggctcggggtccttgtcaccagatcctggcgacggctctgcagcccacaggcttacccaggccagcgcctgtcagtgtgcacggggaccctccctggcctcggcacactcactctgaccccttgcccaggccggagtactctgtatttatctgtttatttatgtatttatttatttttgagttggagtctcgctctgtcgccgcccaggctggagtgcagtgacgtgacctcggctcactgcaacctccgactcccgggtttaagcgattctcctgcctcagcctccggagtagctgggattacaggcgcctgccaccacgctcggctaattattgta

SEQ ID NO: 1560450 - DNA, 4001 bp, Homo sapiens
acagacccacagagtgccatccctgagagaccagaccgctccccaatactctcctaaaataaacatgaagcacaaaaacattatgccagatccttgggctgatgggatggggacatgtgggggttctgagggggccttggatccagaaacagttcatgggagggaggctttgggaactctggggttctttgagaaagaatacgactacaggtgtttcaattgttttattacaatccaaaagttggggcgggggttcctgtgccaccacacaccatccaggatgagagggtcagaagtcaaaggtccaagctgcaggagggtcagcccctgcctggcatgttgatgtagactttgccatcttctggggataggggagagaaagcatgaagcttgaccacccatatctccacttccctggggaccccctgcttcaggggtttcctcaggggttcccccaggcacctcccccagggtttccccagcacctcctccagggcttccccaagggccccctccctgggaccccctccctagggacactatacaccttccaggccccgcccatctccgccctcaccttgggcggggctgcggcgtgggcgtgcgcacaggaacaccgcccccacgatgagcagcgatgccaccgcatcagcagccacgaggcctgccaggagcggcagagagagggacccacatccggaacaagagcctggagagtgggggccggaacagggagacaactcaagctctgcgtcctggggctgtgctttggccacaggcagagaggaagtcccctgcgagggggcgggtcccaggttccttggagttgcgcttggggaatgaaacgggagacagatgcagagaggctggggtgtcccaggaccctcggggctgtgcggcgggcacacggggtgctcctgaacacaggctgggggtcgctgattctgggactcggagaaggacacggatcctctgatttggggacgggaggtgggatggtgacctggagaaccactggggtgttctgggagcctctggccaagcttctggggtggaagtgatacctgaagtgccagggtaaaaggcagggagtgatgatctctctcctggagtcgtctgagctgcagccactgtggaaagagaaagaaggtggatgagggtggagagaaggtccacaaaacagaatgctcagcctggcaccgtggctcacgcctgtcatcccagcactttgggaggccgaggcaggaagatcgcttgagcccaggagttcgagaccagcctgggcaacatagtgagacctcgtctctacaagaaatacaaaaattagctggaagtgttggttcacacctgtaatcccagttactcgggaggctgagctgggaggatcacctgagcccaggaagtcaaggctgccgtgagccgtgattgtgccactgcactccagcctggacaacagagcaagaccccatctcaaaataaacaaaccaaaaaatagggtgtagagaaggaaaggtagtgtcctgagaagtaatctccaggctggagagatggaacaggaccacatgggaaggggactcccagagacatggagagtgacaagaaattggaagtggcagcagagacccagccatgagaaggggacgctaacaggcagcccctccagaactccctgtctcacccccttccgcccccaaggacccaggccctgaagcagaatggatctcccagaagggaaggggtgcagggagaagaaccccactttcatcacccgtccctgcagacgtcacccaagcacccatctcacaaacgctctgcctaccatcccctgtaaccactggcttcacctgggagcaaaagcaggaagaggatgtgacccagatggatcatggtggactggggtctggcaggggtctggcagaggactgtggtccagagaagtccagaggaactgtgggggagcagagaagtagcaatagcggatgtcaccctgctggtgtcaaggccatctgcttcctgtgtgtgttgagggggtgtctccgttactgcctttggtgaacgaactcagggggagggtcagagagaccagggaggctgctggcctggtccaagtgggaatgacaggtggcaagggtgtgcaggctagggagatctggaaatattttggaggtagggccaagaaaatttgctgattaaatgaatgtgggtgtgtttgagagggatcctagacagccaagccttctggcatgaaacgctgagaagatgggagtgtctgctggcagagatgaaaggtagggaagtgggtttgcggggaaagtgacgaggtttgggcatacagggttggaaatgcctgacaatctccctgtggagatgctgaataacctcactgcatttaggagttcaggggataaggctggtctggagatgtaaatttgggggttgatggcttatggatggtacttaaagccacaagactgggtgagatcaccaaggaagtgagtgcagacaggattctgcccctatcacaacacacactgaatgggggaagaggaggaactttgccagggaaatggagaaagagggaggggacccctgagagcatggcatcttgaaagcaggggagaggccaccgcagtggctcatgcctgtaatcccagcactttgggaggccaaggtggggggatcacctgagatcaggagttcaagccaatatggtgaaaccccgtctctacaaaaatacaaaaattacccgggcatggtgtcaggctcctgtaatcccagctacttgggagactgaggcaagtggaggttgcagtgagccgagatctcaccactttgccactgcactccagcctgggcgacagaatgagaccctctctctaacaataaaaatgtaataataaaataaaatagaaaagcaagcaagcaggggagaaatagggccaacatggtcagtgctgtgaaaggtcaccaagtgaaactgagagtggcctcccactggaatgccagctccagggctgggaattcctgcctgcttagttcacaatacacagcaaaatgcctcctctgctgcaataaattattttaaatgatgaatgagtaaatgaaaccagacctctaaaaagggtgatgtaggggagagggagaaattgagccacaccctatacccttacccacagacccttcctctgggagtctagacccccagtcctgcctccctctggacccagtaatattctccctgcccccaccccatctccatccccactcctacccctacccccatgggcaggacccaggagacaaagcctccagcacccccttagacacagacccagaaatccaggccccagccaggcaccatggctcaagcctgtaatcccagcactttgggaggccaaggcaggcgggtcacctgaggccaggagttcgagaccagcctggccaacacggtgaaaccccatctctcctaaaaatacaaaaattagccaggcatggtgtccagcacctgtagtgtcagctactcgggaggctgaggcaggagaatcgctttaattcaggaggcggagtttgcagagatcgcaccattgcactccagcctgggcgacagagactccttctcaaaaacaacaacaaaaaaaaaaaaaaaaaaaaaagaaaagaaaaaaaagaaaaagaaaagaaaagaaatccaggccccccggtttctccctcctcttggagcccggtgccctaggctccttcagagcaaagatctggaccccagctccctccttcccggggggactgagtagtccgcctcccaagtccgccgcgcccattcagggactgcgttcgccggagcgcgacccggggactcccaggcctgtgggcgggccctgcccaggactgggcggtgccataacccctagtttaaaaactcgcgggtaccggacccaagatcggggacccggcggcggctccgcgggggaaacagcgaggctggcgcagcgccgaggccgcgg

SEQ ID NO: 1560451 - DNA, 4001 bp, Homo sapiens
cttccacccccagtgccaaattcctcagtcctgcccggcaaattccaccaacctcagccctgggagactcagccctaagacctggggatgacaatagcctggggtccctgcttcccgctggcctgtacctctcagggcctggaactcaccccctccacacctgggactccaaggtgcggaatatccttcaggccaggacacctgggactatccaggtcgtcgggaccccagcttccaccaaaggggcatccaaggtcccctcggccagcccccttccctcagaagcgctcccactccctgggcccgggcctgtctccatttcaagcattggggttggaccaccccaccctcaagtccctccaaaaccagcttctacatcctcctccccacaggggaccaatccccagggtcccccaacagtcccgatgccaacttcattctaaggtccagttccccgagtcccagtgaccccgtgaacagagccccgagccccattcccccacccccagcccctcactcagaggtcccagcttcccttagccttgaccctcaaccttcccccctgactgcctcctccaaccctggacccctagcacatggccctcggccccccagcccctcaaaactgggcttctccaggacccacaagggagtgcttcagcccccatatctgaccccaaatctcaagttccgcagttctgctcaaacttgaaccttgagccctcaggcctgggatccccaggccctcaggtgagggtccctcaggtcccagaccctcccagacaccctgcgcacggctccctgaggcaccctggacacccccagacacacgaggcgtggctccctctgggccagggcaaccccagatccccatggtgcagctccctcaggcacagaagccccagacccccagagcgcagcttcctcaggcccaggacccccagaccattggcgccgcagctccttcaggccctggacaccccccagatccccacggcgcagctccctcaggtccaggaccgccattcccccagagtgagaatttatcaggccccagacccccagggcaccgcttcctcgggcccgggacccccagaccgtcggcgcgcggctctttcaggccccaaacacccccaaacccccaaggtgcgactccctcgggcccaggatacccccagactcccagggagcgactctctgagccccaaaaccctcatacaccaagggcgagagtctctcaggccgcagacaccctcagaacccctaggcgcggccccctgaggcccagggcccccagaccccggggcgcggctcctgcagggcttggacacccccagaaccccaggacgcagctccctgaggccgaggacccccagaccccgggaggggctcctgcaggcccagacggcgggtcctgcaggatccgaacaccaccagaccacaagaacgcggctccctgcagcccaggacccccaggccccgagggcggggctccctgaggcccaggatccctagaccccggggcgcggctccggcaggccccggacaaccccagacccctagggcgcagctccctgcggcccaggacccccagacccccagggcggggccgctgcgggtctcggacacccccagaccccatgaaccccagacccccggggcgcagctccttcaggcccaggacaaccccggccctccagtgcccgcctccggcccggggcccccgctgcccccccccccccccccaccggccccatctcccgcgcggcctcaccctggcaggccagtgagggtagcccttcatcttagcgaacaccaagtccccgggcttgaaggcgtgtggcatgctgacggcgagaggcccaggccgcggaaagcggctgcagcggcggtagcggctgcggcggcggcggcggcggcagcgggaggcgaagccgggggcgggagcgggacgccgagggggcgggggaggctgtctgggcagcctgccgacgcgcgcttattgggcgttgcgccaacggaagttcagccctccggccgtcacgggccggcaaagccgtcgatcaggaccacgtgcaggggacagagaagggaggcgaccaataagaacagaggttggagcacagcagttaacgggattggataacggacagacccaaggggcgtaacccagagactctaatgggaggttatgggaggtgaaagggaaaggtgggaggagacgaacagacgctctaagggagtgaaggggtggagcttaagggaaagaggcaggacatagacctccacaagagaaggggatataaggagggcagaacattggataccgcagaaaagaaggccaatcacttaacgcaatgggcgggtcattgacagcctctcccgctcaggaggagaggcttaaagtagatatgcaagccattggataccacaagagaagcgcctcaaggtagggagcaggcattggccatcacaagaggcggggcttcagcgggaacgtcggccattggctatcgaaagaagagcgatacaacataaaacagggacgggcgattgccagctcgaggaggcgggacttagaggaaggggcaggctccgggggagctcttagtataaacagccacaaaatgcacaaaatagttatttcttcacttagttaaaaacttaactgagtacctactatatgccagggccccaaaacgccacacagacctattcattcattcaagaaaaatgtactgaataccgtggggccgagtcacttgattgtcctgggcttcgctctctgcacttggaagatggggcccataatgattgtgaggaccctgctctagactgagcccggcaacaggaaatacaggaagtattagaagctataactcggccggacgcgatggctcacggctgtaaccccggcactttgagaggacgaagcgggcggatcacgaggtcaggagtttgagaccaagcctggccaacatggtgaaaccccgtctctactaaaaatacaaaaattagctgggcgtggtggcacgcacctataccagctactcaggaagctgaggcaggagaatcactcgaacccaggagcggggggttgcagtaagccgagatcgcgccactgcactccagactgggtgacagagcagaaaaaaaaaagctataactctaccttccggcagggcgtggtggctcacgcctgtaatcccagcactttgggaggccgaggtgggtggatcacgaggtcaggagatcgagaccatcctggctaacatagtgaaaccccgtctcgactaaaaatacaaaaaaaatagctaggcgtggtggcaggcgcctgtagtcccagctactagggaggctgaggcaggagaatggcctgaccccgggaggcggagcttgcagtgagccgagatcgtgccactgcactccagcctgggcgacagcgcgagactctgtctcaaaaaaaaaacaaaaacaaaaaacaaaactctaccttccaggaatcaagtataacagggccaagaaatgttaagttttaaaatttgttgatgttgctgtgttttgttttgttttttgtaattaggatccatggtaagaactaaaatgaaccagggtgcttgaggaaaaaaagctgaataatggagacgacttcttctctcctgggggatcacagagggttactggatgaagtgagtttaaccagacactgggagaatgaatagaagttggacatgatagtgaggcgagccctgggagggcatgaggagcagagggaagagcaaaaacaagcgtctgatcctcacttaaggtcaggagtacgagaccagcctggccaacatggtgaaatcccatctctagaaaaaatacaaaaattagccgggcgtggtggtgggcgcctatactcctagctacttgggaggctgaggcaggataatcacttgaacctgggaggcggagggtgcagtgagccgagatcacgccgttacactacaacctgggtg

SEQ ID NO: 1560452 - DNA, 4001 bp, Homo sapiens
ggttagacttactgttctccctctgtgcgtatcagagatggaaagcatgggcttaggagcttcttgggctttacagtaacctgtggattactctacacgccccatagtgtggtgtgtgcatgcaattacatacatggtttttacacaagcatcttaaaaggaggattaaataacagtgatactgtaataatgatagcattggtgtgttgaacactcacggagctagagaacccattaagtccttactactaccctattgagcaggagaagtgatctctccttttaaagaggcagaaactgagatttggagcaatggcatccccagcccaagtaacccagcgccctccattgacactgaactatgttcaaccacttctcagtgaatccgaccatgttcctgcaatgactttccccattttccggatgaggaagcaggcccaaagaggtgatgaaactgaagccacacagcttttagtagcagagacaggattcaagccaggtctgtctactctgacttgagctcagtttgtggcacacctgttgggtgtcccgccccccaccgtctgcttcctcactactggctcctcatcttgatctggggtggtggaaagggagtgtgatacccagttttcttttttttttctatttttctattttttttttttttgcgacaaggtccggctgtgttgtccaggctggagtgcagtggcctgatcttggctcattacaacctctgcctcaggctcaagccatcctcccacctcagcctcctgagtagctgggactacagacactcaccaccatgcctggctaatttgcttacttctagtatagatgagattttgccatgttgcccaggctggtcttgaactcaagcaatccgcccacctcagcctcccaaagtgctggaataacaggcctgagccaccgcacccggcctgcccgtatttccaggatctgaaagtgaggctcagagcggcagtcactgacacaattccacaccaccaggaagtgggtgagatgggatttgaaccctgtctttgggccctgtgctcttggcaggtgtggcccccacccaagaggcccctgccccacccctcttttgcctagcagcctcggtcccttcccccgtcacacccctgctgcctccagatcgccccagctggccccatgcccagccctggtccagccccctggcactctgcccagcttgggacgtgcagctggaaccctgccacccttcctccgtgttccagccaagaacagggggtggggccagggcctggcgggctcagggtgaggcctgagaatgggggttggggcccagtgcccccctccaaccaggaaggagagaagttcacctcttccctgccctgaagaatttgccacccatgaggaaggcataataaaagcaggcagtccctgcccacattcagggctacttctgggcttttctattctgacacccagctgggtattgggggggggcgtcttacgaaaagcacagaggatttggtgggtgggggtttaggttgtagctgggcaaggatgccttttggcattgcagagaggtgtcctgagagaccagaggcagggtttgggtttgcaaagggacttggcatgggggtctgggggagtctctctgccccccgactctgcctgttctcaaggacatggtaatctggtagggtgctggtccccaaaatcctatcttctccgggaatactacctcactgggcactctgggctgcaagccgtacccaccagggacttcccaagagcatccttggccacagtgggatggcagccagccccagctagaggaagggaagggggaaaggaggtgttgggggcccactcaccatcgcccaggcccccgttggctgaagggccatccagggggtgcaggaggggatgcggtgcagccaggacccgggtgcgagttacgagtgggtgcgcacggcggtgagatgactccacaggaaagggccggccttgggtggggagggggggcacccgagctcagccaagaggggcccccacccagccaggagggggcgctgagaggggcggaacgacagctggcccaaaaggggtgggatagagttccttgttaggcccagagccagggcctggaatagagtaggggacaggggagaggatgggggcggttagaaacatggggtgtgcatggatccaatcaggcctgagaagccagggaggagggaagggggtgaggcttactgggtgcctcacattggacagggaaagctgaggacctagaacattttccagggtcccatgggaacatggccagataaaaccccccggcagcggccccagggcacaggttcccctgtgttccagcagagctgcacctgctgggcaagtgaacccagaaacccaccctctgcccgggatgaccccatctgagtactgcggcagggggcgttcccatcacagcctgcaggctcacagcaccctgccatggagtctccccaaaataaagcttggatgaggctcccctgtctctcaggatgggggtgcaggggtgagatgaggggctggactttgggaagtgggtccagcttgtttccctgttatttaagggggtgactctggcttttgaaaggatacaaaaagtctcttgggaagggtcccagacggcttctgaaaggggctcccctctgcccatttctagggaaacccaatgtttaggagactgtgtcaggaagcatactattagaggagatctctcctctcttgaactcaggagctgaatgccattccaagggactccctatatgtgggaaggctccatttaggggtatcccatatcacctaggatcccaggcacctggtggcaaagaataccctcaattttggggggttcagaggccagagggatcaatatgtggagggcgaatatctcccgcagaagcctggggactgctcaaatgcaatcacccctaatttatcaggaatcccaagttccacccccaaccaggagggtaaatgagccttgggtagcgagaaatcgggaaccccgaagccgctcttggccagaggggcggggcagccagagacgtagggaatcccccacccctgcagtccctaagggtggagagtgcggtggggatgtgcctccaactgcgcgccccggggcgttcttggctcgcacccgcgaaccccaccccccccaacaatccagctcaggggtctccaggaggagagccccccaattcccagaactcctgcccccgaacttcagtaccttgcgcgctgcagccccagcgccatggctcgccagtcgccgctccggagccctcggaggcccctagccccctccccggccttgcgagccccctccccagctcctccccacgccgcgcggttggctgtgccacgccaggcctgaggctctgattgggcaacggtatgtcactcctgaaaaggaggcggaaccagagggaaagacttggaaaggcaagggggggataccgtgtaatacacaccccccaaccacgcccctcgccgcggacttcctcggcagtgtatcccgcaccgtcggctgaacgcgccttctctagtccagcctctgaagtgccaacgccagtactcttctgaacccactcagttcactctgctctctggaccccagtccccagcctctaacccccacctcttctcacctttccatttcctaaccccagttgagcccctctgacctccaatcccaccccttccaaacccctagccctgccttctctatcccttctaaggtattcacagagtaccccacatctcctccccaccccccaactcccaaccccaccccagttccacaatccttggccctctggcacctacccttctctctctctccccagcccctccctgccaccccagtcccataccccacttcgcccccattcctccagtctgcaccctctgcaccccagcttaccttccctaccccctctactccaccctaacctctt

SEQ ID NO: 1560453 - DNA, 4001 bp, Homo sapiens
gtcaggtacaccccacccctgtgctctcacagccccctagactgtcccatcccagccctgaccattctgggtcttcctgtctagtgacatacctatatcccctttgtattgtgagtcccataaaggtagggctatggctgtcctggtcaccactgtatccccagcatcaccagtacagggccaggcacagagcaaggagctcctctcacctgactgaggcccaggtgtttgctgacattctccgacaggtaagccatgtctccctcggcggtgagcaccatgacgaagccctccagggccttcaggtagcaggcatccagtggttctccccctgctcccacctggttccactcccctggtgcccggggcagggggatgggggcatctctagtcagttatggtctgaattatggactgaccctgggctagcctccctctgcctttcctcattcagagaaacttacatgcacccccaaggaagtgggggtacatcctagtggcctggattcccaaggaagaaagcaggaccaagaagcactggaattagaagcagggcctcccagggtggcagaattctaaggaagtaggagtctcccaagggaacagaattctaaggatgtgggtgggcctcctaggaggacagaattctaagtggatggaactccccagggtcaaaatatgaaggggccagggcctaaggggaattgtaatatagagatgagggggaagcctcgaaggggttcaaactcatggagggcaggaccttccagagggacagaactctagagaagaagggactcccagggaacagacttctaagggggtaaagcctccaagaaaagtaaaattctatggggcagggaagtcaaatggacagagcctcccagagaataacgctacttcccccgctttcagggtcctgggattccacggggtttatgtgtgagtgtatgtgtgtgtgtgcacgcgcgcgtgcacgtgcgtggcaaagcccgctgcaggatgcaattctaactgggtagaaattcaaggagatgcctactaagagaacaagtgatgtagaactagaggggtggggaagggacaagggactctcagatacagtaacgaaaagttgggcggcgcagcctcccagtggatatattatgagagaccagggcctatccatctgggagagtctcctagaggaccaaatcgtaagagttgaagggttagcggattttctgagtcctaaggaggcggggcttccaaagggcgcgttccaggggcggggcctcacaagtgatagacttcgaggggggcgggactcccagcaggccaggaactcaaagggggcggggcctccccggggaagtcgattccaggggggtggggctccgccgaaaaaaacgacaccagggggcggggctttgtcagaataaggcttcccggaggaggggcctccctgggatgtagtttttttccgtgggcggggcctgaccaagacgggaattcccgcgggcggggctcacctgcggcgcagaggcggtgcatgcgcaggtagctgatggtgaggcgcatgatagaggccttgtccaggtgggcgctgacgccgcgggcgaagggcagcgtgtgagccagctggtacagcacctcggtctcctggctgcgccggctgcgggccgcatcccgggacttttccttgcgcagctccgtggtcgacctgagggcatgggcagcattcactggtggtgactcgggaaagagaaaaggaggacgggacgagcacgtggggagctgccacgtggggccggggctcgtggagtgctgggccgcggctgcgcaggcctcgatgtgtggccctgtcgagttcgcggcgctccctgggcctggaagggctacactgtggagcccttcctagccctgattttacctgtggtcttgccagtccatggtgcctctggcgcctcgctcctctctgtggcgcgcctagggccgctctgtcccctccctgacttatctgcagtttatttcccaggctagggacgcctgggggacagggagggcccctgctgggagggggctggctgagctggccaggggccagaggagggagggcccacgaaggagaggcctacagcctcccaggccccctgccctgcagtttcccagaatcacctcctctgcccttttccctcaactgagccgtcctgtgaatcttggaacatagatctcaaagtctaacgatgaaccaccaacaggggccctaagaggggcagggacccgccagggtgacacagcaaagcaacctgttctgtttaccactcaccctgccctgtaatccacttcagatacctacattttgcatgtggggttggaagaataagtgtcgttttatcagaaatatctgccacttatccagcttttactattttgtcactcccagtgccaagtgcgaaacttatattaacccgcctaatgctcaggccacccagaaggaagttgataacgtcccattgaacagatgaggacaccgaggctcagagaggtgcagtgcctgcccacaaatagggaagcctgcctttaaacaatggtctacctaaattctcaaattttctctatctctatgggcctggatttatgtccagaattttagctcttctccctgtttctgccactgtcttcaaattcaaactccaggtctttctgaacccaaagtttctcttttcttttctttcttttcttttgagacaggctgtcgctctgttgcccaggctggagtgcaatggcatgaatatggctcactgcagactcagtatcctaggctaaagccatcctccagcctcagcctcttatgtagctgggaccacaggtgcgtatcagcacgcccagctaatttttgtattttttgtagagacagtgtgtcattttgttgcccaggctggtcttgaactcctgaactcaagtgatcctcccaccttggcctccccaaattctgggattacaggtgtaagccaccacgcctggcctctttcatacaaaattatagccggaagcggctataatttgggagggtgagacagaggatcacttgaacccaggtttgaggttacagtgagccatgattgtgcccctgcactccagcctgggtgacacagcaaggctccgtctctaaaaaaagacaaaaaacaggccgggcgcagtggctcacgcctgtaatcccagcactttgggaggccgaggcgggcggatcacgaggtcaggagatcgaggccatcctggctaacatggtgaaaccctgtctctactaaaaatacaaaaaattagctgggcgtggtggtgggcaccttgtagtcctagctacttgaaaggctgaggcaggagaatcgcttgaacctgggaggtggaggttgcagtgagccaagatcgcgccactatactccagcctgggcgacagagtgagactccgtctcaaaacaaacaaataaaaaacaaaaaaaagacaaaaaacaaattaacaaaaataggcaaaataaaaaattattatatgatgtgttacatctactatattgtatatataatctagtgtagtatatggtatatatagtctcatctacatttatattgataaatattactattagtaataggcagctgtcatttgctaagcatttatgtgcttgccactgtactatatattctacatgtattcatccaatcctcaggggacccctaggagggagccatttcattttttatttattttttaatttttaatttttaatttttttttttttttgagacggagtttcactgtgtcagccaggctggagtataatggcacgatcttggctcactgcagcctccgcctgccgggttcaattctcctgcctcagcctcccgagtagctgggattacagacatctgccaccacgcccggctaatttttgtatttttagtagagacggggtttcgctatgttggccaggctgctctcgaactcttgacctcaagtgatctgc

SEQ ID NO: 1560454 - DNA, 4001 bp, Homo sapiens
ccccctccaaccaggaaggagagaagttcacctcttccctgccctgaagaatttgccacccatgaggaaggcataataaaagcaggcagtccctgcccacattcagggctacttctgggcttttctattctgacacccagctgggtattgggggggggcgtcttacgaaaagcacagaggatttggtgggtgggggtttaggttgtagctgggcaaggatgccttttggcattgcagagaggtgtcctgagagaccagaggcagggtttgggtttgcaaagggacttggcatgggggtctgggggagtctctctgccccccgactctgcctgttctcaaggacatggtaatctggtagggtgctggtccccaaaatcctatcttctccgggaatactacctcactgggcactctgggctgcaagccgtacccaccagggacttcccaagagcatccttggccacagtgggatggcagccagccccagctagaggaagggaagggggaaaggaggtgttgggggcccactcaccatcgcccaggcccccgttggctgaagggccatccagggggtgcaggaggggatgcggtgcagccaggacccgggtgcgagttacgagtgggtgcgcacggcggtgagatgactccacaggaaagggccggccttgggtggggagggggggcacccgagctcagccaagaggggcccccacccagccaggagggggcgctgagaggggcggaacgacagctggcccaaaaggggtgggatagagttccttgttaggcccagagccagggcctggaatagagtaggggacaggggagaggatgggggcggttagaaacatggggtgtgcatggatccaatcaggcctgagaagccagggaggagggaagggggtgaggcttactgggtgcctcacattggacagggaaagctgaggacctagaacattttccagggtcccatgggaacatggccagataaaaccccccggcagcggccccagggcacaggttcccctgtgttccagcagagctgcacctgctgggcaagtgaacccagaaacccaccctctgcccgggatgaccccatctgagtactgcggcagggggcgttcccatcacagcctgcaggctcacagcaccctgccatggagtctccccaaaataaagcttggatgaggctcccctgtctctcaggatgggggtgcaggggtgagatgaggggctggactttgggaagtgggtccagcttgtttccctgttatttaagggggtgactctggcttttgaaaggatacaaaaagtctcttgggaagggtcccagacggcttctgaaaggggctcccctctgcccatttctagggaaacccaatgtttaggagactgtgtcaggaagcatactattagaggagatctctcctctcttgaactcaggagctgaatgccattccaagggactccctatatgtgggaaggctccatttaggggtatcccatatcacctaggatcccaggcacctggtggcaaagaataccctcaattttggggggttcagaggccagagggatcaatatgtggagggcgaatatctcccgcagaagcctggggactgctcaaatgcaatcacccctaatttatcaggaatcccaagttccacccccaaccaggagggtaaatgagccttgggtagcgagaaatcgggaaccccgaagccgctcttggccagaggggcggggcagccagagacgtagggaatcccccacccctgcagtccctaagggtggagagtgcggtggggatgtgcctccaactgcgcgccccggggcgttcttggctcgcacccgcgaaccccaccccccccaacaatccagctcaggggtctccaggaggagagccccccaattcccagaactcctgcccccgaacttcagtaccttgcgcgctgcagccccagcgccatggctcgccagtcgccgctccggagccctcggaggcccctagccccctccccggccttgcgagccccctccccagctcctccccacgccgcgcggttggctgtgccacgccaggcctgaggctctgattgggcaacggtatgtcactcctgaaaaggaggcggaaccagagggaaagacttggaaaggcaagggggggataccgtgtaatacacaccccccaaccacgcccctcgccgcggacttcctcggcagtgtatcccgcaccgtcggctgaacgcgccttctctagtccagcctctgaagtgccaacgccagtactcttctgaacccactcagttcactctgctctctggaccccagtccccagcctctaacccccacctcttctcacctttccatttcctaaccccagttgagcccctctgacctccaatcccaccccttccaaacccctagccctgccttctctatcccttctaaggtattcacagagtaccccacatctcctccccaccccccaactcccaaccccaccccagttccacaatccttggccctctggcacctacccttctctctctctccccagcccctccctgccaccccagtcccataccccacttcgcccccattcctccagtctgcaccctctgcaccccagcttaccttccctaccccctctactccaccctaacctcttggcctctctgactcccttttcaggttcccattgatgaataattaagcttatgtcaagtaaatatgttttaactcaatcacacctacttcaaaaaagagccgagaaatgtatttttttttaactagtcgactatgaagggagaagtacaaaggtaccaagcaagggtgaaagcattacagttggataaggaacagagtgtgtgtgtgtgtgtgtgtgtgtgtgtgtgttggaccactattctggatttggttggcagggaagaggatactacagcagaagtggccttgttgaaccttgaacttgccaggcaagttgctcaccttagggcctttgcacttgctgttcccacagcttagcacactcttcctccaggaatccacacggctccccggctcacgccagttccccactctgttttcttttgggaaaccacttctctgtcctcttcatctatttaatttgaatagggcttggccactgctctgccttcaccagctccagggatggacataggatccaaacctggctaatcagttgagtctgcttccctggccacagtgattggttcagggaaggcatgttacctaatttagcccaatgagaatcaaccctgagacatttgctgaaaccattaggaaagaggattttctatgtctgctggaattgctgggcagatggagcagatggggctcacactgccacaaagagaggagaggctttatgagatgaggttcagtgcaaaagagattgtgcagaaatgaacgattgtgaaaggcagttttgacaccagcacttgagtgcctggatccagccatacctgaactccagtttaattcttggatttttcaaatgaaacccacaatgggcttttttttttttttttttttttttttgctgttgcttttgtcaaatattgcttcattcactattgccttatttgctttgtgcttagattcgtttgaatggattttagatacttgcacccaaaagaatcttgatagagaaatcagctttcaaccctcagtgtagaggcaggtgggatgttagaaaaggagcagtctgaattataaaggggggccggccatggtggctcacgactgtaatcccagcactttgggaggctgaggcgggcagatcacctgaggtcaggagttcaagaccagcctggccaacatggtgaaaccccatctctactaaaaatacaaaaattagccgggtgtggtggcacacccttgtaatcccagctactcgggaggctgaggcaggagaatcgcttgaacccaggaggcagaggttgcagtgagccaagatcatgccattgcactccagc

SEQ ID NO: 1560455 - DNA, 4001 bp, Homo sapiens
tggtcaggctggtcttgaactcctgacctcaggtgatccacccgcctcggcctcccaaagtgctgggattacaggcgtgagccaccgcacctggccatccctcacctttcacttgcagaaagcagtatcatgaaatggttattaattgctattctgatcccagagtgccagggcttcagtacccaagaggctgagtgaccctgggcacttagtctatgtttgtggaatgaattcattccttccacagagacagtgggggtgataatgccggccaggtgctgtggatccgtcctgtctgtcccctgctgtgtttgtggaagtccctgcttccctgggtctctgtccttccacctcttggggcagaataatccacctttttctgtctctgtgtctctggcaagcattcatttagcactggctccatgactgcagtgctgggagatgtcagggacacagcgatgattaagtcagccccagccttgccctcagggtgcccctggttcagaagcatccagacagtatcaaactcaaaagcagacagaggactgggcatggtggctcacacttgtaattccagcactttgttgaggccaaggtgggcagattgcttgaactcaggactttgagaccagcctgggcaacatgatgaaatcctgtttctaccaaaaaacacaaaaattggctgggcgtggtggctcacgcctgtaatcccagcactttgggaggctgaggcaggtggatcacaaggtcaggagtttgagaccagcctggccaacatggcgaaactccatctctactaaaaatacaaaaattagccgggcatgggtggcgggcacctgtattcccagctactcaggaggctgaggcaggagaatcgcttgaacccgggaggcggaggcagtgaaccaagatcatgccatcatcaccccgtctctgataagtacaaaaaaaaaattagctgggcgtggtggcgcatccctgtaatcccagcaactcgggaggctgaggcaggataatcacttgaacccaggaggcggagttgcagtgagctgagattgtgccactgcactcaagcctgggtaacagaatgaaactccgtctcaaaaataataataataataattttaaaaaattaaaaaaaaaatctagggctggaagaagctgggaaaaagacaaggaactagggacgcagccaccctagacgacccctactcaccttgaccctgaaggggcagcgggtctggtccaccagcatgatgttctcaggcttgagatcagcgtggatgatagccagctccttgagccgggccagggctgtgagcacctgcagggtgactgtacggatgtggcgggcggggaggggcgcgaagttgttctccttctggaactcgaaaaggttttgctccagcagctcaaagaccaggtagaacttgagggcgtcatggaagaactcaaggaagcggatgacgtgggcctcttcagggtctaggcctcgcatgcagtgcagcagcttcagctcgttcttgatgatgcggttgcggtaggcgtcattcttgaggatcttgatggccaccatctcgcccgtgctccgccgccagcccttggctacctccccgaaggtccccttgcccaagacctcgatgatgtcgtagcagtcagtctccgactggatggtggacatggtgccgctgctgccagacaccgccctgcccaggcccctgtaccactggctctgccgcccaggcctcccgcctggctgctgacacagcaggccccccagtgggggaaagagaaccgcactcgtgtctcctcctatgaggttggcccctgcttccctggcacccccaaacccccaggccacactgtcagtctgccaggggctgcacccctccccagaaaccctcctggcttgggatgaggggccccaggccccaccgaatgggttccagcgctgttgagtggctctggttctgttgttggagacctgagccctggctggagtgggggtggggtaccaggctgggccccctcccccgcccagtggcggaatcttgcaaagaccaaacaggtgaagtgttgacagaggggggtctaatcgtgggccttgggcatacaggaatggggataaggcaggagtgaggaaaggtgggcttcttgagcttgggagatgtgatgtgtgtgtgtctgtgttcagaaaactcctgtcccagtctgtggctactgtggggtgaggttgtaaaaggccctgaatgccaggctaaggagtttggattctgttctgagggcactggggagccacagaagggctttgagcaggggagggcagggtcagatatgagtgtcagaaagttactgtatgaaaagggataggttggagcgggtaagagtggaagccccaagccagggaaagagtccaggacagggcacagatgggagaggttggggaggagagggcgaggccaatggatgagacactcaaaaggccaggagaagcagccgtgagaccgacggtttgagggaaaggcgggagctgtctaagaacgggcctagggctctgggatgaaggggcagtccccgagaaatggacatggataagaagcagcttgggggagatgttgaggccaaattagaaaatgtatttatttttggctgggtgcggtgggtcacgcctgtaatcccagcactttgggaggccaaggaaggcagatcataaggtcaggagatcgagaccatcctggctaacacggtgaaactctgtctctactaaaaatactaaaaattagccaggcatagtggagggcgcctgtagtcccagctactcgggaggctaaggcagaagaatagcttgaacccgggaggtggaggttgcagtgagccgagattgcaccactgcactccagcctgggtgacagagcgagactccatctcaaaaaaaaaaaaaaagtgttcatttttatttatctttttaattttttgtagaaatggggtctcactatgttgtccaggctggtctcaagtgatcctcctggcctcaagtgatcctcctgcctcaaccttccaaagtgctgggattgtagacatgagccaccactccagccagattagaatatttaacagcgggccgggctcggtggctcatgcctgtaatcccagcactttgggaggctgaggcaggtggatcacctgaggtcgggagttcgagaccagcctgaccaacatggagaaaccccgtctctactaaaaatacaaaattagccgggtgtgttagcacatgcctgtagtcccagctactcaagaggctgaggtcggcaggctgaggtatgagaactgcttgaacgcgggaggtggggttgcagtgagccaagattgcgccattgcactccagcctgggcaacaagagtgaaactccgtctcaaaaaaaaaaaaaaaagtaaaagaaaatgtaacatcaaaacatttaaacaaggatgaagttctttagaagtcttatctgatccttacaacatacaaagtagggattttatggaagagaaaatcaaggcacaaagaagtttttaaagtgcctggccaggagtggtggcttacgcctgtaatcccagcactttgagaggccaaggtgggcggatcacctgaggtcaggagtttgagaccagccttgccaacatgacaaaacctcaactccactaaaaatacaaaaattagctgggcatggtggtatacacctgtagttccagctacttgggaggctgagatcgggaggctgaggtatgagaatcgcttgaacctggaaggcggaggttgctgtgagccaagattgcaccactgcactccagcatgggcaacagagtgagactctgtctcaaaaaataaaaataaataaataaatgataaaataaaatgcctaaggtcactcaagtgactgccagagacagcctctgaccctaagcagcctggctccagcgccaaactctgaaccaccacccacacaacctcctaaaaac

SEQ ID NO: 1560456 - DNA, 4001 bp, Homo sapiens
cctcagcctcccacagtgctgggattacaggcctgagccaccacgcctggccaaggttgatttttaaatatgcataggtagccgggtgtggtgtaatctcacttgtaatcccagcactttgggaggccgaggtgggtggatcatgaggtcaggagatcgagaccatcctggctgacacggtgaaaccccgtctctactaaaaatacaaaaaattagcctggcatggtggcaagcgcctgtagtcccagctactcaggaggctgaggcagaagaatggtgtgaacctgggaggcagagtctgcagcgagccgagatggcgccactgcactccagcctggatgacagagtgagactcggtctcaaaaaaaaaaaaaaaaaaaattcaatcttaagcaagtccactggccaccataatccttccacactgagagtccagcctctgaaactatctatgcttccttgccgcctcccactggaatgccttccccccaatctccaacttaacaaaccagtcaggggcaattgagacagccctacttctaggaggcctccctaaccatttgaaatcacaggcatctgtgctgtccctgcccttcatccacatcactgaacaattacgcatgtatgtctctttacttttatttaaactgctccatatgtgttgttcacaattaactacttcatgagtgactgcggtaaggatggagcagaaaggaatgctgagggaagactcctgttagaacgaggcactcttccaggactaggaatgaactcaaaggtaaaattcaggtcagactatgtttggagccgaaaagaccaaagggattgtgaccaactcagcattccactggaggttatatgattaaacggtaaactgtttatcatgaatgcaggatgtgagcaaacgcacactgccaccaaaagatgtgctgagagccatcactgcctggcgcctggctccttgaagtgatctaccaggaaatctagcgcctattgttggaaggatgcagtcttgcaattgcgaaccaaacggccaactgacaattacctgacaatcaccaccccctaacttgttatctgttttaccaataaatacgggagggttgtgtaaagctcagggcccttgtccactagagacaaagtgcccccgaccccttcttccaaatatacttttttgtttcttgtcttttattccttttgttcagtccaccaggtccgtgcaggttacaagtggcgccctgaacagcgacagaatcggacgctctacaagactatatcaaaatcctccttgttctatggactaggaatgactagggctaggaatgactttgcccaataccaacaaggcagcctccaggacaagaaaaggtaatgggacccattctgttgacagccaagatagaattacagttaattctcacctcttttttggctctcaggagccctgtggccattttcctggtctcctgagtgctcttcctggagaagggcaaagtctcagaagacagatctggggatgtgaagagaaataagagtggcctaggtggaaacaccctccccacgaagtgaagcgcagtccgctccagagccccacagttggggtctgggatgtcacagaaatcaccagagcagccaattcccatccagtggggggccaggatgacccagccaccctcaagctcagccgcaagctcgggacagggagtgaagcccttgtccccaagcaacggagtgagggtttatctctaaccctgtgggctcgaatgaaaggaaaatggcctggaggtgcccaaaggagagcgccctagttctgagatagctctgcggctcccagccggcgtccccgtaacacagggacacgcagaggggcatgctgactgcctatagggcactcacggaacgcgggtgcacgctgcggatcctgaagccgaaagtcaggtaacaaggtgcagaggtgtgggaaagaccttaagagggaggccttcccgggtcccaaccagcttaacgcgcctgggccaccgaccggaagtgtttctgacgtcaacgctacacactgaagggtagggaggggagcggaagtgaccgcagaggcctctggggattgtagtttcggagctacagaggcggagaagtcggctttgcccaccacacagggtgactgacatctgcacagcgcacacaaccaagtttacgaacccactcttaagatgcccaagtgacgttgacaagtttctctgtaaaccaatgagatctgctgaccgcgaaggcatcgcgggactgccgaaggattctgcaaaatgtggtcccggtgctctgcgggtggccagtgtgcgctgaccttcaaggtgcgggtgagctgagctcactacgcaagtctccgccctgatgcgcccttccctgagcaggtgccaggtcgggacagacgcggctcagggagagacgatgctctgcgggaaccaccagtttggaggcgacaccggccctttgtcccctagagtaggagggtgtaccaggacagggaaccccaaggctattttcgcggagagcaggattggtttggggcaaactcccggaatgcagatgggggagactggtcgcgtgtccctaggattttaggggatgcagactgaacttggggtgaacagcaaaagatcccctggtggtggtggggatccgaagcttgatcaggaaattcccgaggtttttattggaggctggggtacaggtgcggcttggaggaaacttccggagggtggggtggaggtggggcggtgttggaaaggaggcataagtctgaccgttttgttcaacaggggtgttttctttttgcattgattttatttttaaagatattacattaaaatattgtttatcttgattactgagtttttttggtgaccctttaaattctgtatccacagtccccagcatttacagaagtgagggcctggcttctagggcatcaagcagccagaaagtcccttaggacaattgttgaattgtcagtgagtcatcttttcctttcctgacttccttaatatccacaatttcctcgtaaccatccctccaaagccacacccacaaggcacctccaagacctatcatgaagcagatattcaaagattatttgtaaatcttcacaccctaccccctccagaatgtcttccaacatccctttgcctggagaagtaaaaaacaaggtttgcatgttgggtatcagcctctcccattgagagggtgtttaggaaggaggatcagccgagagccctattccagcccaggtaaatgacccggccaaagatttaatatctataaatgtagaatgcttgtcacagaactcagtgggaaccacagtcaggcatggggctgggatttaagaagcacaaatgaaaagcagggactagaaaacttaagaaagatatggtaggggtgggggtgggggtacagtgaggatgtgggatcctgagataatccaaatcactatgtttagatgtaggtgtacaaagggagtaaagagagacccaggctgatggggtatttgtaataaatcaaacataatgtaacagcaggtcaagtaataaggggactctcaagtgataaggatcaagtgataaacagtgaaaggggcagaatgaaactctacagaaattaacaaacatcaacaagacatctaggaaagcatttacagctgcattcatttaaatgaaaggtgatagttactcagtgctgtgtgccaagtacaatgatacactctcacctgagttacccttgtaaatctgaaccacttgtcattatctgtgctttaaggagtcctattttccacactcttaactggcttgagatgtgaaaatccatctaaattataaacgcagtggggaagaaaaaatctagtcatgcccatcaagggaacatgtctagttaaaattagcatagataaaaatcagcaaaaaacaaaaaagcaaattgaaaaaatattctttgaaattaaaagccatacaaac

SEQ ID NO: 1560457 - DNA, 4001 bp, Homo sapiens
agagttcgagaccagcctggccaacatggcgaaaccccatttctactaaaaatacaaaaattagcagggcatggtagcacgcgcctgtaatcccagctacctgagaggctgagacaggagaattgcttgaagccgggaggcggaggttgcagtgagctgagatcacgccactgcactccagcctgggcaacagagcaagactccatctcacaaaaaaaaaaaaaaaaaaagttggttatgggtgggcatttctccaggaagaaggaaaaaccctgcacgtggaatcctttgggggtcggggctactggggggtagtccgtggaccccgccagccctgctcggcgccccgccccgcccacctgcttttccgttggctgcagcttgctccactcggcgcccagcatcttggtgatctcgggaaagggcagatccgggtggcgcgtgcggatctgctcgcgccgctcgttcaggaagcgcacgtagcccgtgaccggtgccttgggcccattcggcagaatcttcttccgcttcttgcccttgggccagccgcgtttcttcaccggctgcagaaccgggctgcgtcgttgggaggggggcctggcgtactggggcagggctcagaggggcatgggcggggcctaacgcgtatgggcggggatgggggcggggcctagctgggaggaagaacccggaaaagatggaggtagggcccggtcagcagtcgggacacggtgggttagagggatccctggccaggggtgaggggatctgaggaactatgggccgaggtttgagtacagggttggcgttgacttcggttgtgggcgtggcctctgcttggtgggcgtggttttctgctggagaacgggcccacaggaccaaggggagggtgccgcccccaaggagtggaagtgggcgggaccttagagtgggcagagctggcattgtgcggtgggcggggcctggacttagagtggcagaggacctgtcaggggcgtggcagctggcacggggcggggtctcagcttccagaggaaaatgggctgtgggcggagccacaagcaattcaaatccagcctggggcggggcttcgaggctggggcgggagcccggggcctcccccagctcagcgcagggactctcacctcctcctcgtgggaccccttctcgcccgcgcgtggaccctcgccgcgctcttgcttgacagtcaccacgaagcccccatgctggcccggagccttgccgcccgccggcctggagccaaggataccgcggtcagccccgtcccaagaatctcccctcccccaaaagcccaccccagggcgttttgacccccgacggcggggctgcagcgagagtgcatgagcccgaggaggcagggtctgatggggtcagtatccggggaaggtgggacaagcggggctcctgggagggactggaggccgaggtggggggtgcagaattgggtggagggagaagccccctgacccaggtgggggagtcaagactccggcgggagggactgggtcaggggttcaggagctagggctgcagccgggaaagtagcgagggcgtggggaggggatcagtgcactcacgcggcggccgcgccgggctgcttggggccgtgggacatggccgctccgggccggacctggaacacggacgcgggcggaggtgagtagcgcccgggctgcccgatggcagaccgcgaactggggtaccccgcgatggagagccccgggatgccgggcccggagcgctgggggggccggatccaggggcagggaagtcctcgagggcgggcgccccaagaatcctttgttgggcgattgccccccccgggaggcctgggccggtttcccccgggccaggaaagaccccggcccggccctgggacccctgcacccccgccccctctcagggcccggagttccgcggctgttttcacctccaaagaaactttcccggacctcccgactgcgcgacgctccaaccaaccgcccgcagcccgcccccgtcggccgccccgcccctccccgcccccggcatgctaatgaaggcctcggcgaacggtcccattgggtgagaccttccccccgggcgagcccatgcagataccgatcggcgcgccggccggcgattggttggggaggttgctgagtcgcgtgggaggttggtaaggaaggctgcgggcggtgcgtcaagttcggctgcgctcggccgcgctcgggaccaatcgggagcgagtggcggacttgccgggcggagcctcttaaagggccagtaggagaggcgcggactcctcctccctctctgaaggcaagactcccagccgctgccggatggggcgaccggcggatccgggtcgggccccgccccggttgccatggggacggaggtgggttgctagggttaaggtcctgcgaggcagtccccagccctaggcaaggtgggacctgttcttaacatcctgcaaaacctagcggagaagtttcctatgtatttactcagtttagagcccccgacgtccggatccgagggcttctggccataggggctgctctccctctggggtctcggctttcccccctgtgcaacggggacatcacacgatatccaggacagagagactgggatgctgggaagctgagaactgggtgtgggtcaggcagggggtggggttgggagctgggctggaagtgtttggggaaagatggtggtgaagggagatggcaaggacttcgtgaggatgggtcaggaggctccgctctggtggatcagggacctcccagcagcagtctaggcttctggcccaagttggggctgctcacctcctcttttgtttttgagacggagtctcaccctgtcgtccagggtggagtgcagtggctggatctcggctcactgcaacctctgcctcccgggttcaagcaattctctgcctcaccctcccgagtagctgggattacacgcgcctgccaccacgcccggctaatttttgtatttttagtagagacagggtttcaccatcttggccaggctggtcttgaactcctgacctcgtgatccacccgcctcggcctcccaaagtggtgggattacagacgtgagcccccacgcccggcccacttcctcttcctcaagtccgcttaaatgtcacttgctcagccaggccttctctgattttttttttgcctccataagtcggcttctccctgtggcctgcctgtttggttcacagcattgcccatggtggatgctcaatacacattcattgaatccttcagatgtctaggaggcagatgcagctgctttggaaaacagactggcatttcctcaaagggttaaataaatgtggaatcaccatgcaattcagcagttcactcctaggaatatactccagacaactgaaaacaggtgttcaaacaaaagcgtgtacacaagcgtcggtagcagcgtgattcataatagccaaaaagtgaaaacaactcaaacgtctgctaatgatgcatggatcgatgacgggatatatccttacaacagaatattatccgccatgggccgggcgcagtggctcacgcctgtaatcccagcactttgggaggcaggcggatcacttgaggtcaggagttcgagaccagcctggccaacatggtgaaactccagttctattaaaaatacaaaaactagccaggcgtggtggtgcacgcctgtaatcccagctacatgggaggctgaggcaggaggatcccatgaactgggaggcagaggttgcagtgagccaagattgtgccactgcactccagcctgggcaacagagcaagactacgtctcaaaaaaaaaaaaaaagaatattatcagccataaaaaaaaggagcgagtctctgacacaagtcacagcatggatgtacctagaagacatcacactcagtgagagacgccagacacaaaggtcacacagtgtgtgatcagaatgttcaggaaaggcccatccacag

SEQ ID NO: 1560458 - DNA, 4001 bp, Homo sapiens
tccccaacctctgaacctggtggatcccattagaggatctgctgcccggtcaaccttcagcccaatggccaggccacagccctcccatctcaacggcccctagagcccccagattgcctaagcccccaacctgcagcggcccaaacacaacatcgtcccaacccggcaccctcccttcctgctccctgggccccgcggccagccctggatggagtggagggaggcggccaccactcccagggtccctaccgtgagctgaatgccggggtcccggcctctctgctgtggcccctgccgtcccgcccggtaggggctgtagctggcacgagcccccagccgccgccccagcatgagccccgagcacagggcgggtccctgtccccctgcggcccggcgtcagctccgggtctcacccgggctccactcacccccgagggctgcgggctggggcttcccgcgcggttctttttcgagatggaaggggttttcatgagctctcgtttcttcctggagaacatgatggggccccggccgggagcccgagggggcgggctgggggtctcagcgctgcagctcccggcgctggccgcttcgggaccacattgtcgccggccaccccctccccagctgtcaggcccacgtgacaggcccggccgtcactggcgggccctccccccaacaggaaaaggcttcggggaggcggcgacgcggcctcgcccccgacccttcccggcctcagcctgcggctctgcggagtgggcgcgaaggtgaggtcgcaggccccgcccccagccccgggccgcgccccccgcttccgccttcgggagctcggagccgcgccgctcgcggggtgggaccgggagcccctgcctgacgctggcgggcacggggcggccgactgcagggcgctgactctcactcccggacgcgagtgggcgtgcacagacacgtgcacgatgacacgcagagacccggacctccacacgcgctcagacgccaccaagcccctggagcctcgccctcagaccccagacacacgcacaggccgaagctgcgcccctgcagcccccttttccctgaaggcaagcccgctccaccgcctctcctgcagaccctagggtgtggccgggccccagcagggccgggcagagtagggtcccccccatcacccgccctgcagccccgtgaagtgggtcaggtcgaggacaggtggggaaactgaggcccagaaccgaaaccctgggggcaaagacgtccaggaagtcagaacaatccaggttaccgggccctgtccgtctgggtccccacgtccgtctgggtccccacgtccacctggtcctgggctgcctgcacaggggtccccaaagtgtggtgtggaccccaccatcggcagaatatgctgaggacacctggttacctctcagcagccctgtgggccatatcatgttgccccagacctgcccttagctaaggtccccagccccgcctcccaagctgcattccagtgactctggaccaccggacgtgctgggcagcaggacgcaggcacccgttgctgataacagcctgaggcggcattggccaagagctggggcatctgcaggcatacagatcccagcctcctaccttcccccaacccccaccccgcagtgtgaactctctcccccctccccaagtctccctgctgtccccttccagaaccccacccccaatcccaaaaccccaacctctttcctttcccaaaccccattcccacctacctcgggtgggaggggcagatctctggggcacaggacatgaaggccacagccccttgctccaagtctggctctccaggcccaggtccaagtgcaaacccagcccagcagacccttgagaactctttgcccccgactcatggcgctgagggctggggtcagagggtgagggtcagctggatgtcggatgggcttctggcccggccctggcctgtgctccgggacaccgggctcctgtaagcttcccaggacattcctgagtcctgacctcatccccactttatggccaggcacttacaggtaccgcccttaggcgccagccccacataggcacgcagggacgtggggacagggacggtgtgaccaggcccttatgaggcccgcactcacatccccaactcctgggctggccacagaggcatttacagctgggatccggtcagctgtaggcacgctcacacctgtgtcctatgaatcgccacttggcccgtatgtgcacactcagcttgcaaggggccagccatatccagacgcatgtgcaggcagctgtgtggacatgtgtgcagcctggctcaaggacacacatgcacacggtttcaccaccacggcttctctccagccttctctttattttctccagggcaccagcccctctgccagcctgagtccagggctcctaggcactctaccttgcccttgccattcccagggcctccccgcggccccgcaggggagggaggctcagagcacagtctcggcagtgctagggtcatcgaggaactggctgacgcgtttggggtgctgcaggcctggcgcggggtccactcccactcctgcctccttctgctcttcggtgtcctcgtccttcccctggtccttggagaagtacaagaatacctagcggtgggcagcccagaggggacaagagggacggtcagcccacgggcctggcccccagcctgcctcccccagcccgaccccggcgccgtgatcacctcctccagcatcgtctggctcacggaaaagtcctccacgccgtgctctgcgccgtgcaccgccagctctccaaagacgcgcgccagggcgcagcgccctcccggcggcagctggaagcgcaggcggcctccatgtgcctcgcgcagctccgccccagggaactcggccgccacgaaggccgctgccggctgggaccttgcggcgggcacccgcagggtcagtgtgtgacccgccgcgaatctgcagtgagtggggccagggctaccggatcgggcctttcccaggtcccacctcagctcaccctccagcccctaatactctctggccccgccccatacttgtactaccctagcgatcaagtggtcctcccgtctcagtcccccgccaccccccgcccgcgtagctgagaccacaggcacacaccaccatgtccagctaatttttaaattttttatagagatggggtctccctaggttgcccaggttgctctcgaagctatcaccccacttgactcctttttcggacactcctctttcgcccttgcactctacccccgcccacacaataaatacccccgccccactttcctatggccccgcccactaaccaggccctcccctaactccacccatcaatccaccctcacctctccaggctgcacctactccaacgcacacctgattgtgtcttctaaatccacccagagcccccggctcacgcctcctggtcctgcgcccccagcacaccccagcctgtctcgccccctcagtcacccctgcaggacaatctaaagccttggccatctctccagttggagccaaactttcctcacccggctctacgtctggcctctcccctgagcctacctacgtgcccaccctcaccccacacctgcctggaggccgcgccggctcacctgcccttgagatgttgcgggctgcccaggcagcggaaccgcccattcaccatgatggccaggcgcgagcagagcgcttcacactcctccatgctgtcgggacccggcaccacgagctccgtgaggccggggccacctgtgcctggcgccacactgcctgcttcccccggcctgggccacccttctggtgtggacatctccccactcttccccagaccgttctgatcccggcgccgcgtcccacctctgtgtgtccttacaccccggggcctggcgccctcgccccactagggccaggaccccccatcccctgtggccttgtgctttgggg

SEQ ID NO: 1560459 - DNA, 4001 bp, Homo sapiens
gtttgagaccaacctggccaagatggtgaaactctgtgtctactaaaaatacaaaaaaattagctgggcttggtggcagggtggctgaggcagagaactgtgtgaacctgggaggcggaggttgcagtgagatctcaccactgcactccagcctgggcaacagaatgagactctgtctccaaaaaacaaattggccgggcgcagtggctcatgcctataatcccagcactttgggaggccgaggtggacggatcacgaggtcaggagatcgagaccatcctggctaacacagtgaaaccccgtctctactaaaaatacaaaaaattagccaggcgtggtggcgggcgcctgtagtcccagctactcgggaggctgaggcaggagaatggcgtgaacccgggaggcggagcttgcagtgagccgagactgtgccactgcactccagcctgggcgacagagcaagactccgtctcaaaaacaaacaaaaaaacaaaaaaacaaaaacaaaggtctggaggtagtaaatgtcacaccaagcattggatctcctcctccagggacctccagccctgcctccacccgccctcaccttgttcttggcctcctcctccagccgccgccgcttgtccagggtcttggtggccgtgctgcctgctcccggcgcgctgccagcctgctcctcctccgccttggccacgaggaagcgagccttgtcgtggtcctcgcagcgctgcacgtaaccctgcttggccttgcgcaggttggactccgcctcttgctgtgggtgtgggagccaggaggccagttccaaccctatcctcggatgggactcagtctccccagctcctcctttcctccccacccccatctctctcagcaaggccccatggcccagctgggcatgcagaggaccctgcacaacaatcggcagcggaaaaacaggaggagtggccgggcgcggtggctcacgtctgtaatcccagcactttgggaggccgaggcaggtggatcacttgaggtcaggagtttgagaccagcctggccaacatagtgaaaccccgtatctacccaaaatttaaaacaattagccgggcattgtggtgcacgcttgtaatcccagctactcgggaggctgaggcactagaatcgcgaacagcttgaacccaggaggcgaaggttgcagtgagccaagattgcatgcaccactgcactccagcctgggcaacagagattccagctcaaaaaaaaaaaaaaaaaaaagaacgggaggaggcacccgtaacaggacactcggagaaatgggtgtcctgtgtgcccactctgcagcccgggaagctgaggtgcagccaagctctgcacagaggctcacacggcagcctctgcagacacgcacaccagcccccacgggagcgtctccgggctcttttgctttcacttccctcctcacagacgagaacagagaagccgcccaggcaggaagccaggcgcccacaggttggcaggaagagcacttagtcaaaaacctgtgggctcgggggccacacctcacaacctgcaccatcagattcgcacacaaacaaacggactcatccaattactaggagaccgccaggcgccatgggtcacacctgtactcccagtgctttgggaggccgaggcaggaggatcacttgaggccaggagtttgagaccagcctggtcaacatagtgagaccccatctctacaaaaaaattaaaaaatttagccagacgtggtggcgcacacctgtggtcctagctactcgagaccagcctggccaacatgatgaaaccccatctctaccaaagatataaaaattagccaagcacggtgtcttatgcctataattccagcactttggaaggacaaggtgggcagattacctgaggtcaggagttcgagaccagcctggccaaggtggtgaaaccccatctctactaaaaatacaaaaattagccaggcatgttggctggcgcctgtaatcccagctacttgggaggctgaggcagaagaatcgcttgagcccaggagatggaggttgcagtgagctgagatcgatccactgcactgcagcctgggcaacagagtgaggctcttgtctcaaaaaaaaaaaaaaaaaaaaaaaaaaaaaagactactgccaacaatcacaggtttctacctggcaaaataggccacaggtaaaaatcaaaagtcaaacagtaaattgtgggaggggaatggggggagtctaaaactcacatgattaaggcctaagttctctaatatgtaaaaagctctgacaaatcaatgataagccactgtccagtacaaagtaagcaaaggataagaactaagcaaaggttaagaactgagggttcacagaagaggaaaagcagggctgtggcctgggagggtagctcatacacgcacgccccttgacccagcagttctattttgggcactgatccctcaggcatccttgagacaggggcacaagcttgtcatagcaatggtgttcgtaacagcaacagctcagccactcccaagacgtccatgaaataacctactcaatctcctcagctgagccctgcacagccgaaaaaaggggttcaggctgcttcatgctgactgatatcgggtgagcctctctatatggaggtgaggataaaaatcaggagcagaacagggcatgaggtgagctgtcctcgtgtgtacaaaacagggcagatatgtgtttgccggtatgtgctggaaggagctaggagggtgcgtttcactgcagaccgtgttaacacagctaaaaagcaaacaaaaactgggcaacatagtgagtatacaaaaaatacaaaaaaatgaactgggtgtgatggctggtgcctgtagacccaggaactcaggaggctgaggtgggaggatcattgcagcccaagaaggcaagtctgcagtgaggtatgattgcgtcactgcagtccagcctgggtgacagagcgagaccttatctcaaaacaagcaaagaaacaaacaaaaaggcgccggcgtctttgaaataacccaaaagcgaagtgggaagagaatacaggcaggaggccgggtgggtgcggtggctcacgtctgtaatctcagcactttgggaggccgacgcgggtggatcacctgaggtcaggagttcgagaccagcctgaccactatggtgaaaccccgtctctactaaaaatacaaaaattagccaggtgtggtggcgtgcttctgtaatcccagctactcgggacgctgcgacaggagaattgtttgaaccagggagatggaggttgcagtgaaagcctagatggtgccatggcactccagcctgcagcctgggcgacagagcgagactccgtatcaaaaaaaaaaaaaaaaagaatacatgcaggagcatggcgctttcccagtcctgagagaccatcagtctccctcaacccggagaccagctgcttacaaccgagggaggcacggcttctccccatttctgcagggacagcagtgagcgccgggctcctgggtccttccaggcagagctgggggcgacggggctggagcatctccgacccggcttggcgttggggggggcggcccagcctgcgaggccgcgcatgcgcaggaggccggggcgtgtgcggagctcgccgcagggccctcgctatggggctggggctgggactgcgcctgcgccgaggcccgctgcccgcccccgcccgcccccgcccgcccgcctcaccagcttcctctgggcacggtgccaggcctccttgatctccttcctgcgcttctcgtgttcaagccgccgcagggtcaggggctggggcgagacgggccgtgagtgggtaccccggtgacacccccgcccagcccgccctcccgggcaccacgcacctgcatgaaggtctgggtctgcaaggtgcccaccgcctgcaccatgctgtggccgaactccaggtcctgctccagggccagcgagtagatg

SEQ ID NO: 1560460 - DNA, 4001 bp, Homo sapiens
atgatctgatgcatgacacgcagagcctcacccaggcactcgtgggcccgcgggcggcgggcctcaaggaggtctgctggggagagtcggagtgagcagtggggtagggcccagtcccagggaaagtctgtccacctcctccctctttagagctcctgttcccagatggggaaactgaggcagaggtggaagacggcagatgcctggggctcatttcgagaccgcggggagggcactgtccctccctgggctaccggccagatcaacaaaggccagacgttggcctaggcactctgctgctcagaacactcttttcttgtccctccagaaagcaaactgcctcttgtccttcaagctacagtcctgcagccccttcctccatgcagcccaccaggctccttccctgccctaactcctcaggactgctcaaagccctgtccaggtctctctctgcccttcctaagtgaggaaactgaggcatagagaggggaagccatttctcaacaatcacacagcttttccatctacgctagctctgaaggcgtgagaacgccaggcagagggatcctgcctggctttatctccagggcaatagggagccatagaaggtgttagaacagaggaggtcagatctgactgttggaacctggctttcactgccctcctcagccaggggtggtggcttacacctgtgaccccagcactttgggaggctgaggcaggaggacgggttgagcccaggaattcaagaccagcctgggcaatacagtaagaccctgtctctgtaagaaataaaataaagaataaaaagctaaatgccctcatcgaacgttctcaattggaagaagaaaaaagcagagagggccaagcacagtgcctcatgcctgtaatcccagcacttggtgaggccgaggcaggcagatcacttgaggtcaggagtttgagaccatcctggccaacatggcgaaaccctgcctctactaaaaatacaaaaagtagcagcgtggtggcactcctctgtaatgccggctactcgggaggctgaggcaggagaatcgcttgaagctgggaggcggaggttgcagtgagccgagatcgcgccactgcactccagctgggtgacagagtgagactcctccatcccaaaaagaaaggaaagaaaagaaagaaagaaaaggaaagaaaagaaaagaaggaaagaaaagaaaaaagcagagagtacaggcgaaacatcgagagccaggcacacaccacgtagtggaaacaaacccacggaattcgtaggaggggaaaggtacccgggaggacagaggccagcgggaggggcagctttgacgcctgactgtaccgctcagaggatgccccaaatacgaaatgaaatctgaaaaagtaagtgccccatccctttcggcaccgaagaccccaggtgaatgtcacctccgggaagagaccgaccgagtcacccgccagagataccccgctggccgccgccgggcctgagaccccggaccggaacatgtcttcgctgctggatgcgaggcggactccgggaatgggattggggctccaggagctccgggaagccgctgggaggccccggccacgccccttctcgggaccttccagccgggcacccggcactccgcgcgcggccggcgcacggacccccggctgtccccgcacaccccctacccgggaagccggcggccggcgcgacccctgcgcagcgcagggatgcccaggtgcgcacggccaggccaggcgcgcggcagccgctgctcccccaccgcgggcggcaaacggcccgagcgccacgtgctcccggacgcggcgggacccagcgcccggcacctgtcccctcacctcgggggcccgcccggcagcgcacggggccctcgtccagcaccgggtgcgccgtcccgcagatacacatggcgcagccgtcggggcgcggagaccgcgagcgcgtggggcctggcagctgaccgatgggggtctccggtggccaaaccggctccggccggtcaggaggccccgcccccgcgagggaaaccccgccctggggtcccgttcgccccagcctgggtccttccttaaccgcagagcttcgaggtggggagggtcgaggacgggcagggaaactgaggcccagacctgaagcccgggaacgaggaagcccgggaagtgtcggggtggcaccgtccatgtgggtcccctcctagctgcctgaacgcgggtccccaagctgtggggtggaccccacaaccatcgctgcatgcaggtggccccattttatagataagtcacctgacacctagagagggaaggggcttgccagggtctcagcagctgagaaacatcgggactagagcccacatcctagccgccagggtcttctctggcctggggcggccccgagacgcacagaaggcgcccccagccgggcgcggtggatcaggcctgttatcccagcactttgggaggcggagccgggagaacggtttttagctcgggagttctagaccagcctgcgcaatatggggagaccccggtctctacaaaaaatacaaaaactggccgggcgcgatggctcacgcctgtaatcctggcgctttgggaggccgaggtgggtggatcacttgagatcaggagttcaagaccagcctggccaaaatggtgaaaccccatctctactaaaaaaaaaaaaaaaagaaagaaaaaaaattagccgggcacggtggcgcgcccctgcaatcccagccactcgggaggctgaggcagaagaaccacttgaacccaggaggtggaggttgcagtgagctgagatctcgcccctgcactccagcctgggtgacagagtgagactctgtctcaaaaaaaaaaaaaaaaaaagaaaagaaaagaaaaagaaagaaaaaaagaaaagcccgggcacggtggctcatgcctgctgtaatcccagcactttgggaggctgaggcatgcggatcacgaggttaggggtttgagaccaacctggccaatatggtgaaaccccatctctactaaaaatacaaaaattagccaggtgtggtggcacgcacctgtagtcctagctactcgggagcctgaggcagaagaatcacttgaacccgagagaggaaggttgcaatgagccgagatcgcgccactgcactccagcctgggcgacagagtgagactccatctcaccatctcaaataaaataaataaaataaaataaatcaggtgcagtggctcatgcctgtagtctcaggtactcgggaggcagaggtaggaggatggcttgagcccaggagttcaaggtaacagtgagcctcaatcacaccactggactccagcctgggcaacagagcaagaccctgtatcaaaaaaaaaaaaaaaaaagtgccccaccctggctggcccagttcagacctcctgcaggagcctgggagctgagccccgcccaggccaggcctccaaggaagcgccaggatcggaaaggaaccgagattagggtttccccaggaaagcagcctagcccccgcccctgggaccagataacccgggggctcccactcctcccagtggggaccgggccttccccaactagtgccctgaaggtgcagaggccactccaccacttgaggtccagtcctggctctgccctgccctggctgggtgagccaggggtcagggcctcactagagacttagtttcgtcatctgtaaaatgggcggctgctgggagcagatcagagcgcctggcatgaccctggcactgtggtttctgggaggagccgggggctgaaggcagcacatgaggtgcccgcctgggctgccagggacaaacaggaagcagatgaaaataactcggcaggaagcagggctgtcagcggccgcgtggaggagaaaacggaactgccggcctgcaggccgctgggtcccagcacctccgccgcctgatgaccccatcctgcccctcgccatgcctcctgaatc

SEQ ID NO: 1560461 - DNA, 4001 bp, Homo sapiens
tctgcccccatctgtcctgtgctctaacaccttctatggctccccattgcccttctgcctggcgttgtcatgccttcatcctacaccagcggcaccccacaccttggcccccaaatgcattctctgtttccgtgtttctgagcctgtgcatgggacatttcctctgcctttccctcctaattgccatcagatcctttaaaaaaaataaagtgggcaccctcttgagccagtgtacgctcagggactcccccaccaaactcctacacatccctcagagccttagctgtcatggcctcttccacacagccctccctgccatctgagcctccctcccttctgagcctccccaagtccctccctccatcctcccttgggtctggctctgtcttccacccaggcctcggtgtccccgtggctctcaccgtcacgcaacacacactccttaagtttctcaaggccctcagcgaagcgggccacgtccgccagcagatgggagatgtcctcgacgacgtccgggccggcaccctcggtgggcagctcgcccgggctggcggctgtcagtgggctccggtggctccggcccagtgtccaggaggcagcacccgacagggggaagccagccgcgctggcgtggcggctcaggctggtgggccgcttgagggtccctgtggccttgacgccggaggacccagcgggcggctccaggcttggtccggggaacaccgcgtcagccccatccttcctgggcagctccttgggcaggtccgaggggagctcgttaaagggattttccggcctggacacggcctcagtttccccagaaatgaagtggggctgtggagggccaccatcaccctgaccccacaggggtcaaaggccagaggtcacagggccgagatttggtagtgtacccccccacctgttacccaacatcctcttccctagagctttcacaaacaacggtccttgcccaaaccacagccggggcggggcctgcggggaggcgcgggaggggggtccccacttcctggtgggggtggggagggtcctcagcccttcaagcccccctcaggctcctacaacgcaggtgctttaagtgaacacacttctgactctgtctgtcccctaaaggtccatggaaccccagagcctatgggcagccccaggccttgtagacatcccggacccccaagctctgtagaccccccccccagctttgtagacaccccaggcctggggacactccccaacctctgaacctggtggatcccattagaggatctgctgcccggtcaaccttcagcccaatggccaggccacagccctcccatctcaacggcccctagagcccccagattgcctaagcccccaacctgcagcggcccaaacacaacatcgtcccaacccggcaccctcccttcctgctccctgggccccgcggccagccctggatggagtggagggaggcggccaccactcccagggtccctaccgtgagctgaatgccggggtcccggcctctctgctgtggcccctgccgtcccgcccggtaggggctgtagctggcacgagcccccagccgccgccccagcatgagccccgagcacagggcgggtccctgtccccctgcggcccggcgtcagctccgggtctcacccgggctccactcacccccgagggctgcgggctggggcttcccgcgcggttctttttcgagatggaaggggttttcatgagctctcgtttcttcctggagaacatgatggggccccggccgggagcccgagggggcgggctgggggtctcagcgctgcagctcccggcgctggccgcttcgggaccacattgtcgccggccaccccctccccagctgtcaggcccacgtgacaggcccggccgtcactggcgggccctccccccaacaggaaaaggcttcggggaggcggcgacgcggcctcgcccccgacccttcccggcctcagcctgcggctctgcggagtgggcgcgaaggtgaggtcgcaggccccgcccccagccccgggccgcgccccccgcttccgccttcgggagctcggagccgcgccgctcgcggggtgggaccgggagcccctgcctgacgctggcgggcacggggcggccgactgcagggcgctgactctcactcccggacgcgagtgggcgtgcacagacacgtgcacgatgacacgcagagacccggacctccacacgcgctcagacgccaccaagcccctggagcctcgccctcagaccccagacacacgcacaggccgaagctgcgcccctgcagcccccttttccctgaaggcaagcccgctccaccgcctctcctgcagaccctagggtgtggccgggccccagcagggccgggcagagtagggtcccccccatcacccgccctgcagccccgtgaagtgggtcaggtcgaggacaggtggggaaactgaggcccagaaccgaaaccctgggggcaaagacgtccaggaagtcagaacaatccaggttaccgggccctgtccgtctgggtccccacgtccgtctgggtccccacgtccacctggtcctgggctgcctgcacaggggtccccaaagtgtggtgtggaccccaccatcggcagaatatgctgaggacacctggttacctctcagcagccctgtgggccatatcatgttgccccagacctgcccttagctaaggtccccagccccgcctcccaagctgcattccagtgactctggaccaccggacgtgctgggcagcaggacgcaggcacccgttgctgataacagcctgaggcggcattggccaagagctggggcatctgcaggcatacagatcccagcctcctaccttcccccaacccccaccccgcagtgtgaactctctcccccctccccaagtctccctgctgtccccttccagaaccccacccccaatcccaaaaccccaacctctttcctttcccaaaccccattcccacctacctcgggtgggaggggcagatctctggggcacaggacatgaaggccacagccccttgctccaagtctggctctccaggcccaggtccaagtgcaaacccagcccagcagacccttgagaactctttgcccccgactcatggcgctgagggctggggtcagagggtgagggtcagctggatgtcggatgggcttctggcccggccctggcctgtgctccgggacaccgggctcctgtaagcttcccaggacattcctgagtcctgacctcatccccactttatggccaggcacttacaggtaccgcccttaggcgccagccccacataggcacgcagggacgtggggacagggacggtgtgaccaggcccttatgaggcccgcactcacatccccaactcctgggctggccacagaggcatttacagctgggatccggtcagctgtaggcacgctcacacctgtgtcctatgaatcgccacttggcccgtatgtgcacactcagcttgcaaggggccagccatatccagacgcatgtgcaggcagctgtgtggacatgtgtgcagcctggctcaaggacacacatgcacacggtttcaccaccacggcttctctccagccttctctttattttctccagggcaccagcccctctgccagcctgagtccagggctcctaggcactctaccttgcccttgccattcccagggcctccccgcggccccgcaggggagggaggctcagagcacagtctcggcagtgctagggtcatcgaggaactggctgacgcgtttggggtgctgcaggcctggcgcggggtccactcccactcctgcctccttctgctcttcggtgtcctcgtccttcccctggtccttggagaagtacaagaatacctagcggtgggcagcccagaggggacaagagggacggtcagcccacgggcctggcccccagcctgcctcccccagcccgaccccggcgccgtgatcacctcctc

SEQ ID NO: 1560462 - DNA, 4001 bp, Homo sapiens
atccgtcagcaccagtcacaatgacgaccttcccgcgccacttcgcaaggagacaaggaagccccgcccttttttggtctctctccagtggtggttacagatgcccattcttctgcgtctccactgattggtcaatggagagtggagcgcaccctctcaccagatggtaggactgttgatacgctctgattggatgaaatggggagccccgccccagggtaggcgctctttggtgcagtatacgaaacgagcgaaggcgagaacgcatgcgcaaatacgctttcaggcaccgcccagaggcggggcccccttatggagcgaccgctgtgtgtgcgccggaaggctagaccaagattgacaggaactcccagggtatctctgtcgccatcactataccgtgttcatttctacctctaggaggaattgttaaaatcccaaatctgagccttttcctcagtagaaaaccactcgctgctgccgactgtcttcggaccctgtccagttctaaattcagccgcaacccctttcagtttcccttgggagaaggctcttccgcgcactctccatgtgtgcccatgcagtcccttccacctgcaatagtccactacccctcctgcaggagctaagggccaagtcatcttgtccgtgcgatctaaattaacaggtccctgccatcccagacccccaggattcccttcaaagccataactcgggccagtggttttcacctgacagctcgacccctctgagcaccacaggaggtcctggccccgaccctggagagggtggccacctaccaagcgcccagtacagcacctggcacagtgcaagccccctgcacaggggaggcgttcttgtgatctgtgcctgcgtcgggcctttcttcctcaagggcggggtaagaccacccgcactgcaccaagagaatgtcggagggtatctccagactccggcgaagcccaactggcggagcctggggggtggagaggagcgcgccccagttatcacgcgcaggcagcggggtcaaacggggattaacccgggatcccgtcctacggcatttaacattatggggctgcccgcgcagggtgtgggggggaacaccttagcgaagctattggcaagtgacgatatcgccaaaggggggaaaagaaataaaagcgaagctagcgtcgtgagaaacgcggcggacgccccaaaagtgctccaggacctttctgcccggctgatgggggatttcgagttgaggtccgggtggaaactaagtttgaaatggaggccgtgtgtggtggctcacacctgtaatcccagcacttggggaggccaaggcggaaggctcgcttgagccccggatttcgaggttgcagtgagccgtgatcgcgcccctgcactccagcgtgggcgacggagcgagaccctatcagaaaaaatggggtttatggcaatacaagaggggacaggcctggtggctctgccggtgaggggaaataaagttaggggagggggccttgctggggacctcggtcagctcccccggacaccaggaagatccgaccacgccaacggaacagagacgggggcggggccgcgtctgaagcacgtggcccgcgtgacgggaggaggccgggccggtcgcgacgaagggcggggtcgctccgtcccaacgtcagaggaatgcggtggggggagggggagagagagggcccctcccctccccgcccccgcggccggcccggacgcccctcgcgccggcgcgcacggccggagcacggcggaacggtctccccggcgccgcacgttccaggccgccggcccggcctggtgacccgcaccccccgcgctcccggccaccgccccgcccccaccccgctgctcggaccctggcccccggccgcgcgcggcgccgcccgccagtgccccggtcaccttcccgcacccctcgcccccagcccctaccagctcggcggcgagcctgaccggccgtcccggatcgaaaagagcagacactgggaagttttgggagagggaggggcgggccttaaagggaccacgaccttttttcagccccgtggggggaagaaaaattgggggcagggggcgcgggagcggggacacggcaggagaccgagggtcgccccgcgggggaatggaggaaaccaggcgagaaaggagcgggaagaccttggagccgcggtgttcgggctccgcgtcccttttccccaaaaatccacccccgccccccgcagacggaaagtcacgcagttgtttgagactcgcgcatctttcctcctggtcaggcaagtgtcttggctgaggcaagtgtttggggtgtacattgctcacataaggaaatgggctggagggacgcaagtgactaacccaggatgccacagcttgcaagtggcatggcggggctggtctgacgccggagcagacgcatcaccactgcacttgcagggcttattagggtgatggggtaggctgtagagatggggggttcagagcaggggactggagccaccctaccggggttccaacgtggaagctgcatttactgtctctggccttaggaaagtaacttagccttcctcatccgttagggggatggcagtaggagcttcgtctgggtcgtcatgaggaatgcagagaatggaaacgggaccttagaggactacccccatttcacagttgaagtaaaactggcccagagagtggaagaaccgcgaaaaattaccacagctgggcagcctctgaaagagcaggtcgctcccgttcttaatccacacaaaacttaatcggacccttgcagatccttgtaaacccatgccagccgggcacggtggcttcccctgtaatcccagcactttgggaggccgaggtgggcagattgtttaagtccaggagctcgtgaccagcctgggcaacatggtgaaaccttctctctacataaaatacaaaaaaattagctgggcgtggtggcgtgcaactgtagtcccagctactggggaggctgaggcggaaggatcacttgagcccaagaggtggaggctgacaaagcgagaccctgtctcaaaaacaaacaacaccccagaaaaatatggctgggcgccgtggctcacgcctgtaatcgtagcactttgggaggccgaggcaggagaatcgcttgaggtcaggggttcgagaccagcctggctaacatggcgaaacccggtctctacttaaaatacaaaaattaggctggcgtggtggcaggcgcctgtaatcccagctactcagaatgctaaggcaggagaattgcttgaacccgggaggtgaagtttgcagtgagccgagattgtgccactgcactctaacctgggcaacagagtgagactctgtctcaaaaaactaaaataaataaaataggccgggcacggtggctcacacctgtaatactagcactttgggaggctgaggcggctggatcacgaggtcaggagatcaagaccatcctggctaacacggtgaaaccccgtctctgctaaaaataaaaaaaaaattaaaaaaaaaattagctgggcatggtggcaggcgcctgtagtcccagctactggggaggctgaggcaggagaatgacgtgaacccaggaggcggagcttgcagtgagccgagatcgctccactgtactccagcctgggcgacagagcgagactccgtctcaaaaataaataaataaaagtaaaaaataaataaataaataaaataaagaaaaaatagtaatgctgctgtgaccattcctagtgatatcttcttgtgtccatgtgtgagagttttaagggcatgtaggtaggagtgggattgctgggtcgtgtaacatattttgacattattgggtagtaacaaattgttattcaatatatctgtaccatatattcccaccagcagtatatgagaaggtctcattcttttttttttttcttttgagacaagagtttcaatttgtcccccaagctggagtgcag

SEQ ID NO: 1560463 - DNA, 4001 bp, Homo sapiens
aactggggcagccaggccagtcttgaccccttctagtcttgaatcgccctcccaccaaaatctgctttggaaattactgcctaggtcagactaagaaaaaccagacaagaaaagtcttttatttattttttgagatggagtctcactctgtcacccaggctggagtgctatggcgtgatcttagtccactgcaacctccgcctcccaggttcaagcgattctcctgcctcagcctcccgagtagctggaattacaggccctcgccaccacacctggctaatttttttgtatttttagtagagacggagttttgccatgttgaccaggctgttctcgaactcctgacctcaggtaatctgcctgcctcagcctcccaaagtgctgggattataggcatgagcccccactcccggatggaaagtcttttagaaagaccagagactccaacccataccattaagaaccgactgctccttcctaagagaagtatcttacacccaccgacaaaagcctctggtcatcaggagaaagattaactctcttccgcctctcctgggctctggggccggccccctgtctgagaatcactgggcagaagtgcgtggaaggtgggtagaattggattctatttcaggagcgatccacgcgaaccacagggtgaggcactcccgccaggttagcagctcccacaaatgggagttctaactccagccctgcccctcactagctgtgccacctacagtaattcacctcatctcatctctctcctggcccatttcctcctttgtaaatcgggaatcccagtatctcccccaacctcaggaagcgttaaggattttcaattaagatgtctttaaaatgtgtgggacaaggccaagattaaaacgctagcaactcgtaacccctaaaccctggaaaaccctgcaaataggcggccctgtaagacttcaagattttggaaagagtggggactgggccccactccaaaagcaacgactggtgttttcggagggactgattacagggggtcgaaatgcttccaacatggccaggaaatagtttggtttatcaaatcctcggtacccagtgaatccccggaaactgtaagcaaacttgtgatggtttcaaggcttcgctcaactcctaaaaggctaaaagtgcatttcacaagtcctcttcccattttcaatgcctacaaaaatgagagcatctaggctcaaacacatccatttctgtatagacacaaggctgggccttagagattaagctgccatcagacggaattccccactctagagaacaaggccgccgcccacccgttcccgctcaccaggcgctcccctaaccgcccacgaggccgggcgggaacactgcgcctgcgcatggagccagcgaagaaaatgataaaggggaaaaaaaccggccgggccgcgtgcccggcccccacacgccagcccgcggcgcctgcgcactgggccattcgcctcacgagctacttcctctgcgctcccccacaccccgctccggaccccgcgcacgcgcaggcgcctgtcctcgcgcaaaccccgccgtttgcccaacggccgcccctcccccacaccgtcaacgacgcgatggcctgggcgcgtgcgcagaggcccccctcaaaaaataaaatgccctcaagctgggaaattgtcccccagttcccggccttcccagcgcctagggccctggcctcaccccaccgccgccgccgcccgccgccccggctcctccaccgccaccgccgccgcctccgtgctggtcgccggcgttgtcagtcttgagccgcttaggggcccggccgccctcactgccgccgccgtagtagcggccaccgccgcctccgccgcccgccgccgccatcttcaccatcgctcccgaccgcctccgctgctcgtccggctgctgcctctgctccagccgccgacgccgcttctccgcccggggcagcagcctccgcgacatggcggcgcagaacccgcctccccccgcctctcattgggggagggacacgcccgtcacccgccgcccccacccgatagggggagccactggtcccgccgcggggggagggtaggccgccacacgccttgcgcgcttattggacattgcccacgccgttctgcaggagggcccgcccttgtttgtctgagacactccttataggtggtcgctttctgccagtctttccgtcgaccccgccgccttaaaataaaatccaatttgataggtcggatttctggcgctgctggcctccctaaaagcacctgataggaacggcgctctaaacctcccaagaatctccgcctccctcccactttcattggtctcctcgctaatccgtcagcaccagtcacaatgacgaccttcccgcgccacttcgcaaggagacaaggaagccccgcccttttttggtctctctccagtggtggttacagatgcccattcttctgcgtctccactgattggtcaatggagagtggagcgcaccctctcaccagatggtaggactgttgatacgctctgattggatgaaatggggagccccgccccagggtaggcgctctttggtgcagtatacgaaacgagcgaaggcgagaacgcatgcgcaaatacgctttcaggcaccgcccagaggcggggcccccttatggagcgaccgctgtgtgtgcgccggaaggctagaccaagattgacaggaactcccagggtatctctgtcgccatcactataccgtgttcatttctacctctaggaggaattgttaaaatcccaaatctgagccttttcctcagtagaaaaccactcgctgctgccgactgtcttcggaccctgtccagttctaaattcagccgcaacccctttcagtttcccttgggagaaggctcttccgcgcactctccatgtgtgcccatgcagtcccttccacctgcaatagtccactacccctcctgcaggagctaagggccaagtcatcttgtccgtgcgatctaaattaacaggtccctgccatcccagacccccaggattcccttcaaagccataactcgggccagtggttttcacctgacagctcgacccctctgagcaccacaggaggtcctggccccgaccctggagagggtggccacctaccaagcgcccagtacagcacctggcacagtgcaagccccctgcacaggggaggcgttcttgtgatctgtgcctgcgtcgggcctttcttcctcaagggcggggtaagaccacccgcactgcaccaagagaatgtcggagggtatctccagactccggcgaagcccaactggcggagcctggggggtggagaggagcgcgccccagttatcacgcgcaggcagcggggtcaaacggggattaacccgggatcccgtcctacggcatttaacattatggggctgcccgcgcagggtgtgggggggaacaccttagcgaagctattggcaagtgacgatatcgccaaaggggggaaaagaaataaaagcgaagctagcgtcgtgagaaacgcggcggacgccccaaaagtgctccaggacctttctgcccggctgatgggggatttcgagttgaggtccgggtggaaactaagtttgaaatggaggccgtgtgtggtggctcacacctgtaatcccagcacttggggaggccaaggcggaaggctcgcttgagccccggatttcgaggttgcagtgagccgtgatcgcgcccctgcactccagcgtgggcgacggagcgagaccctatcagaaaaaatggggtttatggcaatacaagaggggacaggcctggtggctctgccggtgaggggaaataaagttaggggagggggccttgctggggacctcggtcagctcccccggacaccaggaagatccgaccacgccaacggaacagagacgggggcggggccgcgtctgaagcacgtggcccgcgtgacgggaggaggccgggccggtcgcgac

SEQ ID NO: 1560464 - DNA, 4001 bp, Homo sapiens
gccagtaaccatggtattttatttctccctacttaaggagggaaagaatctggaattttctccggatttattatctaccaatatagctagcacttagggaacgttcttaacctaagcgctcaactaggcagggcgcagtagctcatgcctgtaacttcagcactttggaaggcctaggcaggaggatggcttgaacccaggagtttcagaccagcctgggcaacacccggagacctcctctcttcaaaaaattagccgggcatggtggtgccgcgcctgtgatcccagctactcaggaggctgagatggaaggatcgattgagcccaggagttcgaggctgcagtgatctgtgatcgtgccactgcatcccagcttgggtaacagagggagaccctgtctcaaagaaaaaaattaaatatataagtgctcaaccgcattcacttttaatctccataaactaagcttcacacattacaatatgaggaaggcaaagtcacagacagaaaggaaagaaaacggagggagttagtatttaatagctacactttctgtttccgatgatgaaaaagttctggacatgaagcagtgacggttacagcacactgagtcagtatactcaatgccactgaattatacgcttaaaaaatggttaaaatggcaaagtctacgttatgtctattttaccacaatgaaataaatgtctgggaaattcaatgtgtacccaggcttccccttccttcccggccgctgatcttggagccaaaacctctctgtctctcttaagtgtctgtaatcagaatgaatgagtttcaccggggcacaagtcgatgcttcctcctttaaagaaacttttaaaagccaaggagtcaaagagccccaagcaggactcgaaaagctgatgaagtctggaagtaaatgaacccgcctcctgacagaacagcttccccgaaacacgggaaaaaggggattcctcccccgacttcgtatctgtctgcttccgagggtgaacgctaagcagcagatcccatctctccactaatacctgcggcgcacccggggaggaggagcgggaaacggcgagggacttgagccagggccagagcgtggggcgaggggcggttccgagggaggcacttcccgcggagcgcggtcggcgcgcggggactaaggggcggggcaggaggggagccccccgacccggcttcgcggcccttcctgacgcttccctcgctcggttaccgttgactcgggctgactgcgcgcgaggcctcccgggcgcgcaccctctctcctccccccacgttacggatcagaaaacagaccccgggaggagaggggacggggggctgaaacccggcccccgaggtcaccctcccggggagcggtcgggtaggcctcggaggctctccggtccgggcccgcgccatcaacccccatgcgcagcagctgggcctgaggcctcgactacggggttggccccggcctggagggactgagggtggcgaggctcgaggcccggtgtaggggacgattctggaggctcccccggctccccgctcacggccctagacgccgctaccctgagcaggcggtacgggaacagccggggccgaggccgcgccggggctaggccgccaacagacctaacggagccgccgcccgcgtcggccgcggagaggaacccttacccgtggcaaaggaccgtgggatactcaccccttagggcccggagccccgttgccgctcggcacgccgggcgcgccgctctcttcctccattttgatctccgtcgccgccacctccgccgccgcttcgacccctgccgccattttctccgcgtctgggctttgtgtgagcgaacgggctgcaccgcgctgcgcctgcgcgcccacgtgacccgacgcaaccagtaacacctgcgcccgccgctcccggctgcctccttggccccactcgccccgggccacgcccccgccgcgcgcaggcgcagaccggcagctgttgatcgcttctctctcgagatacactcgcgttaggcaccgactggctgttcccggcgcgcgtcctctgagtccgatagaggaggcatctccccaccccaccccacacaaacacctagacctagtcactctcagctttctgtaaccagagctggagcagaggggaagcaatgatcctgtctagagattcctggaagttttagatgaagcttgttcaacccgcggtccggcacacgattcgtaaactttcttaaaacattgtgtctttttgtgtgatttttttctttttgtaacgcaattgcgcggttctccagcgcgaactttgtaggcaacaacggaacggcatggaataatatcagagtattatccgtaattcgcattataattgcaaacagttcgtccagaagaaacggaaaactgttaaaattcactaataatggggccaggcgcgatggctcactcctgtaatcccagcactttgggtatgggaggccgaggcggcggatcacctgaggtcaggagttcgagaccagactggccaacatggtgaaaccgcgtctctactaaaaataaaaaaattagctggacgtggtggcgggcgcctgtaatcccagctactcgggaggctgaagcaggagaatcgcttgaacccaggagccggaggttgcagtgagccgagatcacgccactgcaccgcagcctgggagatagactgagactccatctcaaaaaacaaaaagataagtattgagtactgggcttaatacctgggtgatgaaataatctgtacaacaaacctccatgacaagtgtttacctatttaacaaaccttcacatttacccccaaacctaaaagttaaaaacaaaattaaaaaaaaaattaatggctgggcgcggcagctcacgcctgtaatcctaccactttgagaggccaaggcgggtggatcacgaggtcaagagatcagaccatcctggccaacatgatgaaaccctgtctctactaaaaatacaaaaattagccgggtgtggtggcaggcgcccataatcccagctactggggagcctgaggcaggagaatcgcttcaacccaggaggaggaggttgcagtgagccaagatcgggccactgcactccagcctggtcacagagtgagaccccatctcaaaaaaattaaaaataataataaagagcgagaggactcttgcaatgttgcataaagtgaactgtgacagaattcagggtgtattctgtactaggcataatgctgtatggtcttatttttgtgtgcattcgtggcatcagttttatggtgctgtgcagcctccaatgtgccattttccaagtgcagacagtcgaattggcaccatcagatgttacgtgtgcttgtggcaacttgggcagtaagatgcagcgattatctttttgagacggagtttcgctcttgttgcccagactggagtgcaatggcgccatctcggctcgctgcaacctccgcctcctgggttcaagcgattctcctgtctcagcctcccgagtagctgggattacaggtgcatgccaccacgcccggctaacttttgtatttttagtagagacaaggtttcatcatattggtcaggctggtctcgaactcctgacctcgtgatccgcctgcctcaggctcccaaagtgctgcgattgtaggcgtaaaccactgcgcctggccttcaatgcagcgattatcaataatatatttttttctttttttggagacagtcttgctctgtcacagaggctggagtgcagtggcaccatctcagctcactgcaacctccgcctcctgatttcaagcgattcttctgcatcagctttccaagtatctgggattacaggtgcacaccacgacgcctggctaagttttgtattttttagtagagatggggttttgccatgctggccaaactagtctcaaactcctgacctcaggtgatctgcccacctcagcctcccaaagtgctggg

SEQ ID NO: 1560465 - DNA, 4001 bp, Homo sapiens
gacgctgaaaaagtcaaaattaacacattccttcccagagttttcaatagtaaaatgctgggaatagaggaagtttttctcatttctaagggccagtaaccatggtattttatttctccctacttaaggagggaaagaatctggaattttctccggatttattatctaccaatatagctagcacttagggaacgttcttaacctaagcgctcaactaggcagggcgcagtagctcatgcctgtaacttcagcactttggaaggcctaggcaggaggatggcttgaacccaggagtttcagaccagcctgggcaacacccggagacctcctctcttcaaaaaattagccgggcatggtggtgccgcgcctgtgatcccagctactcaggaggctgagatggaaggatcgattgagcccaggagttcgaggctgcagtgatctgtgatcgtgccactgcatcccagcttgggtaacagagggagaccctgtctcaaagaaaaaaattaaatatataagtgctcaaccgcattcacttttaatctccataaactaagcttcacacattacaatatgaggaaggcaaagtcacagacagaaaggaaagaaaacggagggagttagtatttaatagctacactttctgtttccgatgatgaaaaagttctggacatgaagcagtgacggttacagcacactgagtcagtatactcaatgccactgaattatacgcttaaaaaatggttaaaatggcaaagtctacgttatgtctattttaccacaatgaaataaatgtctgggaaattcaatgtgtacccaggcttccccttccttcccggccgctgatcttggagccaaaacctctctgtctctcttaagtgtctgtaatcagaatgaatgagtttcaccggggcacaagtcgatgcttcctcctttaaagaaacttttaaaagccaaggagtcaaagagccccaagcaggactcgaaaagctgatgaagtctggaagtaaatgaacccgcctcctgacagaacagcttccccgaaacacgggaaaaaggggattcctcccccgacttcgtatctgtctgcttccgagggtgaacgctaagcagcagatcccatctctccactaatacctgcggcgcacccggggaggaggagcgggaaacggcgagggacttgagccagggccagagcgtggggcgaggggcggttccgagggaggcacttcccgcggagcgcggtcggcgcgcggggactaaggggcggggcaggaggggagccccccgacccggcttcgcggcccttcctgacgcttccctcgctcggttaccgttgactcgggctgactgcgcgcgaggcctcccgggcgcgcaccctctctcctccccccacgttacggatcagaaaacagaccccgggaggagaggggacggggggctgaaacccggcccccgaggtcaccctcccggggagcggtcgggtaggcctcggaggctctccggtccgggcccgcgccatcaacccccatgcgcagcagctgggcctgaggcctcgactacggggttggccccggcctggagggactgagggtggcgaggctcgaggcccggtgtaggggacgattctggaggctcccccggctccccgctcacggccctagacgccgctaccctgagcaggcggtacgggaacagccggggccgaggccgcgccggggctaggccgccaacagacctaacggagccgccgcccgcgtcggccgcggagaggaacccttacccgtggcaaaggaccgtgggatactcaccccttagggcccggagccccgttgccgctcggcacgccgggcgcgccgctctcttcctccattttgatctccgtcgccgccacctccgccgccgcttcgacccctgccgccattttctccgcgtctgggctttgtgtgagcgaacgggctgcaccgcgctgcgcctgcgcgcccacgtgacccgacgcaaccagtaacacctgcgcccgccgctcccggctgcctccttggccccactcgccccgggccacgcccccgccgcgcgcaggcgcagaccggcagctgttgatcgcttctctctcgagatacactcgcgttaggcaccgactggctgttcccggcgcgcgtcctctgagtccgatagaggaggcatctccccaccccaccccacacaaacacctagacctagtcactctcagctttctgtaaccagagctggagcagaggggaagcaatgatcctgtctagagattcctggaagttttagatgaagcttgttcaacccgcggtccggcacacgattcgtaaactttcttaaaacattgtgtctttttgtgtgatttttttctttttgtaacgcaattgcgcggttctccagcgcgaactttgtaggcaacaacggaacggcatggaataatatcagagtattatccgtaattcgcattataattgcaaacagttcgtccagaagaaacggaaaactgttaaaattcactaataatggggccaggcgcgatggctcactcctgtaatcccagcactttgggtatgggaggccgaggcggcggatcacctgaggtcaggagttcgagaccagactggccaacatggtgaaaccgcgtctctactaaaaataaaaaaattagctggacgtggtggcgggcgcctgtaatcccagctactcgggaggctgaagcaggagaatcgcttgaacccaggagccggaggttgcagtgagccgagatcacgccactgcaccgcagcctgggagatagactgagactccatctcaaaaaacaaaaagataagtattgagtactgggcttaatacctgggtgatgaaataatctgtacaacaaacctccatgacaagtgtttacctatttaacaaaccttcacatttacccccaaacctaaaagttaaaaacaaaattaaaaaaaaaattaatggctgggcgcggcagctcacgcctgtaatcctaccactttgagaggccaaggcgggtggatcacgaggtcaagagatcagaccatcctggccaacatgatgaaaccctgtctctactaaaaatacaaaaattagccgggtgtggtggcaggcgcccataatcccagctactggggagcctgaggcaggagaatcgcttcaacccaggaggaggaggttgcagtgagccaagatcgggccactgcactccagcctggtcacagagtgagaccccatctcaaaaaaattaaaaataataataaagagcgagaggactcttgcaatgttgcataaagtgaactgtgacagaattcagggtgtattctgtactaggcataatgctgtatggtcttatttttgtgtgcattcgtggcatcagttttatggtgctgtgcagcctccaatgtgccattttccaagtgcagacagtcgaattggcaccatcagatgttacgtgtgcttgtggcaacttgggcagtaagatgcagcgattatctttttgagacggagtttcgctcttgttgcccagactggagtgcaatggcgccatctcggctcgctgcaacctccgcctcctgggttcaagcgattctcctgtctcagcctcccgagtagctgggattacaggtgcatgccaccacgcccggctaacttttgtatttttagtagagacaaggtttcatcatattggtcaggctggtctcgaactcctgacctcgtgatccgcctgcctcaggctcccaaagtgctgcgattgtaggcgtaaaccactgcgcctggccttcaatgcagcgattatcaataatatatttttttctttttttggagacagtcttgctctgtcacagaggctggagtgcagtggcaccatctcagctcactgcaacctccgcctcctgatttcaagcgattcttctgcatcagctttccaagtatctgggattacaggtgcacaccacgacgcctggctaagttttgtatttttt

SEQ ID NO: 1560466 - DNA, 4001 bp, Homo sapiens
tagctgggactacaggcgcacaccaccagatccggttaatatttgtatttttagtagagacagggtttcactatgctggccagactggtcttgaactcctgacctcgtgatccgcccgcctcggcctcccaaagtgctggaataacaggcgtgagccactgcactcggcccgaaagctgctttttttctaactgaagattcacgccgtcccatatcaggttttcctctcctcagacaaccgcaggtctacccgaacccattcccagagtcacagctcctggctgatgaagagttccgtgctgctccccgagggcccccactccctgggtacacaaataactgcttctgggaaccgtcgagatttctcctggagacgctcaggtccagaaacattccccacactccactctgaggcctccagtgaagtcaacaggtttctttctctttgctccctacggcctcccccctccccatattcgctaagccagatacgtactcctgtgctggacacaggatcctctgtctcccgccacatatttcatccacttggaatgttaccaactcatctgcccccatcccacccccagctaccctctgttctccaaaaaccccacagttagctccagaccagtcagcagcagcctcaagagttatttgccctcagttttcttagctctagacccccagatcctttgtccaggaaagcatcctctcccccgccagcctctggacaccagggctccctatacctcttctagaagccaaccagaaagtccccagatctcccagcacctaatgtccaggctgtgcctgcttcaagggtggccttccagccccggaagagagatgggggtgccccctagttcaatctcccgcagcccctaaatgctcactagccaaactccaaagcactgagtccattaggaccctccccagccacagacaccagcgcctccacctctcccacccacccccgtacccaaataggagaacgcccaggatcgcatccagcggcatattccaggatcctccttcctcagaactctcgcagccccgcacacctggacattccttccccaccctggaaacacggctccccaccccccagcccacacgctgggctagcacgaccgccaagcccacggagctccgtaccctaggatccccattttcgagaccctccccaacccaaacggaaaacctcttgttcttccgactctcttcggctccagaaagcagtttccggtctccgatccctacggtacggaatcctccccgccacccccgtccctcacctccgaaacccagaggcccctcccccagtgtcccccctgcactgagtgtcaggatccaccctccggtcgtgctggggccctggtccccagatccttttcggcggcgggtagcgggatcccccgatcctcaggtcgtctccccgacctcaggcgctggactcccgcgtcccacagccctttcctcggcccaggctccgggctccccggcccccgccccgcgcactctcacaatgtccgtccggccccgagtagccgccgggctccgcgtgcggctgcagcccgggcggcggtggctgcgcggtcccctccagctcggagcccccctcggtctcgacctcctcgttgatgtgcccgggtcgccccggttcgtcgtcggcgtcgagctcccgctcgtcgtcaggctcctcggcctccaacgccgcctgcagccgctcagcaagctcggccttgaggcctcgagtgtccaggccgcggcgctgcagctcctcgcgaagttcgttcaccttcagacggcgcacatccatggcccgggcccccggggtggcccccgagcccggcccggcctcccagggctctgtcccccttaaacctttcctgtcaggaggcgaagggggaaagggggggggcccactccaatggcggcagcggctcaaaatggccgccgccaccgcctcccccctcactcgtgcctcgtccgatgttacatgagtgccaattggtcagtgcgtggggcaacgggcgcgggcccggaaacctagccaatcagagcgccgttttcaaaacaacggccacgagaaggcctaggagctactggggaggaagcgttggcctacgtcgaagccgaggccggagcggagggcgggaaaaggcaggaggcggagcgcttgctgattgggtaactctcgcgcgccggctgccgtaaggtccaatgaaaataagggagtaacaatttggtccaatcaacggtaagatctcagaatgagtgtcccacggcctttcctgcgcagtcctttcatcaaactaagtgtctctgtaacacacattccgattggtgtacatctcccgccccttgaggagtccgagcgggtaaaaccactagaaccaatcaaatggagggtcggcagaaacccctccttcctgttgcctttaagaaaccggaaagagatgaattcaccaggagcccgccccttgccgttagggcggtttcaaaacaatctgcccaccaatcgcagttattgtcttagctcactaaagctggtagcgatggctcattttaggaaaagttcaccagattggccgtgcttcagaggactgcctcacaaatttcgctgtaggaggaggtatacgaaatagagattaagtggatacacagttcgtaatctggaaggaacccagttgcctttaggaaaagcaaaattttgagttgagagagtcccgaaggtttggctatagaaactagactaacaacgggaggcaagttgtaaaggacacggcctccccttcccttgggtagtccgcggccgccttgctctatggtcgggtacctgacgtggaacgggcgctctgcacgcgaccatagagccttcccctcccgaaagacatccagaagttcaccgaccgctctcccgaatcctctaatcggctgttcccgtaaatcgggctgtctggcgtctgtaccgacaagctcaaccccacggatccgtcattaaccttcgcgctcaggaatacaaaagccacagagcttcccagtgtctaacgctgcaccacctgtcgcctctaactcaaaacaaaactcgagtaagacgcaatcgggatacatgatgcagactcccactgcctcctgagccacacgttaagcccgcaaaagccacacactatctctactcagacaaaggcacaccccgcagtcgtaaacaaacaggcgtgcgtcagatcagacgcatccagttcttttttttgttgttcttttttttttttttttttttttgagacggagtctcgctcttgttaccctggctggagtgcagggcctctatctcagctcaccgcaacctccgcctcccgtgttcaagcgattctcctgcctcagccttccgagtagctgggattacaggtccccgccaccatgcccgactaatttttgtatttttagtagagacggggtttcaccatgttggccaggctggtctcgaactcctgacctcaagtgatccgcccgcctcggcctcccaaagtgctgggattacaggcgtgagccaccgcgcccggccccaattccgatctgctttgggtaaggcaccccgctgcagtgtagatgtgcccactacggtccgcagaggcaggcggcatcgaataataaagataacacaggatagttgcactacaagcgaacactacagcaacccaaacacacagcacccactcagcagcgggacagacactcacgtgggcccagaggttccagtccagacaccccgcccctcgcccacgtccgacttcctctctctctctctcctcccagcttcccacaatgatttgttctaaaaaagtttgtggcccggattgaactgtccccggttctcaggagccgccactggagggcgtccgggcgctgccaagggtttctccatttgctgccggccacacccgcgaacgcccgctcgcgagtgcgtgccagacacggtgggctggtcttcgctggaggcc

SEQ ID NO: 1560467 - DNA, 4001 bp, Homo sapiens
gcccggcccggcctcccagggctctgtcccccttaaacctttcctgtcaggaggcgaagggggaaagggggggggcccactccaatggcggcagcggctcaaaatggccgccgccaccgcctcccccctcactcgtgcctcgtccgatgttacatgagtgccaattggtcagtgcgtggggcaacgggcgcgggcccggaaacctagccaatcagagcgccgttttcaaaacaacggccacgagaaggcctaggagctactggggaggaagcgttggcctacgtcgaagccgaggccggagcggagggcgggaaaaggcaggaggcggagcgcttgctgattgggtaactctcgcgcgccggctgccgtaaggtccaatgaaaataagggagtaacaatttggtccaatcaacggtaagatctcagaatgagtgtcccacggcctttcctgcgcagtcctttcatcaaactaagtgtctctgtaacacacattccgattggtgtacatctcccgccccttgaggagtccgagcgggtaaaaccactagaaccaatcaaatggagggtcggcagaaacccctccttcctgttgcctttaagaaaccggaaagagatgaattcaccaggagcccgccccttgccgttagggcggtttcaaaacaatctgcccaccaatcgcagttattgtcttagctcactaaagctggtagcgatggctcattttaggaaaagttcaccagattggccgtgcttcagaggactgcctcacaaatttcgctgtaggaggaggtatacgaaatagagattaagtggatacacagttcgtaatctggaaggaacccagttgcctttaggaaaagcaaaattttgagttgagagagtcccgaaggtttggctatagaaactagactaacaacgggaggcaagttgtaaaggacacggcctccccttcccttgggtagtccgcggccgccttgctctatggtcgggtacctgacgtggaacgggcgctctgcacgcgaccatagagccttcccctcccgaaagacatccagaagttcaccgaccgctctcccgaatcctctaatcggctgttcccgtaaatcgggctgtctggcgtctgtaccgacaagctcaaccccacggatccgtcattaaccttcgcgctcaggaatacaaaagccacagagcttcccagtgtctaacgctgcaccacctgtcgcctctaactcaaaacaaaactcgagtaagacgcaatcgggatacatgatgcagactcccactgcctcctgagccacacgttaagcccgcaaaagccacacactatctctactcagacaaaggcacaccccgcagtcgtaaacaaacaggcgtgcgtcagatcagacgcatccagttcttttttttgttgttcttttttttttttttttttttttgagacggagtctcgctcttgttaccctggctggagtgcagggcctctatctcagctcaccgcaacctccgcctcccgtgttcaagcgattctcctgcctcagccttccgagtagctgggattacaggtccccgccaccatgcccgactaatttttgtatttttagtagagacggggtttcaccatgttggccaggctggtctcgaactcctgacctcaagtgatccgcccgcctcggcctcccaaagtgctgggattacaggcgtgagccaccgcgcccggccccaattccgatctgctttgggtaaggcaccccgctgcagtgtagatgtgcccactacggtccgcagaggcaggcggcatcgaataataaagataacacaggatagttgcactacaagcgaacactacagcaacccaaacacacagcacccactcagcagcgggacagacactcacgtgggcccagaggttccagtccagacaccccgcccctcgcccacgtccgacttcctctctctctctctcctcccagcttcccacaatgatttgttctaaaaaagtttgtggcccggattgaactgtccccggttctcaggagccgccactggagggcgtccgggcgctgccaagggtttctccatttgctgccggccacacccgcgaacgcccgctcgcgagtgcgtgccagacacggtgggctggtcttcgctggaggccctttgtgggtccgtgatgatcggaggtgttctgtgcctgtgtttctatgtcagtctgaacgttcggggttgtgagtacctgttgtactctacatgtctcttgagtatttgtgtcacttgactctaggtctgtgtctcttcctattcgtggcgggtatctgcctgagcatgtttgtaaatatgcttgtgtctgtgtaattctgtgtgtctgtgttactctatgcgtctgagtttcagtctctgtatttgtgaccaggtcctcctgggtgtgtccattaattcatgtgtctgttagtttgcggcggaacaggtgtgtgtgtgtgtgtgtgtgtctgtgatcctggatctgtatgccagttcctcactgggggtttctgagaacctgcatctctttgcttgtatgtctttttgtctatctgtgtgttcatttctaccctctctagtgaggacagaattccaagaccctaccaagcccttcttttttctgatgggggaactgaattgccagggaatggggccacatcacagctaaaaggagacaagaggagacagaagctcgttgatatacaaagttttatgtgacctgagcccctctggaggcaccagagtccacactctgtactcagaaggtgagggattggctcacgggggcaacatggcccgaaaggtgggagatcgtccatcccctgcgggaaaggaggcatccctaatgcattgcacaggcttgaagggggcacacccccacagttggggaggaggaagcaatgatagctaagaaggagaggggcaccccaaagaatactacagtatagggttagaaccttgaaattgcacctaatagtctagacctgtggacctttagaatcttagaaacttagaacatttgagtcttagaactacagtgcctagaactataagattttagaaatgtggattcttggactcttaaccatggtcctagagaggcagaatgcagcaaagaacctaaaggtgtccaacattagaaattattagaactttggtgtctagttagtcacaactgagtgtgagagtcttataacttagatgcttaggatccggaatcttggaccaatggaatctagagtgccttgaaacagaacagaccgttagaatcttatttaatcatctagaatcttggagcatctgatctagaatcttagacacagagaatctaagatcttagagtaagtcttagaatatcacatcttagaacaccggaccttagaaactccatctttagactcttggaacttttgaattgcagattctagagctttcgacccttaggatctaggatcttatacaagagaatctattatcataaagcctcagaaactataattgatcatcattagaatcttagaacttgagaagataacattttgaagccttatgatctagagccttacagccagagaatctagactctcagagccttagaacatcacattttagaatcctaggccttagaacctccatgtctagaactatagaatctttagaatctataatcttacattttaaggactctgaactctagaagaataaacatctagactcatagagccttagctcctaaaatcagaatcttagaactttagaacctaaaaccttgaggctttatcaaaaatgttagaaccagaaaatctaaaaccacataatgtcagagctttagaacagtaggtcttaaggttgagtgcagtggctcatgcctgtaatctcagcactttgggaggctgaggtgggcagatcacttgaggtcaggagttttagaccagcctggccaacatggtgaaaccctgtctctactaaaaatataaaaatta

SEQ ID NO: 1560468 - DNA, 4001 bp, Homo sapiens
ctgtgtcagatgctgttcagaggcaaagcccaggccgtagactgtgttggcgcgactgtcggcccactgcccgaacttctgggaagttttggtgaaggtcatgttgggagtgacagtgctgttgatgatggcctagggtcggggaacaaagttcaaggtagatgggacagatactaacaaacatgaaaccccccaggtattaccttgtattagggtcttgaaggtctttactctgaaccctttcaggagatagagactagggcctgggaaggcttagggtttcctgtcccttgggcacacagcaagccagccaccagacccaaggttgtcaccaggactcctggtgcctctgccccacccagaccccaccctgaccttggcgcctccgatgctgatgatgcggtacacattgcgggtggcatcgtagaaataggagacagtgagtgcgtgcttgcccgctgggatccagtttcgcttggtggctgggtcaatttggaacacgtgcgcccgtgtgctgaagattggctgctccctgcgtggggagagggtgtttggtgggggccaggcacccccacttagaaagctcagggccaggctgggggaggtgggagctcacctggctgtggacattggtcaggctgggatgggcaggctctagggggcagccagagaggtggcaggagcactggtttggcccctagggagagaggagggactatgagtgtccctcaggccaggctgagggaggccaagcaggttccatctcaggacccatcaccaggtgtgcccgtcatggaactttcaatcaaaaaggcaggagaggcccaaagtacacctggtgctttgggaggctgagtcaggaggatcctttgagcccaggagttcgagaccatcctgagcaacatggcgagaccccatctctaccaaaaatttaaacaattagctgggtgtggtggcatgtgcctgccgtcccagctactggggaggctgaggtgggaggatcacttgagcccaggaggtcaaggctgcagtgcagtgagctatggtcaggccactgcactccagcctggacaagagagtgagaccctgtctcaaaaaagaaagaaattataaaaagaaacaaaaaggtaagataattattatagataactcagagcaagcagaccccatctttctttgtctaggggaagcccccacaacaccctgtacaggagatggccctctgagaggagcctggtggccgctgacatccagatgtaaatttctcattgtcctggttattgcacccccgtgaagtcccctccatcccaggctgagctgtggaggccaaatctctgctgagttctttccaccacattcacccatgactggccagagcggggctctccaccaaaaaatggggcgttgagaggtgtgtagtaccaggagaccagttccccactacaccctgcagagggaccccacccccagcagctcccaccctagggcagaagcacaccttgaagtccagagtccaaatccccagggagcccccagccaagttaaaaagacaagatgtagacaaacagccaatcccaatgcccaccatgagggcagagcagaatccacactgggagaccagggctccccaacctccccattgggccattcagcaaccccgaatctgcaggggaccaaggaggagtttggaggagggggaagacaggtgggggaggggaggccctggcccagcggcctctgtggtcaaaggggggatgccccccctatcctgtcctgggcagctgctgtcctggtcacagggtctgaaaccggagcccctgagtgggggtggggcggcagctctggcctggactgggggcgggtcctgcgccgggtgggagttggggaacacaggggtccccggaacccaggcccttccggtccggcagctcctgctgcgacttgcagcgtttggggaaagttactcaccaactagtcatgcgcctcggatgccgccggccacggggctcccggaggggggtccgacaccgcccggtgcccgggatccccaatctggccggtggatgaggccccatcccatgcacccgagtgcgggggacgggggggttaatattaattcaggatcccatccccacccgaggcaggacacccagtgcacgccccaactccgggacgcgggctctgaccctggaacttccgagattcccgcgacgccccctgtctctgggtccagaacttcgggggacacctcttctgcctcctccaaccccaggtcggtaactccggggactcccttcgtgactcctcctctaactgggtccgggaccccggtcctccgcgttgtcctagactcctaaacttcgaggaccccctgccacccctccagtccctgggtccgggacgtccggacccctcccaccccagtaccccaccccaggtccgcagctttggggacctcttcgcagcctcctccaacgccgggtccagaactttgggaacctcccacgcagtcccctctcagaccctgaatccagaacttcgggacccccgcgctccctccagccctggaacttggggacccctcgcgccgctcccagtcccgggtccgaaacttctggggaacccccacgccctccccttggccctgggacttcgaggcccccgcgctcccagcgcaggctcggcaggccgggctcaccctgccaggtcggcgccccgcgagtgtccaggcgcgagtcgggtgcggcccccgcggcgctgactccgcgctgccgggcgccccgctcgctccctggctcccgggcccgcgccctccgcgccgccctccacgccgcccgtgcctttgtctgcgccgccgccgcccgcgccgcctccggtcccatcgcggccggtcccgacgcggccgccgcccgccccgcctccccgggccgccaaggccgccccgctgcgccccctgccggctttttgcactgggagagggtatgggggaggggataagggggaggggcgggggccgggactggggaagggacggaggattgagggagggggttaggggcggtggagggggagtgggggggggggttgcgtggggtcgggttgggagcagagggtggggacagagagacagacggagagggacatctgggatgagaaagagacccagaaacagagacacgggggagacaggcggagagataggaagcagatggagagagttgcacggacagcgatgtgacctcaccctcctgtcaccttctcaggagacagctgcctctgtccccactacctgaggtcataactttgggcctgtgagggaggtcaggtccctcccgggctgacatgggtggcccagtgaggttggggagggggcagtgggtctcagggtctgcatacagtaagtgctcaatgggtgttgccaggaaacggaagagatcaacttcgggagggaacgggaagcaagacaaagagagagaagcctctgttcccctgcccgtcccatccctaagcagggacgtctgtccacctctgtccctcccaagacgatggtaaaaatgcccacaatggttggattaaggttatctttgctgttgtttgagggttccaaaatccaaaggctgaggaaatgtctccaacgcatggttgcatcccctcagcctccactggcctgcgtttgtcacctctggtcacagggagcacccccttcccacacttgccaggagagcatccttccggagttgaactaggatccacctccccagccccaagcccatgtgtcccacttgtcaatcctggtgccgccccctctctggcaccgtctccaaaatcacacggtgcggcgccgttggttcgtttgtggacagaggtcctgcagctccctggaaccaaggcctgtggcgccctaaagctctgatcttacatttgagtttttcttttcttttcttttcttttttttgagacaaagtctcactctgttgcccaggctggagtgcagtggcaca

SEQ ID NO: 1560469 - DNA, 4001 bp, Homo sapiens
gggcccagtctcatcggttccctccactctccccctcacccggcccacctgtgtcagatgctgttcagaggcaaagcccaggccgtagactgtgttggcgcgactgtcggcccactgcccgaacttctgggaagttttggtgaaggtcatgttgggagtgacagtgctgttgatgatggcctagggtcggggaacaaagttcaaggtagatgggacagatactaacaaacatgaaaccccccaggtattaccttgtattagggtcttgaaggtctttactctgaaccctttcaggagatagagactagggcctgggaaggcttagggtttcctgtcccttgggcacacagcaagccagccaccagacccaaggttgtcaccaggactcctggtgcctctgccccacccagaccccaccctgaccttggcgcctccgatgctgatgatgcggtacacattgcgggtggcatcgtagaaataggagacagtgagtgcgtgcttgcccgctgggatccagtttcgcttggtggctgggtcaatttggaacacgtgcgcccgtgtgctgaagattggctgctccctgcgtggggagagggtgtttggtgggggccaggcacccccacttagaaagctcagggccaggctgggggaggtgggagctcacctggctgtggacattggtcaggctgggatgggcaggctctagggggcagccagagaggtggcaggagcactggtttggcccctagggagagaggagggactatgagtgtccctcaggccaggctgagggaggccaagcaggttccatctcaggacccatcaccaggtgtgcccgtcatggaactttcaatcaaaaaggcaggagaggcccaaagtacacctggtgctttgggaggctgagtcaggaggatcctttgagcccaggagttcgagaccatcctgagcaacatggcgagaccccatctctaccaaaaatttaaacaattagctgggtgtggtggcatgtgcctgccgtcccagctactggggaggctgaggtgggaggatcacttgagcccaggaggtcaaggctgcagtgcagtgagctatggtcaggccactgcactccagcctggacaagagagtgagaccctgtctcaaaaaagaaagaaattataaaaagaaacaaaaaggtaagataattattatagataactcagagcaagcagaccccatctttctttgtctaggggaagcccccacaacaccctgtacaggagatggccctctgagaggagcctggtggccgctgacatccagatgtaaatttctcattgtcctggttattgcacccccgtgaagtcccctccatcccaggctgagctgtggaggccaaatctctgctgagttctttccaccacattcacccatgactggccagagcggggctctccaccaaaaaatggggcgttgagaggtgtgtagtaccaggagaccagttccccactacaccctgcagagggaccccacccccagcagctcccaccctagggcagaagcacaccttgaagtccagagtccaaatccccagggagcccccagccaagttaaaaagacaagatgtagacaaacagccaatcccaatgcccaccatgagggcagagcagaatccacactgggagaccagggctccccaacctccccattgggccattcagcaaccccgaatctgcaggggaccaaggaggagtttggaggagggggaagacaggtgggggaggggaggccctggcccagcggcctctgtggtcaaaggggggatgccccccctatcctgtcctgggcagctgctgtcctggtcacagggtctgaaaccggagcccctgagtgggggtggggcggcagctctggcctggactgggggcgggtcctgcgccgggtgggagttggggaacacaggggtccccggaacccaggcccttccggtccggcagctcctgctgcgacttgcagcgtttggggaaagttactcaccaactagtcatgcgcctcggatgccgccggccacggggctcccggaggggggtccgacaccgcccggtgcccgggatccccaatctggccggtggatgaggccccatcccatgcacccgagtgcgggggacgggggggttaatattaattcaggatcccatccccacccgaggcaggacacccagtgcacgccccaactccgggacgcgggctctgaccctggaacttccgagattcccgcgacgccccctgtctctgggtccagaacttcgggggacacctcttctgcctcctccaaccccaggtcggtaactccggggactcccttcgtgactcctcctctaactgggtccgggaccccggtcctccgcgttgtcctagactcctaaacttcgaggaccccctgccacccctccagtccctgggtccgggacgtccggacccctcccaccccagtaccccaccccaggtccgcagctttggggacctcttcgcagcctcctccaacgccgggtccagaactttgggaacctcccacgcagtcccctctcagaccctgaatccagaacttcgggacccccgcgctccctccagccctggaacttggggacccctcgcgccgctcccagtcccgggtccgaaacttctggggaacccccacgccctccccttggccctgggacttcgaggcccccgcgctcccagcgcaggctcggcaggccgggctcaccctgccaggtcggcgccccgcgagtgtccaggcgcgagtcgggtgcggcccccgcggcgctgactccgcgctgccgggcgccccgctcgctccctggctcccgggcccgcgccctccgcgccgccctccacgccgcccgtgcctttgtctgcgccgccgccgcccgcgccgcctccggtcccatcgcggccggtcccgacgcggccgccgcccgccccgcctccccgggccgccaaggccgccccgctgcgccccctgccggctttttgcactgggagagggtatgggggaggggataagggggaggggcgggggccgggactggggaagggacggaggattgagggagggggttaggggcggtggagggggagtgggggggggggttgcgtggggtcgggttgggagcagagggtggggacagagagacagacggagagggacatctgggatgagaaagagacccagaaacagagacacgggggagacaggcggagagataggaagcagatggagagagttgcacggacagcgatgtgacctcaccctcctgtcaccttctcaggagacagctgcctctgtccccactacctgaggtcataactttgggcctgtgagggaggtcaggtccctcccgggctgacatgggtggcccagtgaggttggggagggggcagtgggtctcagggtctgcatacagtaagtgctcaatgggtgttgccaggaaacggaagagatcaacttcgggagggaacgggaagcaagacaaagagagagaagcctctgttcccctgcccgtcccatccctaagcagggacgtctgtccacctctgtccctcccaagacgatggtaaaaatgcccacaatggttggattaaggttatctttgctgttgtttgagggttccaaaatccaaaggctgaggaaatgtctccaacgcatggttgcatcccctcagcctccactggcctgcgtttgtcacctctggtcacagggagcacccccttcccacacttgccaggagagcatccttccggagttgaactaggatccacctccccagccccaagcccatgtgtcccacttgtcaatcctggtgccgccccctctctggcaccgtctccaaaatcacacggtgcggcgccgttggttcgtttgtggacagaggtcctgcagctccctggaaccaaggcctgtggcgccctaaagctctgatcttacatttgagtttttcttttcttttcttttctttttt

SEQ ID NO: 1560470 - DNA, 4001 bp, Homo sapiens
aatcccagcactttaggaggccaaagtgagaggctcgcttgaggccaggagtcaagaacagcctggacaacatagtgagatcctatctctaaaaaaaataagattaaagatattagctaggcatggtggcatacgcctatagtctcagctagtcaggaggctgaggtgggaggatcccttgtgcccaggagtttgaggctgcagtgagccatgattgcactgcttcactccagcctggacagcagagcaagatcttgttaaaaaaaaaaaaaaaaagaagggagggagggagggaaaaaaaaagaagaaaggtaaattctaaaccttctagaagaaaacaaagaaagcctggtgtggtagctcatgcctgtaatcccagcactttgggaggccgaggcaggtggatcatctgaggtcaggagttcaagaccaccctggccaacaaaatcccatctccactaaaaatacaaaaattagctgggcgaggtggtgggcacctgtaatcccagctactccagaggctgaggcaggagaatcgcttgaacccgggaggtggaggttgcagtgagccgagatcgtgccactgcactccagcctgggggacagagcaaggcattatctccaaaaaaaaaaaaaaaaaaagaagaagatcttcgtgaaagcactcatcatcaacaaaaccacggataaagataataatggaagtatagagacggcacagggtgcagggaggtgaggatgaaggtattgctggggcatgtgggaaagtgcccagcccagcccagccacccatttgatgtcccaaagaggagcagggtgtgtccaaaattagagctacaggcagtagaactaggactcaagagcaggtacagtggctcatgcctgtaattgcagcactttgggaggccgaggcaggcagatcatttcaggtcaggagttcgagaccagcctggccaacatggtgaaaccctgtctctaataaaatacaaaaaattagctgggcgtggtggcggactcctgtagtcccagctactcaggaggctgaggcaggagaatcgcttgaacccgggaggcggaggttgcgtgagccaagatcactgcagcctatctcaaaaaaaaaacagaaaaatgaactaggaatcaaaccggggaagcttaaaggggcttcagtctcaactcatcctacaatcccatcctgcagatgggaagataggggacctgcccaagatcccagagtgagcccaggagaagacttgggcccagtctcatcggttccctccactctccccctcacccggcccacctgtgtcagatgctgttcagaggcaaagcccaggccgtagactgtgttggcgcgactgtcggcccactgcccgaacttctgggaagttttggtgaaggtcatgttgggagtgacagtgctgttgatgatggcctagggtcggggaacaaagttcaaggtagatgggacagatactaacaaacatgaaaccccccaggtattaccttgtattagggtcttgaaggtctttactctgaaccctttcaggagatagagactagggcctgggaaggcttagggtttcctgtcccttgggcacacagcaagccagccaccagacccaaggttgtcaccaggactcctggtgcctctgccccacccagaccccaccctgaccttggcgcctccgatgctgatgatgcggtacacattgcgggtggcatcgtagaaataggagacagtgagtgcgtgcttgcccgctgggatccagtttcgcttggtggctgggtcaatttggaacacgtgcgcccgtgtgctgaagattggctgctccctgcgtggggagagggtgtttggtgggggccaggcacccccacttagaaagctcagggccaggctgggggaggtgggagctcacctggctgtggacattggtcaggctgggatgggcaggctctagggggcagccagagaggtggcaggagcactggtttggcccctagggagagaggagggactatgagtgtccctcaggccaggctgagggaggccaagcaggttccatctcaggacccatcaccaggtgtgcccgtcatggaactttcaatcaaaaaggcaggagaggcccaaagtacacctggtgctttgggaggctgagtcaggaggatcctttgagcccaggagttcgagaccatcctgagcaacatggcgagaccccatctctaccaaaaatttaaacaattagctgggtgtggtggcatgtgcctgccgtcccagctactggggaggctgaggtgggaggatcacttgagcccaggaggtcaaggctgcagtgcagtgagctatggtcaggccactgcactccagcctggacaagagagtgagaccctgtctcaaaaaagaaagaaattataaaaagaaacaaaaaggtaagataattattatagataactcagagcaagcagaccccatctttctttgtctaggggaagcccccacaacaccctgtacaggagatggccctctgagaggagcctggtggccgctgacatccagatgtaaatttctcattgtcctggttattgcacccccgtgaagtcccctccatcccaggctgagctgtggaggccaaatctctgctgagttctttccaccacattcacccatgactggccagagcggggctctccaccaaaaaatggggcgttgagaggtgtgtagtaccaggagaccagttccccactacaccctgcagagggaccccacccccagcagctcccaccctagggcagaagcacaccttgaagtccagagtccaaatccccagggagcccccagccaagttaaaaagacaagatgtagacaaacagccaatcccaatgcccaccatgagggcagagcagaatccacactgggagaccagggctccccaacctccccattgggccattcagcaaccccgaatctgcaggggaccaaggaggagtttggaggagggggaagacaggtgggggaggggaggccctggcccagcggcctctgtggtcaaaggggggatgccccccctatcctgtcctgggcagctgctgtcctggtcacagggtctgaaaccggagcccctgagtgggggtggggcggcagctctggcctggactgggggcgggtcctgcgccgggtgggagttggggaacacaggggtccccggaacccaggcccttccggtccggcagctcctgctgcgacttgcagcgtttggggaaagttactcaccaactagtcatgcgcctcggatgccgccggccacggggctcccggaggggggtccgacaccgcccggtgcccgggatccccaatctggccggtggatgaggccccatcccatgcacccgagtgcgggggacgggggggttaatattaattcaggatcccatccccacccgaggcaggacacccagtgcacgccccaactccgggacgcgggctctgaccctggaacttccgagattcccgcgacgccccctgtctctgggtccagaacttcgggggacacctcttctgcctcctccaaccccaggtcggtaactccggggactcccttcgtgactcctcctctaactgggtccgggaccccggtcctccgcgttgtcctagactcctaaacttcgaggaccccctgccacccctccagtccctgggtccgggacgtccggacccctcccaccccagtaccccaccccaggtccgcagctttggggacctcttcgcagcctcctccaacgccgggtccagaactttgggaacctcccacgcagtcccctctcagaccctgaatccagaacttcgggacccccgcgctccctccagccctggaacttggggacccctcgcgccgctcccagtcccgggtccgaaacttctggggaacccccacgccctccccttggccctgggacttcgaggcccccgcgctcccagcgcaggctcggcaggccgggctcac

SEQ ID NO: 1560471 - DNA, 4001 bp, Homo sapiens
agttcgagaccatcctgagcaacatggcgagaccccatctctaccaaaaatttaaacaattagctgggtgtggtggcatgtgcctgccgtcccagctactggggaggctgaggtgggaggatcacttgagcccaggaggtcaaggctgcagtgcagtgagctatggtcaggccactgcactccagcctggacaagagagtgagaccctgtctcaaaaaagaaagaaattataaaaagaaacaaaaaggtaagataattattatagataactcagagcaagcagaccccatctttctttgtctaggggaagcccccacaacaccctgtacaggagatggccctctgagaggagcctggtggccgctgacatccagatgtaaatttctcattgtcctggttattgcacccccgtgaagtcccctccatcccaggctgagctgtggaggccaaatctctgctgagttctttccaccacattcacccatgactggccagagcggggctctccaccaaaaaatggggcgttgagaggtgtgtagtaccaggagaccagttccccactacaccctgcagagggaccccacccccagcagctcccaccctagggcagaagcacaccttgaagtccagagtccaaatccccagggagcccccagccaagttaaaaagacaagatgtagacaaacagccaatcccaatgcccaccatgagggcagagcagaatccacactgggagaccagggctccccaacctccccattgggccattcagcaaccccgaatctgcaggggaccaaggaggagtttggaggagggggaagacaggtgggggaggggaggccctggcccagcggcctctgtggtcaaaggggggatgccccccctatcctgtcctgggcagctgctgtcctggtcacagggtctgaaaccggagcccctgagtgggggtggggcggcagctctggcctggactgggggcgggtcctgcgccgggtgggagttggggaacacaggggtccccggaacccaggcccttccggtccggcagctcctgctgcgacttgcagcgtttggggaaagttactcaccaactagtcatgcgcctcggatgccgccggccacggggctcccggaggggggtccgacaccgcccggtgcccgggatccccaatctggccggtggatgaggccccatcccatgcacccgagtgcgggggacgggggggttaatattaattcaggatcccatccccacccgaggcaggacacccagtgcacgccccaactccgggacgcgggctctgaccctggaacttccgagattcccgcgacgccccctgtctctgggtccagaacttcgggggacacctcttctgcctcctccaaccccaggtcggtaactccggggactcccttcgtgactcctcctctaactgggtccgggaccccggtcctccgcgttgtcctagactcctaaacttcgaggaccccctgccacccctccagtccctgggtccgggacgtccggacccctcccaccccagtaccccaccccaggtccgcagctttggggacctcttcgcagcctcctccaacgccgggtccagaactttgggaacctcccacgcagtcccctctcagaccctgaatccagaacttcgggacccccgcgctccctccagccctggaacttggggacccctcgcgccgctcccagtcccgggtccgaaacttctggggaacccccacgccctccccttggccctgggacttcgaggcccccgcgctcccagcgcaggctcggcaggccgggctcaccctgccaggtcggcgccccgcgagtgtccaggcgcgagtcgggtgcggcccccgcggcgctgactccgcgctgccgggcgccccgctcgctccctggctcccgggcccgcgccctccgcgccgccctccacgccgcccgtgcctttgtctgcgccgccgccgcccgcgccgcctccggtcccatcgcggccggtcccgacgcggccgccgcccgccccgcctccccgggccgccaaggccgccccgctgcgccccctgccggctttttgcactgggagagggtatgggggaggggataagggggaggggcgggggccgggactggggaagggacggaggattgagggagggggttaggggcggtggagggggagtgggggggggggttgcgtggggtcgggttgggagcagagggtggggacagagagacagacggagagggacatctgggatgagaaagagacccagaaacagagacacgggggagacaggcggagagataggaagcagatggagagagttgcacggacagcgatgtgacctcaccctcctgtcaccttctcaggagacagctgcctctgtccccactacctgaggtcataactttgggcctgtgagggaggtcaggtccctcccgggctgacatgggtggcccagtgaggttggggagggggcagtgggtctcagggtctgcatacagtaagtgctcaatgggtgttgccaggaaacggaagagatcaacttcgggagggaacgggaagcaagacaaagagagagaagcctctgttcccctgcccgtcccatccctaagcagggacgtctgtccacctctgtccctcccaagacgatggtaaaaatgcccacaatggttggattaaggttatctttgctgttgtttgagggttccaaaatccaaaggctgaggaaatgtctccaacgcatggttgcatcccctcagcctccactggcctgcgtttgtcacctctggtcacagggagcacccccttcccacacttgccaggagagcatccttccggagttgaactaggatccacctccccagccccaagcccatgtgtcccacttgtcaatcctggtgccgccccctctctggcaccgtctccaaaatcacacggtgcggcgccgttggttcgtttgtggacagaggtcctgcagctccctggaaccaaggcctgtggcgccctaaagctctgatcttacatttgagtttttcttttcttttcttttcttttttttgagacaaagtctcactctgttgcccaggctggagtgcagtggcacaatctcggcttactgcagcctctgcctcccagattcaagcaattctcctgcctcagcctcccgagtagttgggactacaggtgcatgccaccacacctggctgatttttgtatttttagtagagatggggtttcaccatgttggccagtctggtctcgaactcctgacctcaagtgatctgcccccctcggcttcccaaagtcctgggattacagacgtgagccaccacacctggccgacacttgagtgttttgacaacttcagagaggcttttgcttttcatctccaagacctctgctcctgtctcctttccctgttcctttatttctgtttccttctaagaagaatagtatatctgagctggcggttacattacattcaaattacctttaggtgaattccaggtcaggttgtttttggagattgactcctgcgccaagatctgagtcttcccccatccaggcctttgcccaaactgttccttccacctggaatgccctcgctgcaggcatctcttctgccttgtccttccaggctcagcgccaccaccctgtctcctcctccaggaagcctctctgactaccctggccttggaagggatcttgccctcccctgtcccaatccctgtgactcttttttttttcttttttaaagtttatttttagagacgaggtctcactatgttgcccaggctggtctcaaactcctaagctcaagtgatcctcccacctcggcctcccaaagtgctgggatgacaggtgtgagcccagaccctttctgtgactcttatgttacctgtttattacatgaccaggtctgggtgctcctctagggctggcccatccatcctgaagccccagtctgacccagcacaagagcga

SEQ ID NO: 1560472 - DNA, 4001 bp, Homo sapiens
tacccatccatctttacctctcacctggattagtgcaccagctgcctctcctcttccacttttgctgcctacattttatttctctccatgcagccagggggagctttataaagcccaagccaggttgcatctttgctctgctaaaaccctgccttgactttccacagcacttaaaaatagaatccacacccccaccatggcctgccaggcccctgatgacctcatctcctacaaatcttgccctcttgctctgttctgccctctctgccattcctccatcacaccaagtttattcccaaatcacggcctttacatctgctattccctatgcctggaacaccgttcccccaaatttcacttggagattaacccatctgatgtaatcagccacctatgccctcattgctctctctcaaagccctgcttttttgttgtcttcacagaactactggcatcaaaagttttttctttttctttttctttttctttttttcttcttcttgagacaagagtctcgctctgttgcccaggctggagtgcaatggctcaatctcagctcactgcatcctccacctcccaggttcaagtgattctcatgtctcagcctcccaagtaactgggattacaggtgcacaccaccccacccagctaatttttgtatttttagtagagatggggtttcaacttgttggccaggctggtcttgaactcctggccccaggtgatccacccactttagcctctcaaagtgttgggattacaggcatgagccactgcgcccagcctggaagttaatttttatggttgtgtatgtgttgcttgtcactagaatgatggctgtgtggggcaggtttttgtctgtgttattccttgctgaatgcccaggcctggcacagggtgagtactccatagatgaatggatgaacaaatggttgatcaccagacatctgtccctcttcctgcccatcacccaggacatgtgcctagctggcccgtccctggtcatctcttcaccagtctgtcctctaatcaggagtccacttgtcaccttcagcttccagttgggacctggatcttccgagatgccctggagccatgcctcgttgaaccaggaggggtctctgggggcgagaaggtgggatgagcagactgggggacacttttgggatcctccccttcagctccactcacatctggttcagcacataggctacggcaaggccgctgctcaggtcctgagggctggcacagggagacggaacgtggaacgtctgtaactgaggggtaaaggaaaggacaaggaaagagttagggcctgggagcgccgaaccgctccccttttgcagacttttccagtcagcgaacctcacatggtggggcgggcgctgctccgccacagcagctctgcgagggactggcttctgctcacctgagaccggagggggcgtggcctcacctcacctctgcccaacaaaccctgcgcgtccaggccagggtggtatcgcgagtcacctgggccccacaggcaccacgtgaccaggccaattcacctgtgtcctcgccccacgtgaaccaaccacagaggggcggggcctcacctgtcctttccacgcagacttgccacgtgacgggggcgggtgctcgggccagagtccaacggtccagcaagtcgacgaccccgcacctcccagccccagcaccaagagactgaccgaaccagggccagggatcccgggcaagaggagcgggcgctcaccttcccctagccccgccccacgacctacccaggtgagcagagacccgcatagctcagctttgtccacgctcatggctcccgatcggattcaatccaggccacggagccccggcgccgcagcagcctccgggtccgccaccagcgagcgcccgcagccccgacctcccgctcggcctagagcgccgccccgccccgcccccctaggcgcaggccccgccccgcccccaagcccaggctccgcctcggaacgtaatctcctccctacgcccgctcttgcctccagccccgccatcttggatccgggcaccgttcgggcgcccgccctgccgctaggggtcagcctggcccagccttgtgcatccgagggtggtcccacctcccatcctcgccctggccctttttggggtgggaggtcctcaagatccttttgagacggaggtgctccaccctgttacacaagcgcattcacgtcttttccctgcaacttaagtaaattctttttttttttttttttttttttgagacggagtctcgctgtcgcccaggctggagtgcagtggcgcaatctcggctcactgcaggctccgccccctggggttcacgccattctcctgcctcagcctcccgagtagctgggactacaggcgcccgccacctcgcccggctaattttttgtatttttagtagagacggggtttcaccgtgttagccaggatggtctcgatctcctgacctcgtgatccgcccgcctcggcctcccaaagtgctgggattacaggcgtgagccaccgcgcccggccttaagtaaattcttgtgtctaaccactttataatcggagccgttgtgcggggaggggcgagccctggcactttctatggactgggagaggggatgctaaaggggttttcccgccggacgcggtggctctcgactgtaatcccagtattttgggaggcctaggagggagaattaatttggatagaagttggagaccagcctctcttcaaaaaatttaaaaattacccaggtagcggtggctcacgcctgtaatcccagcactttgggaggccgaggcgggcggatcacgaggtcaggtgttcgagaccagcctggccaacatggtgaaaccccgtctctactaaaaatactaaaaattagctgggcgtggtggcgcacgcctgatttcagctactcgggaggctgaggcaggagaatcgcttgaaccctggaggcggaggttgcagtcagccgagatcgtaccactgcactccagggggcaacagtgcaagactcctcaaaaaaaaaaaaaaaaaaattagccagacatgttggcgtgtttctgtggtcctagctcctagctctacagaggctgaggtgggaggatagcttgagcccaggaggtcgagactgcagtgagccgtgatagggccactacactccagtctgggtgacagagcaagactctgtctcaaaaaaaaacagtaaaaatttaaaaatagggccgggcgcggcggctcacgtctgtatcccagcactttgggaggcctaggcaggcggatcacgaggtcaggagatcgagaccatcctggctaacacggtgaaaccccttctctactaaaaatacaaaaaattagccgggcatggtggcacgcgcctgtagtcccagctactcgggaggttgaggcaggagaatagcttgaacccaagaggcggaggttgcagtgagccgagatcgcgccactgcactccagcctgggcgacagagtgagactgtctcaaaaaaaataaataaaataaaataaaataaaataaaatgcctggcgcgatggttcacatctgtaatcccagcactttgggaggtcgaggagggaggactgcttgaacccaggagttcgagaacagccctggcaacacagcgagactccgtctctacaaaaataaaataaaaaataaaagtagctgggcgtggtggcacgcgcctattcccagctactccagaggctgaggtgggaggatcgcttgagtccgggaggtcaacgctgcagtgagccgtggtcgcgccactgcactccagcctggacgtcaggggggagaccctgtttcaagaaataaataaatgaatggatcctccctgcattattgactccagcagtagataaggggacacgggtatggtcctaggtcgagaagaggtcagttagacacacatgtcctggctgatggataggcacccttgcccagcct

SEQ ID NO: 1560473 - DNA, 4001 bp, Homo sapiens
gtcactgcctcttgttaatgattccctggctgacctcctgggccagggtgggacctgtgaggagatggacggggaggcagggcctgggggagcccagcccagcccagtcctggcgcccccagtcccaggcgtccatccaggcaggctgtagggactgggccttggccagagcacgccgtgatcacggacgcagattgggctgggttcaaggatggggtcagtgtctgaccagcagcggggggacgcctggatttgcagggatggggacccccatgcctgagcctggtggagcaggggactgaggatcccggtttgagggaggagacagctgaggacctgaaatcataagtcttgggaaaggaggaatttgggggccaggactccctagtatgagggaggaggggcctgagggctggaactcctgggtctggggaggaaaggactggggtccaacggctgagtctgaaggaagagcaggacagaacacctaggtgcttggggggacgtcatagtgccccctcttcaggtccccaggaacccctctattaggaggtgggcattaggctgggtggggggatgagggaacccctgtcctcagggctggaactgtgagtctgggggcccttgtccttaccctggggtccagcaggtgggggcggagcctcgaggtagtgccggggtcgggtcagtctccaggcctgggcaggagcatggtggccccgcagcagcgggcggcctggaggcagaggcggtggcgtggggcctgctaggccaggctgcctcacctgaggaggagggggctgggcgaggggcgggtgaaggggcggggaggggccggaccattcgattggcagcactggaggccacctggctgatggggccgggcttgtgggggctggaccaggcgggcccagctacggggcttgccttggacctccagggggacccaggtgtgcctgtctgcggggatgtgggaacagggacaggcctggccggaggctgggggtttagggagaaagtgcaggctgaagggtgggggtctgaccagaagagatcagatggagggccccagctgccctaagcccactccaccctcacccagcgaacccttccccccgccctttctgcgtcctccagccccaggtcctggctgtgcccgccacttgctgcacctctgcctaattccctgcccaattcctgggccccaaccccagccccagcctctcccgcctgccctgctcatcctgccccggcccctcccccgctggcttcctacaagtcacggggctggtttgctttggcagcctccgcccggccgcggtgacctctggagccagaaagtcctagcactagataggggggatggggggcttggccgggaaaacacagcgctaagggcagaggcccaggccaagtggccggaagcgtccgcaggcagataacacactgtcccgccagcagccaggcgcggcccacgtcagacccagggccaggtaaacaccagacgtgcagggtcaccgccagacacctgcccgtgctcaaccacacgccggacacagtcggcctcggctgcttgccccagataggccacccgcacaaccggccccacccgcttacccacacgtgcccgctgtgcccagccaaacccacctccaccgcacccatttcctccactcagcccagggcccctcattgggacacgctggtttagcctggcttcctctgcctttccatccatacccgtctctccttccctctccttctccccagcgcccacctctccagagactcacactgctgggcacaccacacaccccatgccacccctgcaccccagcatcagcctcgattctcttccctccacggcaccccctcccttcctggctccgttccactctccctcacccctgagcccatggctcccccaaccccgacacagatcaggcactaagtggcttcacctgtgggccctcaggtagggtccctggaaagcgggctcgaagattcggggacgggaatggggggaaggtgacggggctcacaatcgaaactatgcatcaagtccaagagtctttatttcatgaacaaaactacttctgtaaagagacgaggctgaatgggcccctttctaggtggccacagttcaaggctggtgagagagggcgaggttgggccggggcaggagtgcattacagggaggggggaccccaggtccagccggaggaagcgggaggggaaatgatgccggggagggggagtcggagtgggtcccagaaccccctgccccaaactgctccagcccatcatcgcgacccctgccgccaggcagggaggaggcggggaggggctggccccagaagtgcgtgtctgaagcggccaatgtgtgcaaatcagcaaggaggaggggtgcggggccgctgcccccacctcaccgcccccctccccaaacaggcagcagaagcagggtgggggcagcggcagtattgctttacccatcatgcatggcggtgcgcggccggcggggcaggagctggaggaggcgaaagtgggggtgcgagccaagccccctgccccctcccaccccagtggctccgtcggcaggactctgaggctttctggggcccaggagtggccacccccacgctgggggcaggcggtgcctggagagtccccattacggctggctcttccttgaggcggggcccagggcctgaaggggagcaagagagggggaattagggacctgggggacttcggcccctcccaatccccttcccctctgccagcccatccgccttaccagggctattcggccacctggacgcccgtgcagttctctttgctttcagaggtgatggccaggtattccgagctgtgggggaaaggccaggtatacagtgaccccatcatcagaccgacccaacccccgggggatgggggaaggtagcggtctccaccccaggtacacagggctccttagttagagagagaaggagtctatgggtggactcctcagggtctttgaggaatctggctgggagcctgggctcctgagttggagggaggaaggggctgggtctgacgacccctatcctgtgtctgacagggagcactcccctctgggtagtactgagagatggcgccctgggccgctccgctgcctcctccctgcccgggctccggagttcctctctggcaagtgtgacggtgccctgggtgccctcccacctcccagccaccctactcacgcattctcctgtgcagcagtctccgtggcggcagcgatcttcttgtagcagtaaatcatctctgccacgagccatatggtcaacaccacaatgagcacatacatcatgatctcagacacgatggatgccatgtctctgttggctgcaggggccaggcagggttaagggggtagcccaggctgcatgacagcctgagtgtgctgtgagcttgctgtgtgagcttggatgagtggctcaacctccctgggcctggtgtatgcactgtgattattaatacccagccttgggtaggcctggtgggggtcaccctcaacctgcctccctgtgtaactcgaggccacatctgtgtcattctggaggccctcagcacggtgcctaaaagccgtagctctgcaaccagaaggctcaggttcaaaggctggctctgccactggccagctgtgtgaccttgcgcaagtgactcaatgtctctaggcctctgtttcttcaattgtaaaatgaatacctccttcatcagagtgctgtgagaattaaatatgctttaaaatccttagaatagtgcttgatctataaatggcactcagtgaaggttcacttgtattagtattattattgttgttataactggggctataaagcctaatggttaacagctggggctctagggccagactgccagggttcaaatcccggctctgcctcttactagctgtgtgacctcaggcaaaggactgcacctctctgagcctctgt

SEQ ID NO: 1560474 - DNA, 4001 bp, Homo sapiens
cctcctcgctggaggcacctccagcctcctctctcctgtccagtgggttggggatgatggtgaagcggggctcatcttcctccagcccctcctcctcctcctcttcctcctcgctgtggtctgggctcagtggggccccaacctcagccctctcttccctcctctcctcgtcttcttcctcctcctcctcctccttgtcttcctcttcttcctcctcctggttcaggctgaggccatgaccttcctcctcatcctcctcatcttcctggtcccggctgccatgatgggtgcctttctctccctgctctgaactttcatcgtcttcctcatgggagccggggtcctcttccttctccttttcctcctcagaatcatccttcctcaaatggcttctatccttgaccactgtgtgtcctggggggtgatggctcatctctttgatggaccctctttgaccatggccagtttcttcatcttggtggctttgcctgtggctgggggcctggtggccaagctcagcagagacctcctcatcttcctccctggggactctgtggtggtgatggtgagggacttctgttttatactcatcttggaagtcctcttcatcactcttgtggcctcgaggttggtggcttgcaacatagtggccgaactggactgtgatctcctcttcttcctcttcctcatctacaaggccatggtggacatgttggggaccctggtgccaacgttcagtggacacatcctcatcttcttcctcgtctctgtggccttggtgcctgtggtcagggacatgatggtggtgttcacctgagacagcctcaacctcttcctttctgtggtcttggtgcctgtgggcctggtgtccatactcagtggagacatcatcatcatcattgtcatcttcttcatggcttcggtgcctgtggctggggtcgcgatgatggtgtccatctgagacatcttcatcctcttcaatcccgtggccttggtgcctgtgagcctggtgtctatattcaatggagacatcatcatcatcatcatcatcatcatcatcatcatcatcatcgtcatcttcttcatggccttggtgcctgtggctggggccatgatgatggtgtccatctgagacatcctcatcctcttcactcccatggcctcggtgcctgtgggcctggtgtccatactcagtggaggcctcctcttcctcctcctcctcctcctcctcctcttctccttcatcatcttccccatcatggcctcggtgtccatgcctgaggatatgatggtgatgctcactggacacaacttcatcctcatcctcgtcttgatggctgtggctcctgtggctggggaggtggtgcctgtgctcagctgagtcttccgtgtcttcactcccgtggcctctgtgcccacgggcctgcccaccatgctctgcaaagacctcctcacctgagacaccctcatctccgactttgtggtcttgggacctgtggcctgggagtaggtgcccatattccttggagacatcttcatcctccttttcacggtctgggtggctccagaaatgatgcccattctctgtggaaacatccttgttctcatctggatggtctctagggctgtggaggtggtggcgaagctctgctgatgcctcctcggagagcccggcgactccagtgctgttgttccggtttctgaagcctagcccatcccctctgagctgctgggtcatggccggggggaggagcaggctggccaccccagcccagaggacagaagcgtgcagccatggcctatggtggcccatggggacggacaggcagcactggctccagctgcctctgcggcaatgtggacaaacgttggggtctttgtccctttggggttggtctctttttttctctgtgtctctcctttgtcctttcggtctctgtccaccttcctctggtccttgctgcctggctctggacacccctctgaggctgtctccggagccccctgacccccctctggggccctccctccccattccccagccaatagggtccttcccctcccctctctccagctaaatttactctcagccctgagttattctgggtcagtccccgcctgcctgcctcctgctcctcctcctcccagctggggaggggaccagtgaggggtctctccctggccaggagacggtggccaagggacttgactttgaactaccaacaagctcacgtttggcagctgcaaagacaaaggctagacttttagcaggtttttgggggagcctggggcacctgggggaggcagaagagacttatcagaggggagagactcctgggacggaaggactgggggttcgattgcggggtgtttccagctggaatgatacgtgctggtgagagagtgatgtcagtattgaggccctagaatggggggaaaggaacatggcccccaacacacgtgcccatgacctcctgtccctggaactcagatctgggggcagggactgggctaggccagggctataaatacagctgggaggggtagggggactcaggttacggaggccacagctgtccccatcacagagggctggcaggagacaagtggccttgcccgtctctgtgtgtcagtatttcctactcctcacccttcatgactgcccccactagggtctcctttcctgttcacgggtcctcctctctcttcaattctgtcatctgctctctcagggtccctgtccctcctccatgggattgcctctccctctcactctgggcttctgtcccactcttatcttagtgtcagtcctcccccaagtctgtgtccctctctctcccctaaatctctggcccctcctttctgagttcctgcccttcccccaattctttggtttttgcatccccctctgccccttgcctcagtcaaggtgtctcctccccatctctggcatccacctctctgggtctctgtccccactctctctcagagtctctgtccccctctgtctcagagtctctgtccacctctccctgggtctctgtccccctctctctgggtctctgtccccctctccctgggtctctgtccccctctctctgtggatctctgtccccctctctctgggtctctgttcccctctctctgtgggtctctgtccccctctctctgtggatctctgtccccctctctctgggtctctgttcccctctctctgtgggtctctgtccccctctctctctgggtctctgttcccctctctctgggtctctgtccccctctctcagggtctctgtccccctctgtctcagagtctctgtccccctctctctgggtctctgtcccctctccctgggtctctgtacccctctccgtgggtctctgtcccctctccctgggtctctgtccccccatccctgggtctctgtccccccctctctgggtctctgtccccctctctctgggtctctgtcctcctctctctctgggtctctgttcccctctctctgggtctctgtccccctctctctgggtctctgtccccgtctctctgggtctctgtccccctctctctgggtctctgtcctcctctctctctgggtctctgttcccctctctctgggtctctgtccccctctctctgggtctctgtccccgtctctctgggtctctgtccccctctctctgggtctctgtccccctctctctgggtctctgtcccctctccctgggtctctgtccccctctccgtgggtctctgtcccctctccctgggtctctgtccccccctccctgggtctctgtccccccctctctgggtctctgtccccccctctctgggtctctgtcctcctctccctgggtctctgtccccctctctctgtgggtctctgtcccactctctctgggtctctgtcccactctctctgggtctctgtcccctctccctgggtctctgtccccctctctctgtgggtctctgtccccctctctctctgtct

SEQ ID NO: 1560475 - DNA, 4001 bp, Homo sapiens
gacagaccagatggagcggatcattgaggagtccctaaatctcccatctgtaggtccagccctaggttctttgcctctgctgtcttctgggtgtctcctcctgacaacctccaggccccttagaaccagcaggacccaatccaggctcagcatgtcaccccatacctgcttctcttcccagctcaccatcacagaaatagccccactatcccctgtccctaaatgggagacccaggtattgtcctcacctccttctatcctttcacccccacgagctcatggttttcagatcttatcagttctccctctccagtctctccccagctgtcccttcctctctctctccaggactcccagattgtcacctccctcctagaccctaccccgggcctgaccacccccatctttcctttggcctcccttccatctccgatttggtctcccccacctccacactggcttccccatgtccatactcattctctccctgcctcttctgtcaatgcagccaaaggcgtctgtgtcaaaagcaacatggccatggcccttcctgctccaaaccctctcaggggtccccactgcaactgatggaaaccaggctcctcactgcaccccatgaggccctgcaggtatagcccctgactacctgtctatccttctctcccacggccccatctatgaatcgttcagttctcaaaataatgaactcctcacctttcccagacacaccaggcatgcccacagcaagaaacgagcttccaccttttccccttccagggacagcccatgaagctcctctgctcatccctctttccacccccagctctacactgactgcagcagcccggcagggggaagtgggaccagatggactgacgggtggacggatgggtggatggatgaatggatagatggacagatgcatgtatggatgcatagatagaaggatggatgggtggatggccagatgaatagatggatgggtggatggatggatgatggacggagagatgtatgggtggatagatggatgagtggatggatgtatgaatggataaatgggaacacataaatggatggatggatggatggatggatggacggacggatgcatggatggatggatggatggatggatggatggacggatagatgagtgggtggccagataaatagatggatgggtggacagatggatgagtggaaggatggggggagcagatggatgaatggatgggcggacagatggatgaacggaagtgtggatggatagatggaaggatagatgggtggatggccagatggatagacgggtgggggacagatggatggatgggcagatgaacggttgaagcagcccggccgaaatgcgggagaaatggggggaagccctgcagaacgcatcggccccttcttgacctcggcgggccttagcttcccctctgaacaaagcgggcgtgtgaccctctgcgcacccctaaaccgtgcactcacccgctcaggcctcagtttcccccactgtccagcgggggtggggtcccgggctgggagccacgcgaacgcccccacggtcctctcttctcggccgcctcctgccgggtccccgaccgcaccccctcccgtagggcacgggtcacgtgactcgaagcccacctcctcccggggaggggccgggcctcggggacccagcgccggagcgtcgccgggcaacagtgcccgcctggtcttcgcctcccagcaggggcccggccccgcccactgggcggacgccccgcctccgaatcgatcacgtgagggggccgcagcgctcgaacaatcccgccctctcgttgccgtgacaaccgccttgtaggcacactcttcttaaatccgggcccttggtcccccgcgcgggcgcgggtggatctctcgggctctgacttgttttcgggtcaccttcaggcttcagccaggcacctgacgcctctttcccctcacggtgccagggccgggccgaactacatttcccaggaggctccgcggccaggtgcaaacagcgccgtgctgactacatttcccagacagccttgcggcggcccgggccttaaagcgtccatttcccagcggccctccgctgcgagaccgcagcccttctctggagtctcagagccgcaagacaccacgactcccagaggaccttgcgtcgggcaagaaagactacaccttccagaggcctctgcggcgccgcgacaggaagcggcgggcgagccgagtgtccttgcgcgtggatccgagcgaccatggtggcccgggtgtggtcgctgatgaggtgcgtgggggcgccggaggggacccgagtccccgaaaaagtccatttttgtgggcatccctgtctccagtctggtcccgatctgctcttcgcttcccttagagtcacttccccttcgttccccgcctatgggccagatagggaaactgaggcttcagaggggcggggcttcccgaggtcgccaatcccctccctcctgcttcccagcgagcccttggcgttcagttcgcggtgtcagcctccgcctccgagcctcagttgtcttctctgtgaggtgggaatgccggtgaatcctgccgctggcgtggatgagaagtgaatgcgtgctcggagctgcgagtgacagcgggcaggaggcgcccagggacacttggtttctccagggctggaaggcttctagaaggtcaagatcttacgtcttcactgcccctgctcactgtgggactttgagtgacccactctccccctctgggtttcagttcatcagttcaagtggcgtccagccgccctgccttgcacgttgtaaaacgagtgctgtatataataggggtctgggtcgacggtgctgcactacagagtgtcaccctgtggacggtgagccctcaggagggtctcactctccccgtgggccttggcccctgagggtggctgtcagtgtccgctgagcttctgctcctcccgtccctgcccgcaggttcctcatcaagggaagtgtggctgggggcgccgtctacctggtgtacgaccaggagctgctggggcccagcgacaagagccaggcagccctacagaaggctggggaggtggtcccccccgccatgtaccagttcagccagtacgtgtgtcagcagacaggcctgcagataccccaggtactacgggccgggaacgaggccagggtttggcgggtggtcagctctgggaggtccctccagccctgcacgatgttgtcctccatattgatgctgacctgattctccggcctgtcctcctccctccgcctctggggatgggctgctgagccttttcaccagttctttctgcccatctctttttcccagctcccagcccctccaaagatttactttcccatccgtgactcctggaatgcaggtaaggcacccagtttctttgcttggagggagacaccccagtctagcccctctccccacttcctggccattcctttctgtccatcctccttcctgcccgacacgtgtctcttagggatctaaaagggaaaggaggccgagcacagtggctcacgcctgtaatcccagcactttgggaggctgaggtgggcggatcatctgaagtcaggagttcgagaccagcctgggcaacatggtgaaaccccatctctactaaaaatacaaaaattaaccgtgcgtggtggtgcacacctgtaatcccagctgctgcttgagaggctgaagcaggagaattgcttgaacccaggaggcagaggttgcagtgagccgaggttgcaccactgcactccagcctgggcgacagggcgagactccatctcaaaaaaataaaatacaaaaattagcctggtatggtggcgcacttgtagtcccagctacttgggaggctgaggcaagagaatcgcttgaacccaggaggcgaaggttgcagtgagccgagattgcactactgcactccagcctgggagacagagtgagactcc

SEQ ID NO: 1560476 - DNA, 4001 bp, Homo sapiens
cctggactcctgggtctgagggaggaagggctgggagcctggactcctgggtctgagggaggaggggctgggagcctggactcctgggtctgagggaggaggggctgggagcctggactcctgggtctgagggaggaggggctgggggcctggactcctgggtctgagggaggaggggctgaggtctggactcctgggtccgaggaagtagggcctgggggcctggactcctgggtctgagggaggaagggctgggagcctggactcctgggtctgagggaggaggggctgggggcctggactcctgggtctgagggaggaggggctgaggtctggactcctgggtccgaggaagtagggcctgggggcctggactcctgggtctgagggaggaggtgctgggagcctggactcctgggtctgagggaggaggggctgggggcctggactcctgggtctgagggaggaggggctgaggtctggactcctgggtccgaggaagtagggcctgggggcctggactcctgggtctgagggaggaggtgctgggagcctggactcctgggtctgagggaggaggggctgggggcctggactcctgggtctgagggaggaggggatgggggcctggactcctgggtctgagggaggaggggctgggagcctggactcctgggtctgagggaggaggggctgaggtctggactcctgggtctgagaaagtagggcctgggggcctggactcctgggtctgagggaggaggtgccagagcctggactcctgggtctgagggaagaggggctgggagcctggacccctgggtctgaaggaggaggggttggggacttggattcctgggtctgagggaggaggtgccggagcctggacttctgggtctgagggaggaggggctggggacctggactcctgggtctgagggcagaggggctgggggcctggactcctaggtctgagggaggaggggctgaggtctggactcctgggtctgaggaagtagggcctgggggcctggactccggggtctgagggaggaggtgctaggggtctggacctctgggtctgagggaggaagggccaaggtgagggctgagggaccgtcactcaccatccttgtcgcagataaccactcgggccccgctgttcactgagaataggaagggaacaggttactctccgagccttggttaaagcctctgccgccctcttgtggccacctggattggggctgatctccctctcccctcgtgaccccagtctcatgatcacccataggacagagggcagacgccttgacacatactctccttgccttgtttctgctgaggctcctgaacccccgttcgtggcttccggagcaaactccacgactgacagagccattcctcaaaccactggttttgtagctacaccaacagacccagagaaaggggccactgccttcggagaccctgccagactcagccctagcctacagcgccacacgcttactttagcctgcaaattggcttttataatatcagaatcctggctgcagtactggagtccctattttccgcccccatcaccccgcccccatccttcctttctcacactccacagctcccagcagtcagacccggctcaccgaaggcgcgcacgatcccagctccgatgccgcgcccgcccccggtcacgaccaccaccttcccggcatagcgcgttcccgtagccatcccgtgtacgtcggtctctctctctctctactctgggcctctttcacctccaaagccccgtgaggccgtcgcatcaaatcctcaatagaggctggatcctggaagtccggcctcggggggcgttgccaggaaggctagagacctggaagtttgtccccagcccctcctccctcagacactcctctcttcccacagacccaggaatccaggagccccagtccctcctcccacagacccaggaatccagaagcctcagtccctcctccctcagactcgggagtccaggcccccagcccctcctccctcagactcgggagtccagcctcccagcccctcctccctcagacccgggagtccagcctcccagcccctcctccctcagacccaggagtcagggtcccagcccctcctccctcagacccgggagtccagcctcccagtccctcctccctcagacccaggagtcagggtcccaccccttcctccctcagacccgggaatcctggcccagccccctccactctcagaccgagggatcaggttctctatcccttcttcccagagacctataagtccaagccccctgtcccttcctctctcaggacccaggagtccacgactccagctctgcccctcagagacaccagtgccacaaccccagacagacagaaagaaagctattgactaaaagttcaaagttttaatccaaatttagacagtgttgagaaaaccaaactttggccatagaaaccattcccctcccgggcccgcaatggggaccagaccacgccccctgatgccctgagtggtcccagatctccggcggtacctccagaccacgtcctcgcgctccgattggctgccgcttttgggcggattagaagctggattgtagcagagtgactcgcagaggccatgccccctcgtcttgtggcaggaccggaggggcgatcccggcatcccacgcgggcccccagggggtgggacctcctccacgcccactccctcggcgagagaaccccgtggaacccgaattagccaccgggggagatctggggggaggggtctcctggcgcgtggggtccgaaggaggcagcggcacaccgggaagagggtctccctgggagtccaaatttccacctggagaggatgagtgggacatgagaatggcaaacctcagcgctaggaccccggattcccagcccctcctccctcagacccaggactccggattcccagcccctcctccatcagacccaggagtccaggcccccagcccctcctccctcagacccaggagtccaggcccccagcccctcctccctcagatccaggagtctggatacgccagtccagtcctctttgagactcagttgtcggccctctccccgccccctgacctcttcctcccctcctcccaagtgtcccggaccccagtcacctcttgcctgagacctaaaactcccaaaccctgcccaactctttactcaccaagataaaaaattctcaccggcccccagacccctcctctccaggacctgggattccaggtctccagctctctcctccctaaaacccagaagtccaacatccccagccagtcacctgtcatcattctgtgccactgcgacgcctcagtagccagggcttgggagaggctgagaacccgctcccggtgaccttcggaagtcggcaagtaaggggtggtgttccttggactagaaaaaaaaagaagattgggggtgggggtgtgtacatgggggagaggtgggggatggttaattggtacaaaaagaaaaggatgaataagacctactattagatagcacaacagaatgactatagtcaataataatttaattgtacatttttaaataaattaaagggtgtaactagattgtttatacatcaaagggtaaatccttgaaaggggatggataccctattcccgatgatgtgcttatttcacattgcctgcctgtatcaaaacatctcaattatctcgtaaatatatgtatacctagtatgtaccaacaaaaattaaaaattaaaaaaaaaaaaaaaaaagcaggccaggtgcgacagcttatccctgtaatcccagcaccttgggaggccgaggcgggcggatcacttgaggtcaggagttcgagaccaccctggccaacatggtgaaacccagtctctaccaaaaaatacaaaaaagttagccaggcatggtggtgggtgcctgtaattccagctactagggaggctgaggaaggaga

SEQ ID NO: 1560477 - DNA, 4001 bp, Homo sapiens
gtttgcaatgcctggggagctgccccctaggctgcagaggctgcaggatcaaccctggaagctggtttctttgagggaagaggatgtctcctcccttgtgctcaccctagaggccatttgcgtgtccttcattaattcaatgggttcaggccacacacaagcacactacagaagtccctgtcctcatggaggttttgggctgagtggggacagggttggcaatgaaaacaggtaacttctcataaatgctatgaagatgagctaggaagagagaagggcatgactgggagaggcctctgcagaggtagccctggataaccatgatgtgatggacagtgggctttgcacatttcaggagactacaagactagggtgtggcaagtgcaaaggccctggggccttctcagtgatgagtgtggagtgaaggagtaaggaaggagaggattggagtggagtgagccaggaagggcagccagagaaagaggaaggagtaggcagggctatggctgcagcgtgtagaggcttgtgccccacggtgaggggcgtaagttgtatccctaagcccaaggaagacctggggaggttttttgttttttttttgagaaagggtcttgctctgtcacccaggctggaatgtagtggtgtggtcacagctcactgcagcctccaactcctgggctcaagtgatcctccctcctcagcctcctgagtagctgggactacaggtgcatgccaccatactattttttatttttttgagacggagtcttgctctgtcacccaggctagagtgcagtggcgcaatctcggcttactgcaacctctgcctcccaggttcaagcgattctcctgcctcagcctcctgagtagttgggactacaggcgcgtgcaaccatgcctaatttttgtatttttagtaaagatggggttttgccatattggccaggctggtcttgaactctgaactcctgacctcaggtgaaccacccacctcggcctcccaaagtgctgggatgaggcatgcgccactgcacccggccaatttttgtacttttttttttttttttttagagatggggtctcactatgttgtccaggatggtctttaacttgaactggcctcaagctattcccctgcctctgcctctcaaggcactgggattataggcataagccacacaccccagcccctggggagagctttaagcaaggaggtgacactgatttcagtttcgtaaggacactctgaaaatagtttgaaacacagaggtgaggacctgaaacccatgaggaagtggtcacagaggtccaggtggtcgtggctacaactcgggaggggtcagctgtgggcacgatggggaaggcagggatggagtccagggtcagggctgtgttatgcttacggtgccgatgagacattcaaattggaatagagagtggcaggtgaaaccgacctgggtctggcctggatttgcagcttgaaagccactggcctatctaaaagcatagtgtgtgcagaaaagaatgaatagatctgaggctgcttcctgagaaaggcctgctggcaaggtgggcctgcagttggtaaagttccctacggatattaaaacttccctacatgcgtggctcatacactttctgtacaagtgatgcggtttatgctaaacccctgctttctttgtaggagtctggaatcctgataagtgccaggtagagggttcctatgtgactggctccataaacacctgggtacagaactgccaactagctttcacaaaagacacattacacacctgttgttacaactcattgttgggggagttaagcatggggtgtgtgaccccactgtgagaggattctggatgcttctgtctggttgcctctggacttcactctgcatgccttttccctttgctgattttgctgtgatcttggctgtgagtacagctctctgccaagtcctagggaatgactggacctgggtgtggtcttgggaaggaccctggatagagtggaaggaatgccctggaaagccagccaggagagggcccctagaaggacctgccagggaggcaggagggacacagtggccgagctgtgtgccagaagccaggtgacgcaggctcaccatgttggccaggctggtctcgaacacctgagctcaagtgatcagcccgccttggcctcccagagtgctgggattacaggtgtgagccactgcaccaagccaggaggcttcttttcccaatttagtcttttgatgatgggtggcatctcctctgaggtggccgctcgatggggtaatccatgggctctaccatcttgtccagacccacccccagcacctggccatgtccgtgtggcctacagggaaaatgtggacataaaaatccttggactttaagatgagctttaatttgtttgttttccttaagtgcatttatcgatgtaaacagagcatgttagagattcccggggagagcagactattgctgatatgttggttttaattcaaaagaaacgatgatgccaatggtttggattgacagcagcttaaggaggaaaaaaaaaaaaagaaagaaaaaaagaaaaggctggtgacacccccctggcgtggttgacctggtcccagtcgcagtccctatgggacagcagagctgtcaaaacagaacccaatgatgacggctgaaaatcaagccagactgctgtgcggtcagcttgccgccgtggaatgccttgtgtcttggccatgtccagccaagggtacaacgtgcttgttcccgatcacccaggtttgccattggaagtcaaagacagaatcgcttcatggcactacagatgtggaaaaataaaaatctcagctagaaagaacgtccgatttggagatagcgggaggacacgaaggagtgggggccattttggtgctgagaggagggtgccccaacttcaggaggaccatgtgacggctgtggttgttttcggggtcacttgcagcacacacagcgtccccttgatgctcgatggggaccgcagacgggcctgcagacctaacccctggctgtggacaggagaggctgctccaggcttctttccttctcaatgctttacacaggatttccttcatttgtgctttcctttggtttaacagttaaaaaagaagagtgagggggcaaaatggtttgtcacttgtccaaaactgagagaagaggtggaagtgggcgccaaatctcctgggtgatgcttcctggtcctggcgatcggttgccttgctcagggtttgggagctgttgctcctggaaccaccgctggccttctgggacctcgcttccgtggtaggggacgtgaaccagcctcctggtggagctttgtgttgcagtgaggccacaaagcaaaggcccagaggcagaggcctgacactggctgtggtcgacggtcacaccttgactccctctctctctctgaatatacaacgtgtgggtgggcccgttcagcagatgttacaggaaaaatagcaaatttttaacttattccatctccaaagttgaaaaagatcagacagttactaaaataaacgatttctcaattgcattctggtggccgtgggcccggtggccgcggcgtgggcggggcgttggaggtgggagggccccggctgagtgaggggctcactcagaacaggcacagtcagctgggctgagcgaggctcagagtaaggcggtgttcctcacagaagaacacatcggaaaaagctgctcctcttctgctggtccggtgtgattttgactccctggttgctcccctgggggctgttgccttcctgaaatcacaagaggttttctgaggttatcactgagaatcagcactacgtctcacaatcaaccagccatccacctaaccatccacctaaccatccatccaaccatccaaccaaccaaccaaccaaccaaccaaacaaccaaaccaatcaaaccagccaaaccaaccaactaaccaacgagcca

SEQ ID NO: 1560478 - DNA, 4001 bp, Homo sapiens
gaggtctgtgcagtccaggacgtttggggggtggggggattgtgcctgactggcctggggttgggggagggctgtctacaccataatttggtgtcaaaatagggaagggatggaaatgtagtacccggatgtctttgtagaggactcagaaggaagtagaggaggggtcttaagtggggctatatgccaagaaagtgggtcggtggggctgagactgtcggctgagggttagggtagtgctggtagggtctggaagccggggagttgtcggtgtggggtcggaaagctggagggggtgtgagagcgagggtgtcagtggaagggtctatgttatcaaggcagtgtccaggatggaggtcagggcagaatccaggagtgggtgagaggacagtccttggcgcactcgggacatctggctgggcggagtcagatcggctttaatagagggagcctgaggaggctcccggggtgcgggcgcggcccagccccctcctacttggctgcggctggcggtggggcctgggccgacgctggtgcggcctggatggacaggacgccctcgggggacagcgcggacgtcacggcagccggatccacgccaggcggcaggcggtagcgacggtggaactcgcgcgcgacgaatccgtgctcatcctggaggggagggaggcttgagcggccccgcccctccggcccggcggcgagcgtacccgctccagccccgccccacgccgcggctcaccgggcgctcctcgtggcgcgcgtgcacctccacgtgttcgcccaccaccttgacagcaatttcctccggcgagaagtgcttcacgtctagcagcaccgaaaagtggccggggtccgtcggcacctgagcgcagcgggcgcgggcgggactgtcattgggctgggccaggctccaggacccacccagggagaccccacccccgtcggttccgtgccgcggctcactctggcctccggagttgagcagtcagctctcctactgggagtcacccaggacctcttcaccctgaacaacagggatacgccctccccctgtaatatctgggattgccctctcccccgcagtgatgaggctcccttcccctgcaaggtcaggaacctctgccctcccccggtgtcagcgaatccgaagtcatcgtgccccccagggcactgattccccagctccctcctcagagccccgggtcccttctccgccagccccgccaaactcgccaagatgcccctttccccgtctccagggtcctctgcctactctcccactcgagtcacgggacctcggcagctactggtagccttcccccacttcagagtggccgggaacccttcctcaagtcgcagggccctctcccctcctcttctggagatatcgggccaccgcacacagtctctcaactcttccccgagactaagaacattccttcccctcaggagtcactgcccgcctccttttccccagatttcccggatcaccagcctccttcagagtaagcaagactccccttagagtgacccaggccttccattctctggagagctgagagccccccaccccgccccccacctaagagcgacggggacctcccacccgctgcagtgtgcgggcctcagattcccattgactccggaagcccttcggagctgcggactctccaccccgcccaaggccaacgaacattctctcacatgttcccaccccaggctgccccagacccctggcaatggaagtggtcgagttcacccctccccaggcctggcacctgggcgacgggcagcgccacgctgggtgcgcgcaggtagtagggggcgagcgtggtggggcagagcgcagccagctcggcctccagcagcccctcgccgaagcgctggtcaaagaggcgtccgggcgccgaaagtccgggcaacggggccgaggcgcggcgcagccaagacggctgcacaggcacagggatctccatcctgctcctccgcgttgcagtgcccctgcgtgcgcagccgctcatttatagtgcgccctgtgccggcccctcggagggctgcccagggacactgggaccgtggccagacccggccattaggagagccttatttagaaacccaaacaatgacttggccatttattaagcgcctgctggatgcctggcaaatgctgtcaagaaggtgacatgaagattccccaatttccagaagaggaaactaaggctgaggagggggagccttgcgggtgtggggagcacagcgtggtgattggggcccaggacccaagaggcccacggaagagtttccagtccctttaatccactgcctcccccctggcagctctgaggatgacgcagatggaggtctttaggagcagattcctggagaatgcggtagccccgccaggatgtcaggaggacatagaacaggccctccctacccttatcctcagccagaccttgggcccagtcccccggcaggccgggcctaattctgtgcctctgactcagcctctggtgcgcagaggccagggggcgcgagcatgaacagttcaggctggccccccgggggccgcgcgctggggctggaaatagctcattttgatcccgctacctcggccaggagcccagacctggcaactgatgcaaccagctgctcctgcagcaagaaagaagttagatgaccgttgggacggactgattggcccaactgatggaggaatagcggttagagagagggcagagcgcgccccccccccaacccgccccactgcccctgcaacagaaagaatggtagttagaccggggtcgggacaggacttctgcagcaagaaggcgcttaaaaagcgggacttttaagcgagggtactttagatcacctcctaaccgcaagcccagcctcagatccttcccattggtgcacggtcttgccaattactgctacactcggcaggttctccaatcaaacacgccctgtcgggcaggcagtcgtcccagccaatcctgaaacacctccctccgggtacttctgtttcctctctttcattggtcgccttggaggccgctcgcctccggcgcgggcacagagaggggcggggctgatagggcgttgctaagcgacggagatgcgcgcggggcctgttgggtgaaggagcagagcggccggaagcgcggagggagccgcgggatggaccgcaggtgaggccgatcgctcttccagggactacaggaggctggggaggaccaacggcgagagcagcacagcctaggacgggctggatacggtctggagtcgctagggctccaccgcactggaactacaattcccaacatgctccacagccgttggcctctccagccgtagccgttagcatcccgggggtcccctaagagtcttatgttcctctctgagtgggccccaaggaattattgcctctaaaggtgtccaagaaaggcttgagatctgaatttcttcattttgaaatggcccccagacacgcctgggcgttgtctttgaactttctcgcggaggcggagcccagtggatcctggggcttgtagtccatctaccctttgccttcgtgtcccccaggaatgtatgggaaatgctcggtgatataatccagccgcggttctttctttctttctttttttttaagacagagtctctcgctctgttggcccagactggagtgcagtggcacaatcttggctactgcaacctctgcccccgggttaaagcaattctcatgcctcagcctcccaggtagctgggactacaggcacctgccaccgcgcctggctaattttttatatttttagtagagacggggtttcgccatgttagtaaggctggtctcgaacacctgacctcaagtgatccacccgcctcggtgtaatcccaaagtgctgggattacaggcgtgagccaccacgcccggcgagccgcgattcttaacctgaactccacttcgcaatcacctgggacgctgcggaaaagac

SEQ ID NO: 1560479 - DNA, 4001 bp, Homo sapiens
actgttgtaaaggttcaatgatatcatatatgtaagtgggttagcataatgctctgtatacagtaattgtcgattaaacattatatataatagctatcgctatgaatctgcaaaacaactctatgaggtatatatcattgttatccccacttcgcagatgagaaagttgagtcacagaaaggttgagacttacccaaggtcacacagtcagcaattggcaaagcctgaaatcaaacccaagcagtctaggctgggcgtgctggctcacatctgtaatctcagcactttgggaggccgaggcaggtggatcacttgacgccaggagttcgagaccagcctggccaatgtagtgaaaccccttctctactaaaaatacgaaaattagccaggcatggtggcccatgcctctaatcccagctactggggacgctgaggcatgagaattgcttgaaccgggaagtcagaggttgcagtgagccaagactgcgcctctgcactccagccgagactgtgtcctccacccccaaccctgcccccaccaaaaaaaaaaaaaaaaaacagcagtctgactacagagcctgtgctcttcatgaaaacacactgctgccttcagaagcactgtctgtatgctgggcactgtgtgcagccctacttaaagtagaacctcagaactaccctatacggtagttattattattatcaatttgtaaatgaagaacttgagattcagaaagatgaagtaatatacccaaggtcacacagctggaaatgctgaatccaggttagtctggctctggagaggatatgtcccctcagactctcttgagatctgaccttcagtcaacgataaccccatctagcacaatttatagcccacaatgcctccacacctggttttctgcctcccacccaagaagaccctagtcttcttgtggctccccaagtcacacttcccaaggcaactctatctgtccccaggcccctcaccccagcttcttgggtccccatcctttacctcctcactcatcggttctggaggagggtctggctcttcagagcccgcggtgatggccatctgcagcaagccttggaggttgcgtgggggccgggaattgcccgagcccccagccgaggagccgccgccgccgccccctgaagagcaaccctgggaggccgggggcagcgccaggggcaggcggctcccccttgagccttcgtctgacatgggccgtttgtgaagaagggaagaatgtgttagagggagaaggtggtcaccgctgaagcagctctggcgtcctgatgggtcgattcttgagggtctgctgagaaggcggcgtttcaggggagctcggcgaccccccatgaccccaaaccactctgcccccagcccacttaaccacagccccttttccttccttcatacccacaggacccttccccaaagtcataagcctctcctttctccctagcaacaggccccacccactctccctggcaacaaccccccttccccatctccactgcgtgcgtcccgtctcttagcaacctcactgctccgcctccgtagcaacaagcccgccctttggtctccttagcaacaagtcttctccctcctctccgaagaggggcgccggaataaggcggatctcacctccccgggtcctcaagccgccgctgctcctacagacaaagtcgtccgcacctgactctgctgggcgccgccatcttaaccggaaatacgcacggtttcacccggaagtgccaggcgtacccacccaacttcgtgccgtggttgcggctgaagctgcttgcccgactcttatccccttctcacctggcgggatactgcactcggccccgcccctcccatccgggccccgcctccaagctgggacgccccttcgtgcgggcgccgccccttcacgctcaagtagctggtcaaagccctgcccctggcccagttttcgcacctcagcgagtcccgcccccgatacttttgcaagctccacccctcttctaacgtgtgccccgcccccaggtctgaccccgcccaccctacgattcccgcccctgctctaggcctttcagactctcccagttgggccccggcccctttacaggcccctcccactcattgctgtcagtcatccttagaaggtttgggacctcgccccaactaatctgactttcgcctccaccggggccaccaaccccatctacaggagccctggggtcgcaaccgtaatggctggcctgtgagccttatgccccccgcaacccctctctcggcctcagtttctccatctgtcaagtggagctgcggcgtggatccctctcatcacccagcctctccctcatggactcttccccatgtcctgccaggtggagaggagaggattcttgaggcctagagccggaaagcaaagtgccccagagcccagcaagattcagagcgccagaggagccagcttggtggggaggcccgaggcctctgtgctccagaagtggggtttaggcctgggcacgtgctggtgcgggccgatctgcagaggtgttggccctgggctgggcttaaagaaactcccgtgttgatcctggataggaggcgttttcctccaggaaaaggttgtgctcaacgcaaaacgggcacacagtcacaaacgtatcaatcacctgctgggcgtggttgtgcagggggatattttgggcagaaacaggaagaccaaacagataggttgtgtgtgtatgtgtgtgtgtgtgtgtgtgtgtgtgtgtgtgtggtgtttctagcactgtgctgtgagatgcatctgggcctgtggatgtgctattatattagtttcctattgctgctgttaacaaattactaagaatgtggtggcttaaaacagcacacatttattatcttgcagttatggagggcagaaatccaaaatgggtttcacggggctgaaatcaaactgtcagcaggattgcatcacttctggaggctctcggggagaatgtttttcttgccttttccagcttctagaggccacactctttctttgacaggtggccccatcaccccaagttctgcttccaccttcccatctccatcactgactgctcctcctgcctccttctcacaaatactcttgtgattccatcgagctcacccaaataactgggataatctccctatctcagtcacatgggcaaagtcccttcagccatgcaaggtaacttatgcacagatcctgggaattaggacacggacatctatgtacaagtctatcagtttataatacatggccgggggcagtggctcaggtctataatctcagtactttgggaggccaaggtgggaggatcacttgaacccaagagctcgagaccagcctgggcaacatagtgtgtccccagccctacaaaaaaatacaagaattagccatgtgtgatggcatctgcttatatcacagctaggcaggaggctgaggcaggaggatcacttgagcccaggaggtcgaggctgcagggaactatgactgccctactgcaccccagcctaggcaacagggggaagaccctgtctcaaaaaacaaaacaaaacaaaaaaaagagggtgatcatataatttttcatctatagcaagacatttgagagcaaaaagggactcaatagttacagaaccaggccaggtgtggtagctcacgcctgtaatcccagcactttgggaagctgaggtgggcaaatcacaaggtcaggagtttgagaccagcctgaccaacatggtgaaaccccatctctactaaaaatacaaaaattagccaggcatggtggcgggtgcctataatcccagctactcgggaggctgaggcaggagaatcgcttgaacccaggatgtggaggttgtagtgagctgagattgtgccactgcactccagcctgggagacagagcaagattccgtctcaaaaaaaaaaaaaaaaaaaaaaaaaaaaaaaaaaaaaggctacagaa

SEQ ID NO: 1560480 - DNA, 4001 bp, Homo sapiens
ggcgaggaggaaagaaggagatccatcagtcattcattacaaaggaacagccattaataaagacagccaacaactgagggctgatgttccttcagtcaacaaatatcggctgggagctgtggctcatccctgtaatcccagcactttgggaggccgaggtgggtagactgcctgagctcaggagtttgagaccagcctgggcaacatggtgaaaccccgtctctactaaaaatacaaaaattagccaggcctggtggcgtgagcctgtaatcccagctactcgggaggctgcagcaaagggaatcgcttgaacctgagagacagaggttgcagtgagccaagatcaggccactgcactccagcctgggcaacacagtgagactatctcaaagaaaaaggagatgagagctaatacgtgactgctggaatttttgggggtgagggaggggagcagaggtctccttagtcacagttctaagtaaatttgagtgagctatttaatgtttctgtgcctgtttcatgcctcactgttgtaaaggttcaatgatatcatatatgtaagtgggttagcataatgctctgtatacagtaattgtcgattaaacattatatataatagctatcgctatgaatctgcaaaacaactctatgaggtatatatcattgttatccccacttcgcagatgagaaagttgagtcacagaaaggttgagacttacccaaggtcacacagtcagcaattggcaaagcctgaaatcaaacccaagcagtctaggctgggcgtgctggctcacatctgtaatctcagcactttgggaggccgaggcaggtggatcacttgacgccaggagttcgagaccagcctggccaatgtagtgaaaccccttctctactaaaaatacgaaaattagccaggcatggtggcccatgcctctaatcccagctactggggacgctgaggcatgagaattgcttgaaccgggaagtcagaggttgcagtgagccaagactgcgcctctgcactccagccgagactgtgtcctccacccccaaccctgcccccaccaaaaaaaaaaaaaaaaaacagcagtctgactacagagcctgtgctcttcatgaaaacacactgctgccttcagaagcactgtctgtatgctgggcactgtgtgcagccctacttaaagtagaacctcagaactaccctatacggtagttattattattatcaatttgtaaatgaagaacttgagattcagaaagatgaagtaatatacccaaggtcacacagctggaaatgctgaatccaggttagtctggctctggagaggatatgtcccctcagactctcttgagatctgaccttcagtcaacgataaccccatctagcacaatttatagcccacaatgcctccacacctggttttctgcctcccacccaagaagaccctagtcttcttgtggctccccaagtcacacttcccaaggcaactctatctgtccccaggcccctcaccccagcttcttgggtccccatcctttacctcctcactcatcggttctggaggagggtctggctcttcagagcccgcggtgatggccatctgcagcaagccttggaggttgcgtgggggccgggaattgcccgagcccccagccgaggagccgccgccgccgccccctgaagagcaaccctgggaggccgggggcagcgccaggggcaggcggctcccccttgagccttcgtctgacatgggccgtttgtgaagaagggaagaatgtgttagagggagaaggtggtcaccgctgaagcagctctggcgtcctgatgggtcgattcttgagggtctgctgagaaggcggcgtttcaggggagctcggcgaccccccatgaccccaaaccactctgcccccagcccacttaaccacagccccttttccttccttcatacccacaggacccttccccaaagtcataagcctctcctttctccctagcaacaggccccacccactctccctggcaacaaccccccttccccatctccactgcgtgcgtcccgtctcttagcaacctcactgctccgcctccgtagcaacaagcccgccctttggtctccttagcaacaagtcttctccctcctctccgaagaggggcgccggaataaggcggatctcacctccccgggtcctcaagccgccgctgctcctacagacaaagtcgtccgcacctgactctgctgggcgccgccatcttaaccggaaatacgcacggtttcacccggaagtgccaggcgtacccacccaacttcgtgccgtggttgcggctgaagctgcttgcccgactcttatccccttctcacctggcgggatactgcactcggccccgcccctcccatccgggccccgcctccaagctgggacgccccttcgtgcgggcgccgccccttcacgctcaagtagctggtcaaagccctgcccctggcccagttttcgcacctcagcgagtcccgcccccgatacttttgcaagctccacccctcttctaacgtgtgccccgcccccaggtctgaccccgcccaccctacgattcccgcccctgctctaggcctttcagactctcccagttgggccccggcccctttacaggcccctcccactcattgctgtcagtcatccttagaaggtttgggacctcgccccaactaatctgactttcgcctccaccggggccaccaaccccatctacaggagccctggggtcgcaaccgtaatggctggcctgtgagccttatgccccccgcaacccctctctcggcctcagtttctccatctgtcaagtggagctgcggcgtggatccctctcatcacccagcctctccctcatggactcttccccatgtcctgccaggtggagaggagaggattcttgaggcctagagccggaaagcaaagtgccccagagcccagcaagattcagagcgccagaggagccagcttggtggggaggcccgaggcctctgtgctccagaagtggggtttaggcctgggcacgtgctggtgcgggccgatctgcagaggtgttggccctgggctgggcttaaagaaactcccgtgttgatcctggataggaggcgttttcctccaggaaaaggttgtgctcaacgcaaaacgggcacacagtcacaaacgtatcaatcacctgctgggcgtggttgtgcagggggatattttgggcagaaacaggaagaccaaacagataggttgtgtgtgtatgtgtgtgtgtgtgtgtgtgtgtgtgtgtgtgtggtgtttctagcactgtgctgtgagatgcatctgggcctgtggatgtgctattatattagtttcctattgctgctgttaacaaattactaagaatgtggtggcttaaaacagcacacatttattatcttgcagttatggagggcagaaatccaaaatgggtttcacggggctgaaatcaaactgtcagcaggattgcatcacttctggaggctctcggggagaatgtttttcttgccttttccagcttctagaggccacactctttctttgacaggtggccccatcaccccaagttctgcttccaccttcccatctccatcactgactgctcctcctgcctccttctcacaaatactcttgtgattccatcgagctcacccaaataactgggataatctccctatctcagtcacatgggcaaagtcccttcagccatgcaaggtaacttatgcacagatcctgggaattaggacacggacatctatgtacaagtctatcagtttataatacatggccgggggcagtggctcaggtctataatctcagtactttgggaggccaaggtgggaggatcacttgaacccaagagctcgagaccagcctgggcaacatagtgtgtccccagccctacaaaaaaatacaagaattagccatgtgtgatggcatctgcttatatcacagctaggcaggaggct

SEQ ID NO: 1560481 - DNA, 4001 bp, Homo sapiens
gcttacggggtgggcactgtggctcacgcatgtaatcccagcactttgggaggcagggtgggcagatcatgaggtcaggaaatcgagaccatcctggctaacacagtgattagccgggtgtgatggcacatgcctgtagtcccagctactcagggaggctgaggcaggagaatcgtttgaacctgggaggcagaggttgcagtgagccgagatcacgccactgcactccagcctgggcgacagagtgagactccgtctcaaaaaaaaaaaaaaaaaaaaaagaaaagaaaagaaagaaagaaggggcttatttggatcaggtccctcagattctgctgcctccgaaggtgggaaaaaatgtctgagcccagcactgcctcactcaaagattcctgtctcagatttgttctatcttggatgggggtgtgaggacactggctccatacattctccaagggagattctgggaccattcccatttcatagagagaaatggttactcagctagaaagcagtgcgatctgggtctgagtccggatcagaacgctttgttttttgagacagaatctcgctatgtctcccaggctggagtgcagtggcacaatcttggttcactgcaacctcagcctcgtgggcttaagggattttcctccctcagcctcccgagcagctgggatcacaggcgcccaccaccatgccagctaatttttgtatttttagtagagacgggatgttgccatgttggccaggctggtctcaaactcctgaccttaagtgattcgcccgcctggggctcctaaagtgttgggattactggcatgaactaccgtgctggcctggatctcaggctttgttgagctgttaaccaagctgtcaatctcccaccctcctggttccccaaacttacaccaccatgaaagaccctctgaccccttccctcttccctagctgggctggagctgggggagggtgtgctggggcgtcccacttctcagctttgggccacggataagtcagctctggaattcccccaagtagaagcagccctggacttccccaggggcagagaggatgaggaacagaatatacatcttgaggggggtgggggtcccttaagccttgttgggttggcacagagccaagttcccaaaccatcatgatcgagtcctggggccaggtgctgcgctgggccaagataccctgccaggtggccgctataacgtttcccgttttacagctgagaaactgtaagagacgcaatctagccaagcaaggcggtggttcacacctctcatcccagctactcgggaggctgaggcaggaggtaaggctagacccccggagttcaagaccggcctgggcaacaaaacgaggcccgcccctcccctccatctccaaccccctacccttttttaaagctgcaatctatagcccaaggccacacgtggaggtatgcagggtctggattcgaacctactggctgttgcctttcaatcgctgtctctagcccctccttcccataaacagctacctaagcatgcatgacctgacccgggagccggtcctcccggggcttcggagaactggcccgacggcaatccccaccccgactcacctgggaacagagccccgagcaggaccaggagtgcgggcagcgcgggccgggggctgctgggagccatagcgaggctgaggttgcaactctgagtagcagaggagctcagcgtcgactggggcgcgtgatcctttatagcgctagccacctgggggccaaggggcggtgctgctttcccggaaacctcgcgccttcccctccggaacaaatgctgcagttatttccggactgacagggtgcccgggccgagagggtcatcctccctcgctggccgcttcagctccggaatttccaagctaaagcaatcgggcggcggtggcagggcgatgaccccgggggctgctcccggcctccacgcctcccgtttcccggccaggctaagcttgaatcacggtctacaccgcgctaagcggtttattaagtacttttaaatactgccaacttccccggagagtggagactgttattgtgtccatttcacaaagcggtaaactgagactccaggctgcgagggggtccgaactcaagtcctccctctccagcttacgcaggcctctttaatcgagtggatgagccccctgcctgggtgggggcccaggaatcctccccgggctccctccactgagggatgcccctccccctaggtcacgtccacacctagctgacacgggcatttctcgagaagcggccagagcagagccaggcacctcccggcgaccgctaaccgtgggagtgacgaagcgcggtctcaccacgtccggggaaatcggcgtcctctctctacacccgagggcactcaccccggcggcctcctcgcttcccctttcggccttggccgcggaggcgtctttacagctcccagaaaaaggaaggaagctgcgtgatccctacgcgccgagcccctccgctggcgtcccaggctccgcggggaaactgaggcagctagcttggatcttgacgagggaggggagggggacgctcgaaatccctgcctgtcgctgggaaactgaggcagcagcccccaggcgcagaggcgaggcagggagaaggggcgctcgaacccctgccctacgcgcgaggctccggcaactcgaacccaggctcatgcactaaatatgagcgggtgtttgcttggccaccgcctgtgcgtgtgaccccaagactcgacatccaccacgtcgaggctgggtactcttaagtctccgagcaccaagccgcgccgcctaaggctttcctgttgtggggcgcgcgcggcgtcgccatggagatctccgaggggccagggaggtcgcgcagcagaaggggaagcgaagggtccccggacgcgcaggcccttcctatcggggaagggggctgcgagtcactggccatccagagacgcatatttcccccgcctcggtcattcccaaggaatttccacggggatatttttttcttggggggctgaggagttctgaattcccgccccggaacggcctgagcaaagtcacagggtgggacgggggacgcccctggtcctcagaaggcctgggaaaatcctgcgccacgggttcttcctcgggcgggttccactgagctcttgccccggcccgaggtgcgcgagctcccccgcgcggcccaagtcccacttgcagccacaatggtgccgttcttttctcaacatgtggctcaatgttttttaagcgcctactgtgtgcttggcgtccttccaggtactggggacacaggaatgaacagagtcagacaaaaatccacctgggcgcggctcccacctgtaatcccagcattttgggaggccgagatgggaggatcacttgagcccaggagttcaagaccagcctgggcaacatagggagacccccatctctatgcaaaatacaaaaattagccgggtgtggtggtgcacacctgtaattccacctacttgggaggctgatgcaggagaatctcttgaacccggcaggcggaggttgcagtgagccaagatagaggcactgcactccagcctgggtgagagtgagactcaaaaaaaaaaaaaaaaaaaaaaaaaaaggaacagccaggagaacagtgtggctggagcaggcttagcaaaggagagattcgaggagaggagcgggcagggagatgacagggcagataggtgcaagttcctgtcacctgaggaggactttgttgttttgtttgtttgtttctgaaccccagtctcgttctgtcacccaggctggagcacagtggtgtgatctcggctcactgcaaactctgcctcccaggttcaagcgattctcccacctcagcctaccgagtagctggtactacaggggtgcgtcaccacgcctagctaatttttgtatttttagtagagatggggtttcaccatgttggt

SEQ ID NO: 1560482 - DNA, 4001 bp, Homo sapiens
ctggagtgcagtggtgcaattatagctcactacagccttgaactcctgggctcaagcgattctcccaccttggtcccccaagtagctgggacttcaggcatgtgccaccatgcccagctaatattttttatttatttttgtagagacggggtgtccctatattgctctgcctggtcttaaatttccggactcaagcaatcctcctgccttggcctcccaaagtgttgggattattgttggggccaggcgcagtggctcacacttgtaatcccagcactttgagaggctgatgtgggcggaacaccccgtctctactaaaaatacaaaacttagctgggcattagctggacctgggaggcagaggtcgcagtgagccgagattgcaccactgcactccagcctgggctacagagtaagagacgccatctcaaaaaaaaaaaaaagcttgttggggccgggcgcagtggcccatgcctgtaatcccagcactttgggaggctgaggtgggcggatcgcctgaggtcaggagttcaagaccagactggccaacatggtgaaatgccatctcaactaaaaatacaaaatttgctgggtgtggtggcgtgcatgtgtaatctcagccactcgggaggctgaggcaggagaatcacttgaacccaggaggcgaaggttgcagtgagccgacatcgtgccactgcactccagcctaggcaaaaagagcgaaactctgtctcaaaaaaaaaaaaaaaatgcttgttggggcccaagttaattgatttcacaactgctgccttggcatgagattgagatgcgtctctatatctctgtctctgtctctgtgtctctgtctctgtctatctttgtatctcacacacaaatgtccaggtctgagctctgggtcagaactgtggtccattctttgcaaactgagggtccccactctcctgagccattggccacttgcccacaccactacccaagaccagtcccacctccggacacgtcgactcactgtacacggtgatgttagaggagcctgttatctgagagccattgcagtacactgagcagaggatccgactgttgccagtcacgttgctgagattgaaggctgcccagcccatgccactggccaccagctcctttgatagggacgtctccaaggcgattttctcagagctgggacaatcagtactgcagttcacaaacagggaccctccagcagagagcacagggttctggggctccacccgcaaaaggaactcctgcccctggacaccttcaggaacatgaagaagtcctggtgtttgtttccttgtcccccaacccacgcatcaacaggccccaccatttaacacctctctccttgtgccgagacagaagggttcctgccttcatggtccagtgggaaaggtagaatccatcagagaccggggagaactcagaaggaggccagaagaggctctgatccagcataggaggaggtgagtcagggaaggcttcctggaagcggggaccattgcagcccgaaactgaaggctaagtaggagttagcaagtgaaagggacaggtgatcctggcagagggaagcacatacgcaaagggcaaatttcaggagttcagatggagcaggaagcatgaggggtgtgtgtgtgtgtgttaggggagagggatggcgtacaagcctatgctggggcctgaccacctgaaggctgaactaaggaaccagaactttctcccgaggatacagagtcagcggccaggtcgcagtgtggcaggatgtgaacagcgttgcgttctattcctctaccctctactgatccccaaaacgcagccctctccagccctccccggcttgactggtctcacctggggtcagcagacagcagaccagcagagtccagcaggccctgggccacaacacggatggtaccatggtggccattctgacagaggaaggtgccttcctgaggtgcccgaagggcaggcaggggaaaaggcggggcctcccactgcgacggaagcacagcggttaagattgcagaagtctggggactgcaccttgcccaggcctgtgggtggaaggggatgctgtggcccttgggggccagggtgggggacccagacggggctctgcaaagtggccagcactgctgagtctcccccagggaatgggctggtcccagttgcactgctggcccccatttgaattcacaggaaatgctaactaaactggtttcttttgttctcagcactgggaagcctgggtgggggggatgaggcatctccttctggctgaacttaggtgggtaggggaatattctgtccccagagaggaagttaatggggaaaactgtaggcaccattgtgtagatgttaaggtgggatttcgaggaaacattaaaaaacaaaaacaaaaacagaaacagaagcagagtcttgctatgttgccccgactggtcttgaactcctggccttaagatggcctcctctcatcttgacctcccaaagtgttgcgattacaggcgtgagccaccacgcctggccacctttgaagatcttgaggatacctccctatctttgaagatcttggggatcccccatcccctgcacaaagagctaaggtaggtgatttggggacagctgagtccctgagccactgtctatccaggattctacttggtttttgtttgtttgttttgagacagagtctcactctgtcacccaggttggagtgcagtggcgggatctcggctcactgcagcctctgcctcccgggttcaaacgattttcctgcctcagcctcccgagtagctgggattacaggcatgtgccaccacgcccggctaatttttgtactttttggtagagacggggtttcaccatgttggccaagctggtctcaaacttctgacctcaagtgagctgcccgccttggcctcccaaagtgttgggattacaggcgtgagccactgcgcccggccttccaggattctacttgtaactggcctttaccccatcctgttgtccccttgcccacccttccaggcagctggtcactgcattccaagggaaggcgccaaggggaccaggtgggacccccacctttgacctgcctctgacctcaggcctctgacctgccttctgggcttcacatctgagctccagagagagaggccttgttgagagccttgatggggccctgcactcacccactttccccagaccttgaggtcacagcacctcctctctcatctagagcacccccaccttcctaagcaggtccctcctctattcctctaccttccgaacaatccatttcccacctggtgttgagagagcagctaaaacccaagtctagtgtatttgtaaacagcagggaccagtagcatgggcctggtgcctgtagtcccagctccttggaaggctgaggtgagaggatcgcttgagcctgggaggtcaaagctgcagtgagtcgagattgtgcccctgcactccagcctgggagacacagtgagaccctgtttccacaaaaaaaaaaaaaaaaaaaaaagatgtcggacttactggctcacgtctgtaatcctagcagcactttgggaggctgaggtaggtggatgacgaggtcaggaaatcgagaccatcctggctaacacagtgaaaccccatctccaccaaaaatataaaaaattagctgggcattgtggcgggcacctgtagtcccagttactcaggaggctgaggcaggagaatcacttgaacccaagaggcggaggttgcagtgagtggagattgtgccgctgcactccagcctgggtgacagagcaagactctgtctcagaaaaacaaacaaacaaacaaacatatatatataatttataatacttacgtaatagtgagaccctgtctctaaaaataaaaaagaaagaaatatttgtaaataagtcatatttcttttttgttttttgaaacagagtctcaccgtgtcgcctaggctggag

SEQ ID NO: 1560483 - DNA, 4001 bp, Homo sapiens
cgtggtctcactccagcgtggtaagttattttggagatgagttctcgctccacagttgtttggcctccaggaaagcacagggtctgaaggtggggctgggataggaaacttaacatccaatcagagctgccgcgtggtggcggcggcgccaatcaggaaagccataccatgaaccccaccccgcccctgcccgtggctctccccggcccgcgctgatcccactcgataaggccagcagaaggagaggtttctgtgacacccgctggggatacacagagtctggggcttcgggaccccaggtgggccctgagtgaggaaacctcaggtgccctcagggagacaaggaacttggagaaagtgatcgcaaaaacaacaacaacaacaaaaacaaaccagttcctccgaagaagggcagtaatgcggacccttaggtcacaggacagaggctggttaaggaagcctttattgattccagagggttcccccgccaatatttatttttatttttattttatttttggagacagggtcgtgctctgtcccccaggctggagtgcagtggcacgatcaaggctcactgcaacctcgactttcagggctcaaaggatcctcccaactcagcctcccgggtagctgggaccacaggtgcgggccaccacaccaggctaatttgtgtattttttgcatagacggggtctcactatgttgtccaggctggtctcgaactcctgggctcaagcgattctcctgcctcggcctcccaaagtgctgggattacaggcgtcagccaccatgtatggccatttccccagattgtttcatattcctctttttctcgctcagccggcatagaacatccccctttacgcctgggacttcatagctaggcacttgcataggtacgcagcgcccacagtgaggaggatccctacaagggcagcgatggaaccggaggccaaagctgtgggcgcggggctccaagctgggagcagaaggcgagaattaggaacggaacacagggaggtctgtcgacccgcgtggagctcacgcttggtctgtgcgccctctcggggtcataactctctctgcccccttcctcctagtccccagggttacaggggtgcctcaccgagcatcagtgtaatgggtgccgagctgttgcggaccaccaggccgtcgagattgaggcgcgcgtggcagatcacgggctgccagaagtcgcggggtccagcagcaaactcgtaggtcaaggtcacgttggccagatccaggccggtgaagcgctccaggctttcggaatagatgacccggcttccatgcctcagggtcaccaccaagtagcccaccgggaacacctgcgtcacgtggcagcgcaaagtgtatttcctgccctttaagaccggaggctccaaaatcacgctgtggggcggttctaaggcaagggggagcctctgagtgaggtccgcgggcgctccctatagagcgactgtcaactacccttcccccacctcttccagccccctcccctcaccccagccgggaccgagcccctgtccctcactgtaggcggtgatcctggaggtggcccagcgtgtttttcctgcgcaggtcacgaggcagtgcgcgagggagctccaggccctcacgtcgagcagctggtaagacacccaacccggccctctgagcgtcttgccttgccgcagcggggtgcggaggctggaattctgcggctggggacagctgttgctgcaattgagctgcactgacttccccggctgcacagccacgaactccgggctcatgcgcacccagaagggcactgaggtcccggagggcgcgagagggctacccttggggctttgcgcccgcttagtccggcgtcccagcgcgctcccaactcccgggtaggcggccgccaaaaaaaacagcagcgacagagggaacagagaccccatggcaaaaagcccggactaaggggccccgcgccagagagccagggccggctctagagataaggaggcccgcagccccgcctcctcgactccaccctggagaggaaggggaggccccaacagagggcccgggagtactgcaaaaagggattccgctccccaggtcaagaataagattccaggcctcattagaaaccaaatgtttttttctggagaggagtctttagttttcactagagacccagaaggtcatagaaagtccgatttggaccagaacctcagggtatggccatcaacccacaatgttttcttgggggaggaagtgggaggatcaggctgtggctgcttagaaaggactccagctggatgtgacacctcccctcaactcacacaaggctgaggcagttgagaaagctttattaactaacacaaaggaagtctgggcaatgttgcgagaccccgtctctggaaaaaaaaaaaaaatcaaatttgccaggtgtggtgttgtgagcctatggtcccagctactcaggaggctgaggtgggaggatcacttgagcccaaaaggtcaagactgcagtgaaccatgattgcaccactgcactccagcctgggtgacagagcgagagcttgtctacacatacacacacacacacacgcggatgaggcttccaaagctgggagggagtcctccaataccttggcccccttccccactgcttgcaggaccctgatcactgcaggaaactggagctgcatagtgcaagctcccagtgaaatgcaaacaggacaagaggacaaggcatagcttgggcatattccctgggcactcatgtccagacatgaccgctgagtgtcattgtgaacactggcagaaatgtatgtgggtggggaggtggctaacaaaggtgtcagttttggggggaagggaggaataaggcctcactgggtaatctctgaacctgtaaccattaccagtccatatagtgcttttgtgccgatagaaaaatcactccttctggggaaaggcaggttggccaatgagaagtcccagccccatttgatctttttgccaggcactctcctgcagtgtacaacctgtacaactgtacctggtgaccttgaatgtgattaggactgggagctccgtgaggccagagacctatgttcatttagcctacataaaagacactcaataaatagctggtaaaataacaaatgaataaatacatatcatcaagggttggggtcagtagacagcagtgcccaagctggcatccgtcaggaagtgtgggcctttgtgttttgatgctacacatgtctatggagggccacttcttctgtaagtctgtggggcctcagcatacccaataggcagcaagtttcagtatttcccagttgtatgtcctcatggtggggctatgtctcccccaccacttcccctctcatcaggctagactttaacatccatcaatcatgtcttgagtcttgctccttcctcttggcttagtcatgtgactacagatcagatgcgtggcctagtgttttaggtgtgcaggtaccatggccccaaatgctgttgtatctgactgaggacaatgccctgtcctccggcgtcccagggccggtaggtgtagctgcatggcatatgtcttccactctgttcagtgtggcaccactgccaccaatatgggaaggccgaggaagaggccctgtcccgggataggttcagggaggcgtggcttgtgtgttcggtttcatgggggtccctttttgggcctgttgtagtctgtatttcttgatcttccgctggcggttatagaggtacgtgctgaggcctgcagtgcccattatgactgcggctgctaccacagtgatgatgacaatctcataccggggggctgtggggaggatacaacaggcggtgaggattgcattaggtccatggcccctgcccccacccagctctgcccgccggctcactcacagagcacattcacggtcaccttgcgggtgacctccccttgagtgctcctggcccgacagagg

SEQ ID NO: 1560484 - DNA, 4001 bp, Homo sapiens
cacttgacatgcactatcttatcgtattatcatcctcaaggcacggagggggaaacagctcagccggcgagggttgaagtcggggtcagcattcagatgtatctacctctaaacctcctaaacaccgaccgaccccactgggtccccatctcctccccacacccactcacagaaggttcggagctctctgggggccgagctgttttcaaacagtcccagtccgtgcggccgcaggtccagctcggcgcgacacgagaaattggctccatggtcctccctccgagccagtaccgtggctgtgagcaccgcgccccgcgctcggggtggttcaccggcgaagctgcggcggatcagctcctgggcgccccgcagcagggtcagcgtgaggctcgcacggggcccggcgccggggaccctacagctcagggtgaagttctcgcccaccggctgccagggaggcagcggcatcagctctacgcgatctggtcgctctgcaagggggaagagtccgcagctctttgaacaccgggacttggaacagaaggtggggcctgaaggggaggaccctgggacccagggggcggggcctgggagggagggagagtagtggagtacgcgcgtggccacccagaactcacggaaagtgcgaatgagcccacgcgcctgtagtgtgcgccgcgcgcagcggaagaagcagacgggctgagtctccggctcgcgaatgtccaccagctgccgcgccaaccaacgcaaacccctctgggtcccgtttcggcgcagcgaggtctccaggccaccgcgctccggccgagggcagttggtgctgcaattcagccacagcgagcccccgcgctccacgaacgccacgcgaggctgcaggtccgcccagaagggctcctgcgagaccgctgcccagggaaacgcgggctgagcctggggagccaactccctgacatcttagcgcccctatgtcgagtcaagggttctcagagggcggggaggaggaggagaggctgcagccagggaaagaacccaggcgtcccgcgtcctgcccaggcctccggtttaaaggcgcactcccagagtctaaacctcgagggtgtctctgggacgtggtagcagagagccatggtctccaaagcgccgatggagcggcgggaaagcatggggggagggcgtagaggagaggaaaggtgggttcttggatgaacacagcaaggctgagagaaggggacccgggatgggggatgggggatgaaccagttctcagggtcctggcagaatgccgggatacgaggagagtgcgtttgcggcaagggcaaaggagagacgaggctgggtcaaggatcaggaaggaccctacacccggtgaagaacacggagccgggacgcaaggctgggctcatggaaggaaccgcgggaacagctgagggacccggttgccagggctctgggtggagcgggaacagcgcctctgagtcagggtagttggagagatggagtcttcgcggaccgcgagtggggaagatgccagtccgtggaccatggtgcacagcacagcgtaaggaggtacccggggagcggacaggagagacactgggtctccagggcgaagggttgggtgcggaagaacacctaggatctcgaagcgggtaggggctatcgaggagtcaggaagctggggctcgggtgtgtgttggggaggagggggaaggggagaagactcaggctcgaggtgggggcagaggcgtgggagcgaggcgagggcagagctgggagggacaggaggccgtttctcaggtccagggactccgcccccgccctgtccaccccgaaccagagcggggctcttacctgagaggccgaagagccccaggcccagagcagcccagaggccgagtagcgcccggcgcagccctggcgaaggccctggcatcgccgcggcggggaaagcacaggaggcgaggagagcgcgagccgaggagctgggctagaggacggctccgcgcggcgcggcgggtggggtgtgggggaggcagagttgcgcttggggattggtttaacgttggtaacttggtttccaaggagggggcggcggcagaggcggcgggggggcgggaggcgagcgtgcgctaagctcctggccttggtgaaggcgagctggcaggagtgagcgacccctggggtctacgtggaggccggcatgatggcccagggccttctgggggcgaccacgctctctcgcgtcatccccggccgcgactctgggatcgggggatgctgggttgcccttcccaaacccctaccccagccctggctgagatgccatgataataagctggactccgagccccgcccccacatttagctcctcccaccagcgccccttagggcggggatacatttggggactaagagagatttgggaggcactggatggggaaaggacagttctaggggagggtgtggggatgcctctctcactgatccttctccttttgaccccgcggagccatacctctaagcacccctccgggtcagctcccgcacgcgacggagggggcgggacgaaagtgccagcgagccgaggacacgtgtgcgtgcgcgcagcgttcgcgggcgtctaaattagaatccgctcggctccgggtctgtatttacccagggtgcagcgggcacgtgtctactcagcgtgtgtgagctcgagccaccctggagcgcccctgagtccgccttctgctcggtgggtgggggccctgacatccacgcgagaacaagggaccgagggtgatgcttttgactccgcttccgggccccaagctttgacaccccccacccccaactccatgcgctcatctggctgggtgactaccagaacatcgtcagaattcgagtttgtgatattccctgtggaccatctgatcaccccttcccggctgccaccacatggatacctcttctgcgtatccacgtccctcaatatgtccgtgggaccctcccctccccaccattcgtggtctcactccagcgtggtaagttattttggagatgagttctcgctccacagttgtttggcctccaggaaagcacagggtctgaaggtggggctgggataggaaacttaacatccaatcagagctgccgcgtggtggcggcggcgccaatcaggaaagccataccatgaaccccaccccgcccctgcccgtggctctccccggcccgcgctgatcccactcgataaggccagcagaaggagaggtttctgtgacacccgctggggatacacagagtctggggcttcgggaccccaggtgggccctgagtgaggaaacctcaggtgccctcagggagacaaggaacttggagaaagtgatcgcaaaaacaacaacaacaacaaaaacaaaccagttcctccgaagaagggcagtaatgcggacccttaggtcacaggacagaggctggttaaggaagcctttattgattccagagggttcccccgccaatatttatttttatttttattttatttttggagacagggtcgtgctctgtcccccaggctggagtgcagtggcacgatcaaggctcactgcaacctcgactttcagggctcaaaggatcctcccaactcagcctcccgggtagctgggaccacaggtgcgggccaccacaccaggctaatttgtgtattttttgcatagacggggtctcactatgttgtccaggctggtctcgaactcctgggctcaagcgattctcctgcctcggcctcccaaagtgctgggattacaggcgtcagccaccatgtatggccatttccccagattgtttcatattcctctttttctcgctcagccggcatagaacatccccctttacgcctgggacttcatagctaggcacttgcataggtacgcagcgcccacagtgaggaggatccctacaagggcagcgatggaaccggaggccaaagctgtgggcgcggggctccaagctgggag

SEQ ID NO: 1560485 - DNA, 4001 bp, Homo sapiens
caatatttactaaacaaacaatatttgctactgctgtgaaagggggccactggggcctccagctcttcggtctctagcgtacgccagcccttgcttgtaggcggtgacccgccccgggctacgggttcccgtgattcgtaccaagccattcccccgcagtttcccgcgacaggagctccacgggtgggttcagagctcgcacggctgcgaacccggcgcgcacgacagtccccgtgaacacgtggctgccgccccccaaacaagggggccgagttccgtctccgcgttcggggaggcggggttaggttgggagctggaaacccagcaatgcagagacagagcagatagaaaatctccgccctaccctccgctacgcgccgtctctccaagaaatactaattccacttcctccaaaaataggatgcagaattgttcgaatggctccattcattcctggtgcgggccctttaaggggtggtgcgccccccgccccctttccgcccgcactggctcgcggcgccttcccgccaccagcgcccgctgacttccacaactaaatttggacggagtgacgtagggcagtcgcgcgggccgcttccggttgcccatattaggacagggcccgtgatcgccttagcggccggcggcggggcttccggggggggggcgcggaggggcggggctttgcgctccggccacgcccctccccatccccgacccgggcagccggagcaggctggagccccaggcttcctgactcgcattccagccgggtgggggaagaggagagtttcacttccttccctccaggggccaggaaggcgtgacgccaggaaagcaccccgcagcgggtaggggcgacctgagggctcccagggacgccatctcccagagacgctgcagaacgaccctgcatacacaggagacgacccgctgaggcccccttcatcccatctctcctcttcccaattatttcccccatacaaggccccctcccaggttattcctgacccctgccccacactgatcttctcaggccttgggacaccctcccgtcccgcccttcccccgcacgctgggaactcaaaagttattcccccctaaaatacccttcccaaactcgtccccattcaacgatggtgccagactgcgacgacctgccgaagacgcaggccgtccccaccccgctaaccttaccacggagaccccacaatgatttccccagcccaggcgctatctctgagaccccacgcagcaactctgacgcgcaagggggcgaccctccgaggactccctcagataacccgcccaccctccaggggagaccaggccccctatcactcaaaaaaagtgctttcccgaagctccccaacacacagcgccactgtcacacatagggacgaccctgagtccctccgctgatattcctggcccctacccagacggagaccccacacacagagggcccccctggagaccatcctcaaagccaccacccgctacccccaggctcgcacccagaaagactccgcgcttctgaagaaacccacctccacgcactttctcaaaggtgacctccccccgctgctggcatatctgggaccccctcacgaccacctcgccccaaggcgacctcgaagtgcccccaactccgccacttctcaggaaagagattgggagaatgcggcagaactccccggaggagcaggcccgctcctcaccgcgcccccgcagggagaagggaggaccacctctcccccagaccctagccaaacctgacactcgggaccctgggatgggacgatctcccaggtgccagctcagggagtccatgaaaagcttcaacgaatcgaatgagccccttccccagccataatacccagccgccagagatgagggaggctatcattatttacattgcccgtgcctggaagggaaactgaagttgcgcaggaacaatccgaggaactgggccttgaaccgaaattccgaactcggacccgaataggcccagacagaactccgacaccgccccctacggtgcggcacgagagggctaaggggcgggggcatgtgcaccggaagctgcctctgcccacaaccaagatggctgaggagagggcggaagtgtccgcacgtcgggcctccgaggcttctctttctcccctggcggtccggctctcgatggtggcgtgacgggggcgggggtggcggcgcgttctcctcggttgggagggaaccagcccgcgaacccaggccgggaggggggttcggcctgggggggaagggactgacatgtctctcgaagaccccttttttgtagtccgagggtgagtgacaacgacgggggagggcggagggtgctctgtacccaagccagccagtgcccgggtgccggccccagcgtgcccggcgggctgggcaaggccgtcggggtgcagagtgggaggcgcacgcaggggtatataggggtctccggagtcccccatgcgtttgggtttgcagtcgggggcagaggcaggcgggaggaccgcctgcccccagccgcgcccgccgtgcccctgcccgcagcgaggtgcagaaggcggtgaacacggcccgcgggctgtaccagcgctggtgcgagctcctgcaggaaagcgcggcggtcggacgcgaggagctggactggacgaccaatgagctgcggaatggcctgcgcagcatcgagtgggacctcgaggacctggaagagaccatcgatatcctggggctttgtggcagagggtggcatgggagagcccattgcggtggcagcccaccttcgggtagggctggacccctagggacggggatgatatctggctccggccttgacccttgactctcagcccacgtatagtggaagccaacccaggcaagttcaagctcccagccggggacctgcaggagagaaaggtgttcgtggagcggatgcgagaggcagtccaggtcaggaaaggtcctgcaggcggggagtgggggaaggtttgagtgtgtttttttttctttctttctttcttttttttttttttttttgagacagagcctcgctctgtcgcccaggctggagtacagtgttgcaatctcggctcactgcaacctccgcctcccaggctcaagcgattcttgtgtctcagtctcctgagtagctgggactacaggtgcctgccacgatacccggctaagttttgtgtttttagtagagacggggtttcaccatgttgatcaggctggtctcgaactcctgacctcaggtgatccacccggcttggtctctcaaagtgctaggattacaggcgtgagccaccgcgcccagcctgagtgtctttcctccctaatgctgtccttacctccaggaaatgaaggaccatatggtcagcccaacagccgtagcatttttggagaggaataacagagaggtaagccttcctgacccaccctgcccacctgagcccctgggggtaaccaagccagatccctctgtgcgtgttcacctgtcccttttgcgacagtgcccgtcctctctgtgggcagttatcttcttgctgtctacctgcctgcactttctcggtgtgtgcacctgaacctctctatgtgtatatgtccgtgggttcctctctactgtgtcctctgggtctatactggtttcctgttgcaggagagggctgggggcctgtgtacctatctcctttctgcttccatgccatttgtcctgtgtgcacctgtttccaggacgcatgcctgccttttactcttttttttttctttgagacagagtcttgttctgttgcccaggctggagtgcagtggcttgatctcagctcactgcaacctctgcctcctgggttcaagcgattctcctgcctcagcctcccaagtagctgggattacaggtgctcgtcaccatgccagggtaacttctgtatttttttttttttttttttgagatggagtttcactcttgttgcccaggctggagt

SEQ ID NO: 1560486 - DNA, 4001 bp, Homo sapiens
gacttgaatttgggtctgcctggatgcagggaaggttaccacccatgtccccctccttgggtggagtgaggggcgtcactcactagtggcagacttctctccatgtcctcaaactcttccatgcagacaatggtcaggaaggctagctccatgtcaagttcatccaacacgcaggcctggggtttggagagggggcaggagagggcatgaagagggcctagggtaccctgacaccctctcgtaataatcaccagtacccacccaggagatagggaataaagatgtgattaaatgggagcacacgaggcagaagacagagctggcatcctcgtatttgcctcctgtacgtgggacagttttcccccaccccagtgtggggccctggggccgctcacctccaccttgttgaatttgcactcctcttctccatgctggcacttgaactcccacctgccactgacattttgttcctgcaaggcagcagggtgagagcctgctggtaggctgggtcccctgctcccctgcccacgtgcctcagtttccccagcgcccacacacctgtgcgtttccgtagggcaccagcgtgacattgaggatctccatgaccaacagccatgttgggaagagctcccggatcaggaaggctcggcagccaccgcacagtgcttcatagtagagggtcacattgacaagcggtgcattggacttcttcaggggcccccgcaggtatagattgcctgtctgtggattaggaaggcgtgggaggcaggtgtagccctgggcagttccccacttctctcaaccccacttggtagtcttgtagaaagggggctgtgatacgcaattcatcttgcacgccttccagaacttgccaggtggaatcttgactttgagacttttttttttttttttgagatggagtctcactgtcgctaggctggtgtgctgcggcacgatctcggctcactgcaacacccgactccctggttcaagcaattgtcctgcctcagcctcctgagtagctgggattataggcacatgccaccacacccagctaatttttgtatttttagtagagacagggtttctccatgtaggccagaatggtctcgaactcctgacctcgtgatctgcctgcctcagacttccaaagtgttgggattacaggcatgagccaccgcctccggccttggcccatgctcatttcttgtcacttcacctggagaccttgcctctgagctgagcaagggatccacgtgaaccctttccaagtccgactgaatagaggcggcacctaataggtgctgacttccggcttcagctgaggggtggcgggtggcccatgtcgctggagcggtgagcaagtcgctcagcctctagggcatctgcctaataggtcccaaagacacgcgagccctgccctggctggaatgaatgcatcaagggtagcagcaagaatgcatgccggcggcccttggccagctgctgaacttgtgccctgggccacaaaaggagaccccagctcctgccccaaaagtacacagtaggcgctcattgaacccttgggcgggactaggcgggtggaggcagctgcgcctctcagatgcgggatgcgaaagcgaaacggcacggagggagtgtggccgcagcgccgggaactgaacagggtttttccaggaacccggcagggacagcgtcccctcggggccctggtcttcccctgtgaagtctggggagaaagaaggagccgcgtgccccgacagggcgcctgttccctccagcctgcccgccctgtcgccgtccctaccttgtagttaactggtggcccattcccaaagaagtctaacgcttgcagaggggacgcctgcaccgccgccgtggggacgtccagcagcagcagcagcggtggcaggaacagcagaagtggcgacagggtcatcgcagcaggggcaaaggtgtggcgactgcagcggctgcctgggaaataagcgcctttaaccaggcggcggtcccgcccctaacccgggcccgcctcccgatgcccacgcccctcgggtcccgggccagcgtctctccctcctccactccttcctctgagtgtcccacccccacccctgccaggtgctgggtccccagtcacgaggccattgggccccttggcaatcagccctgcccaggcacgtgagccctggcgcaagactacctttaggggaggtgaggtggggcctttgagacagacacaggctgagaggaatggtggtgtctccacgcacccctagaccttctaggggcggctaggggacttgaggcccgagacccactctcagagtgggcctgtgacctaacaggggtgacgtcggatggaggctggggatgggatggaggccggggttttgggggagtaactgaaatattcaggcccccgagagtgggcaaggcctgtgtggccaggtctcctccctccagtctcgcccgtgacctccctcacacccaacccccacatcctgcccctcaacccttcccccctcaaactcctgaccccgacgctccagacccctcaccgtggtcccgtgggactgactcaggcttgaccacagccacgccggaaagcagaagctggcgcagggagtggcgtgtcatttctctagggtacccacccagccccacttctggcttggggtgaagagaactggccttccttcttttcatcgttcaaggcttgtggggggtggggggcaacctggccttcaagggacgcccatgggggagagaggcagcctgtgctgtctgggataggggtggggtggcttggagtccacctggctttggatttgagtgacagagcctcagctttcccttctgtgtaatggggagaaggataaggtttggggaacaagagtcaccatggagggctcagaggcaggtgggggagagttgtcccaggctggggcttctggatggcatggtcaggccttggtgcctacacaggacagtggccccaacagtgaaggcagagagaatagcctggaaaaaaggcccagatggaggctggagtgttgggggaataactgagacattccaaccctgccaggccttacattcagggcaagacacatcggatcctagggaagaaaatgtcccacacccagctggaagatatacctgagtccccagctgtgcccccctctagttgtggggaagaccctggccacacacacagtagctggtttgggagccggagcttctctgaagtcccagtggctggatggtccccgagcccatccctcagacgaccaaaccgttggcaaaggctccccaagactcaccaccccaactttggtgcttaccctatgccgggtgggattgaagaaataaccataaatataattgctacaatttttccagtagttaccaggcaccagccctattggaagaaatcataaatgtaaccctacaatgtattgctctctggcttggtgccaggcatagagtgggcctacaacccattttatcattgaaccctcagaagcatccagttggggctgggggtaggtgctactgactccagctggtaacaaataaatggctgatcagagagggaaggctattttgccaaggacacacagccagtggttgagtgtttttagagaccacacgggatattctcttccacccccagctcagcatagctgggatcataaagatggcaacctttctcctgtgagcacctatgcagtgagaggcacaatctgggctggagttatttatgggttatctccagacaggacacatggcagggacagtgcctggcaaggctagggggctctgaggctaagggaggcaggtcctgtcccaaggtcccagcagtagactgggtcagagtggaggtttctttctgcacttgccccaggttcagccttgttgggccttgagaggtggctgtacaaaacagacaaggacagtgaggccccagggttggggagggctgaagggacaatgac

SEQ ID NO: 1560487 - DNA, 4001 bp, Homo sapiens
cctggtccttctcttcctgggtcactcacctttttgggggcctcctggagccggtgcagccagtggtggaggcggccccggggcctgggccctgctgtgggctgaggctggatctgtgggcagaagagggcggtgtgtgaggcggagcctgggccaccacaggggaaggatgctgctcagagcccacagacctgggtgcccgggccccaaggactcacacaggcctggagctgggagaggatgtggtgcagggtgtgaaggggctggtctaggacgtcctccagggctgggccagcagcggcctccaggaccttcagcgtcagggccagctcagcctccaaggccacagggcgctccctcacctgaggagaggtgagaaagagcaggtgagggagaacaggcaagaagacccagttagtggggacaggtaggcagtcctggggaaggtcggtgacacagtgcatgtggtggggacaggtgaggggtctggggagaaggagacaggagggggaagacatgaggaaggatacaggtgaggcaggatggtcaaggaggcaggtgaggggataagtgaaatggagacaaatgaaaggggacttacgggggtcacagaagttctctggggcggggtggggacgggtgaggagaaagcaggttgggggcacagtaagagagggacagttgcatgcacagagaagaagggtagggctgggtgtggtggctcacgcctgtaatcccagcactttgggaggccgaggcgggtggatcacctgaggtcaggatttcgagaccaagcctggccaacatagtgaaaccccgtctctgctaaaaatacaaaaattagctgggcatcatggcacatgcctgtaatcccagctactcgggaggctgaggcaggataattgcttgaacccgggaggcagaggttgcagtgaaccgagatcatgccactgcactccagcctgggccatagagcaagactctgtctcaaaaaaaaaaaaaaaaaaaaaaaaaagagaagggtggatgaggggggagcatgagctggatgaatgtcagtgagagataatgagggacaggtgacagaggcaggtgagagggagagggggtcagtgttgggaacagacagggagaagtggagcaggacgaaaggcacaggtgggcgacagactggagacatttgggagagaaatgaagagtgagagtggaagtgacagggacaggtgagcgagctagggaagtggggccgatgggagatgataaaagggacccaggggaaggacagagtcaagagagcagttttgaagtggcaggggcacaggacaggtgaggagaggtccaagagagtgaaggacaagggaaacaaagaaggctaaggggccacttaagaagaggggggagagggtcaagggaagggtgaagggggcctgactttcagctcacctggagaagcctcaggtcccaattcccggggaagacaggagagctgcaactccagtttttcagcttgagtgactcttcctagagagcaagggcaggggttagcccacagcaggatggctggaagctagctcatagcagcaaggatgaagttggcctgacagcatgggtttaacccagtgcagaaaggatagaggtttgccatagttggaaggctagaggctagcccacagtagaagggcagtaattgggacacccgtagaagtggttcatccacagcaacaggaactcaccaaggcgtccctggccttcttgaagctcgctagctcctgtggtgacagagatttgaacctgccaatgtggcagcccttcccagttgtggtgggcttggaagtggggacagggcctgccacggccaagcctagcaccaaagtcaccagcaccacggtccaagctgcagccatggctaaatcgcaactgcttccccagcggcatggctctgctttttagccacgcaaaatgggcaatccaagatgatgtgtgtaaagtgaaaaggtaattggaaatgagaatttccactttgacttaagaggcatgagtgggcggggcccgtctgggagcctgatgagggaacaggtgtgggcagggccaagtgagctgggagctgcatcaagaaggaaagagaaactgaaatccttagaactccctgggcagctttcagccaactggcctcagggagtccctgacggaggctgagattagggataaggctacctgagtggcagagaggaagcttcttttttattctaaattagccaggtgtggtggcatgcgcctgtggtctcagctactcaggaggccgaggcatgagaatcacttgaacccgggaggcggaggttgcagtgagccaagatcgtgccactgcactccagcctgggtgatggagtgagatcctgtttcaaaaaaaaaaaagcttgttttttattttattgttattattattttttgagacgtagttttgctcttgttgcccaggctggagtgcaatggtgcaatcttggctcactgcaacttctgcctcccgagttgaagcgattctcctgcctcagcctcctaagtagttgggattacaggtgcatgccatcacgcctggctagtttttgtatttttagtagagactgggttttactatgttggtcacgctggcttcgaactcctgacttcagatgatctgcctgccttggcctcccaaagtgctgggattacaggcgtgagccaccaccttactttattatttatttatttatttttgtagagataggggtctcactatgttgcccaggccagtcttgaactcctggccttaagccatcctcctgcttcagcctcgcaaagtgctagtattaaaggcatgagccactgctcctggccaagaaggagcttctgccattggtttaagaatgtcccattaactaatttcagttcatgctcctaatgtttctctgagtagttatttttataattgtgatggttaattttaggtgtcaccttgactggttaagtttatcagatagctggtgatgcgttaattctgggtatgactctggggtgtttccagaagagattggcatttgaatcaatggactgagtaaggaagacccgttgttacccaatgtggtgggcaccatccaattggccgagggcctgaatagaacaaaaaggcagaggaaaggagaatttgctctctcttatgagctgggacaccctgcacctgcccttaaacatcagaactccaggctctttggtctttgaatgctgggatgtgcagctgggcatggtggctcacgcctgtaatcccagcagtttgggaggctgaggcaggtgaatcacttgaggtcaggagttcgagaccagcctggccaacatggtgaaaccccatctctactaaaaatataaaaatcagccaggcgtggtggcacaggcctgtagtcccagctacttgggaggctgaggcaggagtatcgcttgaaccctggaggcggaggctgcagtgagctgagatcatgtcactgcactccagcctggtcaacagagtgagactccatctcagaaaaaaaaaaaatgctgggacttgcactagctaccccctaagtcctgaggcttttattctggaactgagctgcactacaagcttccctggttctccagcttgcagatggcctgttgtggaacttcttagcctccctaattgtctgagccaattcccctaataaatcccctcctatctctctctcatctatctagtctctctctctctctctctctctctctctctctatctagtctatctctctcatctatctagtctatatctctctatctatcatctatttatccaaacatcctatttgttctgtctctctggagaaccctgactaatacaataatcatgcccattttactagtgagataactgaggcataggaaggcaaagtgacttgcctaaggtcccacagtgggatagaggcagaaatggggtatgatgagtcctatgtacttgc

SEQ ID NO: 1560488 - DNA, 4001 bp, Homo sapiens
acccttcagcagagtcagctcaggatggacccatagccaggagggggcaggaaccttagtcctacagcagcaaggaacagtgatctgccaacaatgtgactgaccctggaaagagtttctcttcagagctcccagtaagagcccagcagcaatgcttggattctagcctgtgagtcccacaggagagaaaccagccagggccagcgagcctctgacctgcagactcccagctcatcaagtgtgtctttggaagatgctacttttagcgttgttatggcagcaacacaaaggaaatacacaccaacagacacacagtccaacgtcatgagtgtcttttcctttgtttatttcaacaagggttataaaaagtagaaaaataaacattttcctggaggtgagttggatttacacacacaaatacataaatagcgactgggtggcaataaattaagacaagtggctaatttataaataaaatctcaggttgcatgactggtgggagggtcagacacacaggtccccactggcaacacaattcaggtctcgcgtgaggaggcggaagaggttgaaggtgacagaggcctcgaggcagccaggggactcctgtagggaggaggggatgggtcaggggctgtctgggttctgggctcccagtggctccccagacctcagtccctctcttcccgggtcactcaccttttttggggcctcctggagccggtacagccaatggtggaggcggccccgggtcctgggccctgccgtgggctgaggctggatctgtgggcagaggagggcggtgtgtgagccggggccttggcaaggggaaggacgctgctcagagctcacagacctgggtgcccaggccccaacgactcacacaggcccggaactgggagaggatatggtgcagggtgtgaaggggctggtccaagacgtccaccagggctgggtcagtgtcagcggtggcctccagaaccttcagcgtcagggccagctcagcctccaaagccatggggcgctccctcacctgaggagaggtgagaaagagcaggtgaggggggaggtgaggggaacaggttggggagcaggatagagaggaacaagtgaaggtgacaggcacaggggagagggcacagccagtgtggtcaggtgggagcggagggaagggagagcaggtgtgaggagaagagagagagacaagggagaaagagacggtgaaggggccactacagagccaggtgagtggggctgggagagcaggggtgggcctgactccccctctcacctgcagctgcctcaggtcccaggtcctggggaagaggcgggagtggcacctgcagtccttcagcagaagcgactcttcctagacagcaaaggcacaggttagccccagcaggaggggtggaggttagaccatcctggtgggattggaggatggctgacaacaggataggggaggttaactgctgggaggatggtagaggaccctcttctacaggaaaacatgagtcagtccctacagtaggagcatgagatagcccactgcagggagggtggaggctagcccagtgaaggaagctgggagtgggaaagcatggtgacgcttggagtgggggtggaggctagtccatggcaggagggcagggggagactcactaaggcatctttggccctcttaaaggcctgcagctcctgtggagacagggacttgaactgggctatgtggcagccccttgcatccgggagagccccgtggagcctggcgacaggaactgctccagtcacggtcagcactgcggccatcagcaccagcactggcgtgcagtccccagtcatgtctgtgtcacagagagaaagggagctgaggggatggagaggctgcccactgagggcaggggctgcaggagctgagcacggacagagatgtgggactcacctagtttcattcctgatctctggtctttgtcagcagaagaaacactctgaggctgtcacccagggtctgtttgggtcttgtctggagtctctgttcttttcagtcccctcttctggatctcagactgtgtcctggctttgactctttctgtcagttttgagctctgtctgggatgtaattcctgcctgagctccatggggcagcttttatccctgacagaagggcagtcccagctgatgtaggaaaagtgaaaacacagcctcaggtaagacaccggccaccaggggagccccaggctgggaaagcccagagcagggcagggctagtgagccagatgagcagctggagggaaagagaaactgatggagactcaggggtaacctacaggaaggtatgttcccaggaggattccacctgctctggttttgttgttgtttaagacagggtctcactctgtcactggagtgcaatggcatgatcacagctcactgcagcctcaaactcctgggctcaagccatcctcctcacccagcctattaaagtgctgagattacaggcctgagccacccctcctggcatatatatatatatatattttgagacagggtcttgttcggtcacccaggctggagtgcagtgcaaaatcttgactaactgcaacctccacctcctgggttcaagcgattctcttgccttagcctcccaagtagctgagattacagatttgtgccaccattcccagctaatttttatggttttagtagagatgacagttcaccaattggccaggctggtctcgaactcttgacgtcaagtgatctgtctgtcttggcctcccaaattgctggggttgcaggcatgagccactgtgcccagaggccatgatttctttctttctttcttttttcttttttttttgagatggagtcttgctctgtagcccaggctggagtgcagcagcgtgatctcgactcactgcaacctccacctccttggttcaagggattcttctgcttcagcctcccgagtagaaaggactataggcatgcaccaccacgcccaactaatttttgtatttttagtagagacggggttttgccatattggccaggttggtcttgaactcctgacctcgtgatctgccttcttcggcctcccaaagttctgggattataggcgtgagccaccgcgcccggccagaggcatatatgtgtgtgtatatatatatatatatatatatatagagagagagagagagagagagagagagagagagcatgagagagagtgagtgagcaagagagatggagtctcgctctgttgcccaggctggagtgcagaggcaccatctcagctcactgcaacctctgcctcctgggttcaagtgattctcctgcctcagcctcttgagtagcttggattacaggcatgtgccaccatgcccagctaatttctgtatttttagtagagacagggtttcaccatgctggccaggctagtcttgaactcctgacctcatgatccaccttcctcgtcctcccaaagtgctgggattacaggcatgagcctctgagcccagccaaggccaatatttcttaattgcccaggcaaggaaggactcaggaatatgaggctctgctcaagaactgaggtgtgacgaaggacttgaaggacaccacgtgggtgccgtctttcttagggaagttcaggcagtggtgaagagcatgggtcttggagatgaagggtctggggttcaaacctggttctgaccctcactagccgtgtgaccttggcaaggaggggtgcattcagcaacgcagattgctaatgcacagatttggagaaaaaattaataacacaattgtttgtgtatttatgtgagtgattatttaatagaatccactcattaagaccatactaggacctcagttggagagtttaaaacgtgatctcaacggacactactcctccacaaggcaagtatgctaacccatcctataggtgaggaaacagaggctcagaaaagtaatttgccctgaattccactgtaattaactggcag

SEQ ID NO: 1560489 - DNA, 4001 bp, Homo sapiens
gtgccaccacacccagccaattctctaattttttatagagacaggatcttgctatgttgcccaggctggtctgggctcaagtgatcctcccaactcagccacccaaagtgctgtgattacaggcttgagcaatcacatccaggctctaaattaattttaaagatgcttcatttcacccaatacatccaaagtgctatcatttcaacatctaatgaatatataaattataattaagctgttttacttttttttttttctccacagtaaatcttcaaattctggggtatgttttacactcactgaaaaaatgaggttgcaccacctacattccaggtgctcgatagtgacatgtgacctggggaccccagtggacagcacagactcaatgaacctgctgttctagatgctacttttagggtaatttgttatggcagcaatgcaaaggaaatacacaccaacgcacacacagtcccacgtcatgggtgtcttttcctcattgtttatttcaacaaggatttcaaaaagtagaaaaataaacattttcctggaggtgagttggatttacatacacaaatacataaatagcgactgggtgacaataaattaagccaagtggctaatttataaataaaatctcaggttgcatgactggcggaagggtcagacacacaggtccccgctggcaacacaattcaggtctcgcgtgaggaggcggaagaggttgaaggtgacagaggcctcgaggcagccaggggactcctgtagggaggaggggatgggtcaggggctgtctgggttctgggctcccagtggctccccagacctcagtccctctcttcccgggtcactcaccttttttggggcctcctggagccggtgcagccaatggtggaggcggccccgggtcctgggccctgccgtgggctgaggctggatctgtgggcagaggagggcggtgtgtgagccggggccttggccaggggaaggacgctgctcagagctcacagacctgggtgcccgggccctgacgactcacacaggcccggagctgggagaggatatggtgcagggtgtgaaggggctggtccaagacatcccccagggctgggtcagtgtcagcggtggcctccagaaccttcagcgtcagggccagctcagcctccaaagccacggggcgctccctcacctgaggagaggtgagaaagagcaggtgaggggggaggtgaggggaacaggttgggggaggaggatagagaggaacaagtgaaggtgacaggcacaggggagagggcacagccagtgtggtcaggtaggagcagagggaaggggtagcaggtgtggggagaggagagagggacaatggagaaggagaaggtgaaggggccactacagagccaggtgagcagggctgggagggcaggggtgggcctgactccccctctcacctgcagctgcctcaggtcccaggtcctggggaagaggcgggagcggcacttgcagtccttcagcagaagcgactcttcctagacagcaaaggcacaggttagccccagcaggaggggtggaggttagaccactctgatgggattggaggatggctgacaacaggataggggaggttaactgctgggaggatggtagaggaccctcttcttcaggaaaacatgagtcagtccctgcagtaggagcatgagatagcccactgcagggagggtggaggctagcccagtgaaggaagctgggagtgggaaagcatggtgacccttggagtgcgggtggaggctagtccatggcaggagggcagggggagactcactaaggcatctttggccctcttaaaggcctgcagctcctgtggagacagggacttgaactgggctatgtggcagccccttgcatccgggagagccccgcggagcctggcgacaggaactgctccagtcacggtcagcactgcggccatcagcaccagcactggcatgcagtccccggtcatgtctgtgtcacagagagaaagggagctgagggaatgcagaggctgcccactgagggcaggggctgcaggagctgagcacggacagagatgtgggactcacctagtttcattcctgatctctggtctttgtcagcagaagaaacactctgaggctgtcacccagggtctgtttgggtcttgtctggagtctctgttcttttcagtcccctcttctggatctcagactgtgtcctggctttgactctttctgtcagttttgagctctgtctgggatgtaattcctgcctgagctccatggggcagcttttatccctgacagaagggcagtcccagctgatgtaggaaaagtgaaaacacagcctcaggtaagacaccggccaccaggggagccccaggctgggaaagcccagagcagggcagggctagtgagccagatgagcagctggagggaaagagaaactgatggagactcaggggtaacctacaggaaggtatgttcccaagaggattccacctgctctggttttgttgttgtttaagacagggtctcactctgtcactgcagtgcaatggcatgatcacagctcactgcagcctcaaactcctgggctcaagccatcctcctcacccagcctattaaagtgctgagattacaggcctgagccaccactcctggcatatatatatatatatatatatatatattttgagacagggtcttgttcggtcacccaggctggagtgcagtgcaaaatcttggctaactgcaacctccgcctcctgggttcaagcaattctcttgccttagcctcccaagtagctgagattacagatttgtgccaccattcccagctaatttttatatttttagtagagatggcgtttcaccatgttggcaaggctggtctcaaattcctgatgtcaagtcatctctctgtctaggcctcccaaattgctgggatttcagtgtgagccaccatgcccagaggccaatatttcttaattgcccaggcaaggaaggactcaggaatatgaggctctgctcaagaattgaggtgtgacgaaggacttgaaggacaccacgtgggtgccgtctttcttagggaagttcaggcagtggtgaagagcatgggtcttggagatgaagggtctggggttcaaacctggttctgaccctcactagccgtgtgaccttggcaaggaggggtgcattcagcaacgcagattgctaatgcacagatttggagaaaaaattaataacacaattgtttgtgtatttatgtgagtgattatttaatagaatccactcattaagaccatactaggacctcagctggagagtttaaaacgtgatctcaacggacactactcctccacaaggcaagtatgctaacccatcctataggtgaggaaacagaggctcagaaaagtaatttgccctgaattccactgtaattaactggcagggtcagaactgaaactcaggccacctgagtccctggctcggcctctttttttgctgtaaggtgcacctcacaatcatcatacggaaaacaaccaatgcgatcaaaacactctttgataactggcaataaatttaaaccgggagacagaatagcaaatgcacaggaacttcacaaatacaaacacacgtaagggaatccaaagaaccacagtcggttaaggacccttgggcctttcactaccaaatccctcatggattggtgtcccttagatgccggatccaagagtcacggattcacagaatctcaaagctggctgtggggctacaaatccggggttaggacctggtgttgggggtgtcctggtaaccacacaaggaggaactggtccctgttgcctggggtcagccacggtttccagagctcaagttttttcctgccacagcaaccgttggagggtcgtacaatgcaccccgaggaaatatcgtggcttcctggagaactgtggtctcttccctgtagaaggacccgctcctcttata

SEQ ID NO: 1560490 - DNA, 4001 bp, Homo sapiens
aagttttttcctgccacagcaaccgttggagggtcgtacaatgcaccccgaggaaatatcgtggcttcctggagaactgtggtctcttccctgtagaaggacccgctcctcttatatctgagacagtggatccaagtcaggcccaaggctgcgaagaagttttcgtgcctcagcacccattgactgagagcctcgcccggccagcccaatggacgacaggagctgctttcggcagccaatggcgtggaggtttccgtgctgccagagggggcggggtcagaggcaaggcccagagtgtgcagccagccggagctcccacgtgagcaggcgcaggaggttgaagaccacgctggctttgcggcaccgaggcgagtcctggagccagggagggagggcagcggggctaagccaggctcttccccccgcccccggaatccccctccagtcccgctgctcgcagcctcagtcccgtccttgtcagcctcgcctggtcctccctgcgggctaaccctgtattgcctgttgcactcaccgctctccggggtttgtgacgcctcttctgggccccggggaccttcctggaggagcctggccgtgccagctcaagctggaggtgggacatgaggcaaatggaaaaggcgaaggacgaagcccctctctgcatctgcccgtggccctcccagccgcagactcgagcccggatttcaggacacccagaggacccgactccggtctggatgggtttttccgctaagcaggacagattggcaaagcgctggggctcgccgtgggcctgaggatgcagagaagctggcgggggagaggggcggcggggcgcggccgtcactcacgcaggccgccacatccctccccgcggccgccagcagctccaggatcgggccggcgccggggagcagctccgagcggtgcaggccgctgagcactgcctgggcgtccgcgatgccccgggccacgtggcggagccgagcgcaggactgcggggacgagagggcgttagagcgggccgcgcccgggccatgcctctcccgcccactcccgggcctcaccgatggccgcggaggatccctcctggggcggaaggagcagttgcgctgcccccagctcagcgcctcttcctcctgcgggacaagcggcgcttatcgcatacggctaggccccctcgccagggcccctaacctctgcacagtctgggattcctggacgtggatgggtactggcagcgcacggtcgtgcctgtcgtgtactgaaccagggagctccccgaaggcgcgaaccagggttgaattgcactccgcgctcccccagcaaagcccctcgccccgacctggagccgagtcctcccggcagggctcccttctgtgattgaccctgagcctgcgttcgcgctgacgacggggactgcgggggtctcgtggtgggaattgtgggcgctgacataggagaggcgcctgctgggcgctaggacgcaggaccccttgggacaggaacgggtgtatgggaacccggtggggccagggtcccagggggcacaggggctgggcggtgacttacgtagcggtccctcagcgccttggcagccgccagcgtccggggctccagcgagcggtagtgcgagagcaggcagcgccggggggccttctgcgatcaccgtgcacaggacccacagccccgcggccactgcggcccagacactcggccgcatctctgcttctgcagcaggcgagagacgtcagggaagccaaagagagggtccagcgcgtccagccccccgccttgggttaggatcccagggaaggcaatgctcggagcgtgaaggcacagcacacacagtgggagagagagtgggagccggccccctcctcgccttggcctctgccctcactcctgtctgcagtgcaccctctgtgcctcgtgctgcagcaggtgctgccgtccactgtcccctgggaggcgtccagagccgtctccacctgggcaacagtgcctcgacggtccatgctggcttttatgcgcagggctgagaatggggtttgcagccgggctttcccgtccagggcaagctttcccaacatcagagctggccccaggcctctgggatcccagtcgggtgtgaggacttcaacccgaggttggcctgtgcccgggatggctgccctccaacactcggtttccaaattgtctctgtccctgtttctactgtctgtttcctctttctttgcttcaccctggttgtctttatcttcgttctgcaatcacaaccagcccttgtgtagtgttgactgtgcatcaggctctcttctatgtaattgacacagacatatcatctcatttttgtaccagggcagccctggaggtgtagctgagaaagagaacgcttaatttattttattttattttattttatttcagagacagagtcttgctttgttgcccagcctgtagtagtggtgcagtcacagctcacttcagactcaacctcccaggctcaagcaatcctcccacctcattctccatagtagctgggactaccggtgggtgccaccaccattttttgtagcaacctggtttcgccatgttgcccaggttggtctctaacgcctgagctcaagacatctgcccgcctcagcctcccaaaattcttggattacaggcatgatccattgcacctggcctcattattttcttaaaccgtttttttctagtctctttatctatgggtgcattgattaaaagaactgcagatgcccgaaaggccacacgagcttcaggacgcttcctttgcttattactggaggaagaaaaggctggggcaaaacaagtgcaaaccagacacagtgacccacggttacctttagatcattaatatataattatcatggtaaactccctacccatggaggaaaatacgctcaccatttgctgaacatacatcatatgaagaggcatgcttatgatctgcacctgcgtctggagttgctctctgcgcatgcttacatacctccccaccccacagctaactccttaaaatttcccagctccccacagctgggcgataaggtgttttttgttttttgttttttttgagatggagtttcacccttgttgcccaagctggagtgcagtggcgtgatctcggctcactgcaacctccacctcccgggttcaagcaattctcctgtctcagcctcctgagtagctgggattacaggcacatgccaccatgcctggctagttttttgtagttttagtagagatggggtttcaccatgttggccaagctggcctcaaactcctgacttcaggtgatccgcccgccttggcctcccaaagtgctgggattacaggcatgagctcgcccagcaataaggtgtctttagagcaagagttctctccttccccatcctagctaggaataaaacctgcttgcctttttgtttccaattgggtgttctttctttgcaaccaatgcagagtagggaaagaactgcatttacaggtgacaatttcattgtcaaaaatgacacaagcccgggtacagtggctcaggcctgtaatcccagcatgttgggaggctgaggagggaggattgtttgagcccaggagttcgagaccagcctgggcaatatagtgagaccctgtctctacaaaaagtaagggatttaaaaattagctgggcatggtggtgttactggaaaagcatcctgatccagaccccaagagagggttcttagatcttgtgcaagaaagaatttggggcgagtccacagtgcaaagcaaaagcaagtttattttaaaaagtaaagtggtggctgggtgcagtggctcacacctgtaatcccagcactttgggaggccgaggcaggtggatcacttgaggtcaggagttcaataccagcctgaccaacatggcaaaaccctgtctctactagaaatacaaaaaaattagccgggtgtggtggtgcacacctgtagttccagct

SEQ ID NO: 1560491 - DNA, 4001 bp, Homo sapiens
actagaaaaagaagtttgtagctttgagttggtctggtaagctactctgaccttctccccatagccagttggagaaagaacctccgttctttcccagtctgtctgcatctccttaacgtacatcaagaacaaacagccgggtcctgttctgtcccagaactggtgggagagggagtgcctctccgaagccctctcgcgatccccacctcctccccaccccacctgggctgctcccgatgttgtgactgggttcagggagccatggggtggtggaggctggtgtaggagggtggcccctgtcccaggtgcggccagggtcctagtcaccgagcacaaataacaaaataataaatttaaaaataaatggaaaaagagaaaataagtgtgtgcacgaacagaacaaatggaaaggcccagatgcctcagggtgacagagagaaggggccccacgtcaccctctgtgacccctttcaacagtccaagctctctaattcatgaattctacagcattcatttataaagtacataaatttattatgatcctgtgctttgctcctggatagaagagaacttgagatgatggaaaatctcacagaagggtgaagggttccccagccagccttggggtggtgccgggttgatgttggccataggggtcatcaggagggttcagagtccctgggcccccatcagcacacgcatctcatgctgtccagaattctagaaggggacctgtgggcctcctcagggcagctgcagggtgggcctcagacaggtcacagaatgaagtgggcagttgagtgtgtgtttctctggcccccaaacagccactcagcatcccagatctcaggtaacaccagcctctttctccaggcccacccaggaaggagaatccaggagtcatcgttcccctgatgttccattagctgacactggagatagtgacagagagagacactgagcgggacagagatggccagagatgggggcgagactgaacatgggcagaaatgaggacaggagagccaggaggagaggacagcggggtagagagagtgagattctgagagggaaataaaaatggatggagacacaggtgtagggaaagggagaggtggattgaatagaagcagggggcagagacagggagacaaggagaatgggggctccacccagggcagaacaggcatgcagctaccctgcacccacaatcccacggaggggacaggactcacctgcgacaaagcctgtcatccgaggtccgggctgagtcgcagttctggtttatcagcttcaccatgaaggtccaggggcagcactgctcaaagcagactctgaaggtgcagtttccacacgtctgggtcctggccaagggcacgacggcatcatcatagcaacagtgctgcagggggtcgtagaacttgtccccacatctcttgtgtggctggcacagcatcaggtaaggagtcatgggggccactggaggagacagagctggtgagatccaggaggtagtggcaggtgggtcccagcctggggtcccctggaaggtgtacccctcctccagcttcccaaacactcctgggctcacctggggctccgtgtgagcagaggagcctggagatgcagaaaatggcaaagacagctgtgggaaagggaaagggaagatggggtgagtggacagccacagatatgactggcactgacatttagaagaagactgggtggaaccagggctcggtatggctttgagcagctcagggactgaaacagggctgtggatggggctgatctgggcactatggatggggaattgctgtgagcaattcacgcctggagatttggctgggcatgggaacagggatgaggtgtagtttggggtagggagagagccctggtggtggctgagattggagatgggctcaggtgggaatggggtcctgtcctccttacctacgatgcagcctcggggagccatggctctgggtggttgcagtggagtgaggaggggatcagcagatctcagccactccttttatcccatatttctagtggagctggtgatgtcatggcatttcctgccctcctgcaagtcctgcagagacaggctgggtccttgggcaggagaggtgccaggcagggtacgtgtcattgtagctttgatctcacctttgtaatcaggagagaagcggtacaccctccaccttctctgtgctatgtgccccaatcgtcccccacactgagtcctctggaaaataggaaggttcaggatgctcctggcattaacactctccgacactcacatgtccacacagcgattccacaggatcctactgagctatgactttcctcagtttccttgggacattgctaacccatgacatcatttcaaagggtcccattaggtcccaacctcacaaccgaaacacatggtcaagaatccagtaacttctcagtcacctgcagctcatggcattcaggtgggagagactgtgtgactcaggcacctgactttcacaggtttggaaggtgggagtggagctggcgggacccctgggactcaacactcctctgggggctcttcatctccttctctgtctcattaatggtcatttacccaggacaggtccacttgggagcctacatgtcccaggcttcgtgtcagacaccagtgatgcagtgctgagtagaaaacgcaaagtcagtgtcttcgtgacgttcatgacagtgagaggagagagagagagagagaaggtaggagaataaaactcctgattttggttattgtcgttcttgtgtttggtgtcattatcactgtgaagttctggtggagaaattccacatccccccctgagattctcaaaggtgtttttccttaatgtgctttttcagagggttgggttgtgattttccctgagaagagccatcttggggtcaggatgtgaggacagaggggaaggagctgttttgggtcagttctgtgcccccctacccctgcccagcttctgcaggaattcctccgctcaagctcacaggccacacatggcatggacaagccgttctcctccgggccaggcaaggtgacctgtcaccctctaggcaccatggctggctcctagcagggcatggatgtggttagatttgtgtgtgtggaagatcctgcatctgtgttcctggggagcacggataggggcttctctctggaggcaggagacacaggaagaggctgcagagaaatgacttcaataaataccagagtgctcagcacccaccttctccctcgacagagcagaccctgcttccagcaccatctccctgtctgctcccttggcctctgttccttgctgctgtggggtacagcagtgttttctaggacacagattaggatgtgctagtagcatggaaaatcaatttacttgggcataaacaatgttatttttaagtgaagaaatgggttagaaaatgggacagtgtgcattcaacagaatgctgtgctcaactgtttatgacactttaaaaaaaattatttatttttttgagatgaagccttgttcagttgcccaggctggagtgcagttgcacgatcttggctcactgcaacctctgcctgccaggttcaagtgattctcctgcctcagtctctgagtagctgggattacagatgcccgccaacacacccggctaatttgtgtattctccatagagatggggttttaccgtatttgccaggctggtcttgaacttctgaccgcaagtgatctgctcacctcagcctcccaaagtgctgtgattacaggtgtgagccactgcgcccagcctgtttaggaccctcttattgggactgtgtatattccaagtaatgatagaatattattatattgttctatcgtatgatattattatatgatagcatagcacatatctagaactagatatctagtttctggagggagtcacagccaaatggtgaggacacttgggagcacagaagcctccaggat

SEQ ID NO: 1560492 - DNA, 4001 bp, Homo sapiens
tcaacagatgaatggataaatgaatgctgatacatggatacaattgaatttattcagttgtaaaaaggaatgaagtactaataaattctataatggggatatgccttgaaaacattaagttaaaaaaaaagttacacgaaaggtcacttataaatggtgtgattccatttatatgaaatgtcccagataggtaaatccatagagacagaaagctgactggtggttgccaagggtgagggtagaggggaaagagaggaacagctaaatgggcatgcggtggtcgggggctatggagccaggtgactcggaggtaaaaagcaattctggaagatgactgagctactcttccttcaacttgagagaggaaggaagagaaggaaggagaggagggaaaagacagggaggggagaggggaagagaagagagggggatgtgagacagagggacacagggagatggggaggggagggggagggggagaggggaagagggggagaggtggaaagggtgaggggtgagtgggaaagagaaagagagagagagagaaaagggagagagagaaaagagagggagagagaaagagagggagagagaaagagagagagaagagagagagagagaagagagagagggagagagagagatggttgcccaaaaagaagttagtgaacacagcaggcattgctcatcttgatggaatacacacaacaaaactcagtccactgcctgggctgcccttacttacccagcacactcctggggtagtcggtcctcatgcctgagacactgaacctcatgatttcctggcgctgagagcccaggaactccaggcaatagtgcctgggctacagggctgggtctggttcgagggcaggatgatcccctcatcacagtcccaacagattgcagatctagtctccactcctgagtgtcaactggcacaaccacagtccaatatctggaagagtcagagctgatgagctggcaggggacctctgggagcccccaaccctatccacagtgctataatcctccctcctttcttctccctccactcaccacacccattctcacctatggtcccttctgagtctgagcccaggagttcaaaaataaagatcagctgagagaagaatgacagtgattctggggtcaccagatcatgatcatggggcacaagatgatgtctctgagtttctttggttgctgtaacagctcagagcagattttgggactgactctgtgtgcaggttctgggcattgggcttggcaggtgaggaaatgcagggagggctctggaaagggttaagcttctggaatttgcaggtggggaagagagattgcaatgcagtcagagaggacacgggtgattatgaggtgggaaaccaagaattaaatagggaagagagaattaagtttgaggttcagaggtacattagggataacagtaggcattagctcaacctggggcaagggttaccttaccgaagattctgggcaccatggagcttcagagcagctgatgggacagcagcagtgcaaatgggtcagtgactttatacagggacttatgtaggctatgaacttatccacatttagggaggtgcccagaagcactggcctcttggaaagggtggggcatgagaagccacagaaagcataagaaaaaactgcatcaacagcttagtaagatgttcctggacctgttccaagtgactgctaccttctcagacctctcgaaatctcagagtaaaggcttccctagaacctttcaaagccgtgagtgagtgtcattctttgaactctgcccacggcaaagagacttgaaagagattccttggctctcacttatctgagagcatactactcaccaaacatcacagctggtgatgaaacttcatattcatccaccctgaagtttcaaggggtccctctactccccatctcagtccggctccagacctgcactatgagaaacaaacgcacccgtccaaacccaaagaatggactcagagacacagaaaacagtggaagcaagacttttaatgatggtcttgcaagattgaatgtctggtaggcaggcacacccagtacggttacaacaagctatttatcccctagtgcacaagtctctcccctggttcctcgtaggctaagtacgatggggtcacgatcttcccagacgtcgcctattggttgctgggttgaggcttttaggtgttttctttaggattgtctcactgcattttgttgcagcctataatacattgcaatcaaagccagctcgagggcttttcaagtatttgacttatgacctaggcagtcaggcaagctgataagaatagataaagtgagctattttgctggctagtaaactttcattctagactaaactctggtttgggagagggtaactaaggggaccccgacaagcatgcaccagctatgggcctagtatattctgtccttccatagtttgtgggcctcagcctatctgaggtactttgtcttggaaatggaccaccatatccattattataattgtagacagcactgtctataattcttcagagtcatttaggggaaactgtgaagatgcagcataatctagaaaaagagcaggggctgtaaaaaccctgccagggagaacagaaaaggaacagacagtgataaaatagacatctgggattcatagaatagatggaaaggcagcccctttttgttgttgtttctggagtgctttgtccaaggaaacgctccttctgtgtttcttactgttattttattgtcaccatcactattatttgtgtcactggataccatgtgggctattattagaatgcgctcctgtgttttccattgacttccttcccatcccacagtgagataggtgggagggtgagacagagatcaggagaggtgttagggctttataaaagtgcattgttagtagaagagttctggacctgataagtgaatttagaaaggttgtagcgtatgaaacacacagaagtcaattgtattcctttatactggcaagaactagtggatacaataatttaaagaaaaaaaatgccatttacaatacccccctccccaaaaactgaactggtatactgtaaatctaggagaacatataaaggatgtgtacgattaaagtattcaaggaaaccttaaatacagagtggtatatcatgtcgtggtttggaatctgtaatttaggtaagatgccaattctttccaaattatctacagatttaacacaattccaatcaaacccaagcaggatttgtctgagagagaaacaaaataactctagaatttatatagaaaagcaatggaaactagaatggccaacacaattttggatgaggaaagatggtagaggactcacactatccaatttcacaattactcaagctacagtaatgacaacagtgtagtattggcaaatggatagacatggatagacacatagatcaaaggaacagaataggttccagaaataaacccaaacaaatatagtaaattgtcttttggcaaagatgtaaaggcaattcaatgggggaaaagatagtcatttcaacaaatggtgtgagacaatgggcatgcatatgaaaaaaaaaaagaagacttctaccaaagctcacactctatacaaaagttaactccaaatggtctagatatgaaaagtaaaactacgtatttcaaggagaaggcatcagagaaaacatttatatctgggaaaagacatcaaaagcattatccattttttaaaaacagattggacttatcaaaattttaaagttaaacttgatgaacaaattgttaagtgaagcaacagacaggctaccaactgcagaaagtgtctgtgaatcacatctctaacataggacttgaatccagagtatatgaaaaactctcaaaactcaaagtgaaacaacaaacaaaatcattaagcatcggcaaaatatctgaacagatgctttacaaaagaggac

SEQ ID NO: 1560493 - DNA, 4001 bp, Homo sapiens
aactaaataataataaaataaataacccaatttaaacatggaaaaatctgaataaaccttttctcaaaaaggaatacaaatggccaataagcacatggaaaagacactcagcattgttatttaccaaggaaacgcaaattaaaactacacaggatatcacacccacccacccagatgactgtaataaacaggaaaatagaaaataacaaaggttgaagaatctggagagaaatgtgagccctcatacactgctggtgggaatgtaattgatgcagctctgtggaaaacagtttgccaattcctcaaaaagttaaacagaattaccatgtggcgtagcaattccactcctatgtgtacacccaagataactgaaaacaggttctcaagcaaatacatgtatacatatgtttgtaacagcactattcacaatagccaaatggtggaaacagcccaagtgtccatcaacagatgaatggataaatgaatgctgatacatggatacaattgaatttattcagttgtaaaaaggaatgaagtactaataaattctataatggggatatgccttgaaaacattaagttaaaaaaaaagttacacgaaaggtcacttataaatggtgtgattccatttatatgaaatgtcccagataggtaaatccatagagacagaaagctgactggtggttgccaagggtgagggtagaggggaaagagaggaacagctaaatgggcatgcggtggtcgggggctatggagccaggtgactcggaggtaaaaagcaattctggaagatgactgagctactcttccttcaacttgagagaggaaggaagagaaggaaggagaggagggaaaagacagggaggggagaggggaagagaagagagggggatgtgagacagagggacacagggagatggggaggggagggggagggggagaggggaagagggggagaggtggaaagggtgaggggtgagtgggaaagagaaagagagagagagagaaaagggagagagagaaaagagagggagagagaaagagagggagagagaaagagagagagaagagagagagagagaagagagagagggagagagagagatggttgcccaaaaagaagttagtgaacacagcaggcattgctcatcttgatggaatacacacaacaaaactcagtccactgcctgggctgcccttacttacccagcacactcctggggtagtcggtcctcatgcctgagacactgaacctcatgatttcctggcgctgagagcccaggaactccaggcaatagtgcctgggctacagggctgggtctggttcgagggcaggatgatcccctcatcacagtcccaacagattgcagatctagtctccactcctgagtgtcaactggcacaaccacagtccaatatctggaagagtcagagctgatgagctggcaggggacctctgggagcccccaaccctatccacagtgctataatcctccctcctttcttctccctccactcaccacacccattctcacctatggtcccttctgagtctgagcccaggagttcaaaaataaagatcagctgagagaagaatgacagtgattctggggtcaccagatcatgatcatggggcacaagatgatgtctctgagtttctttggttgctgtaacagctcagagcagattttgggactgactctgtgtgcaggttctgggcattgggcttggcaggtgaggaaatgcagggagggctctggaaagggttaagcttctggaatttgcaggtggggaagagagattgcaatgcagtcagagaggacacgggtgattatgaggtgggaaaccaagaattaaatagggaagagagaattaagtttgaggttcagaggtacattagggataacagtaggcattagctcaacctggggcaagggttaccttaccgaagattctgggcaccatggagcttcagagcagctgatgggacagcagcagtgcaaatgggtcagtgactttatacagggacttatgtaggctatgaacttatccacatttagggaggtgcccagaagcactggcctcttggaaagggtggggcatgagaagccacagaaagcataagaaaaaactgcatcaacagcttagtaagatgttcctggacctgttccaagtgactgctaccttctcagacctctcgaaatctcagagtaaaggcttccctagaacctttcaaagccgtgagtgagtgtcattctttgaactctgcccacggcaaagagacttgaaagagattccttggctctcacttatctgagagcatactactcaccaaacatcacagctggtgatgaaacttcatattcatccaccctgaagtttcaaggggtccctctactccccatctcagtccggctccagacctgcactatgagaaacaaacgcacccgtccaaacccaaagaatggactcagagacacagaaaacagtggaagcaagacttttaatgatggtcttgcaagattgaatgtctggtaggcaggcacacccagtacggttacaacaagctatttatcccctagtgcacaagtctctcccctggttcctcgtaggctaagtacgatggggtcacgatcttcccagacgtcgcctattggttgctgggttgaggcttttaggtgttttctttaggattgtctcactgcattttgttgcagcctataatacattgcaatcaaagccagctcgagggcttttcaagtatttgacttatgacctaggcagtcaggcaagctgataagaatagataaagtgagctattttgctggctagtaaactttcattctagactaaactctggtttgggagagggtaactaaggggaccccgacaagcatgcaccagctatgggcctagtatattctgtccttccatagtttgtgggcctcagcctatctgaggtactttgtcttggaaatggaccaccatatccattattataattgtagacagcactgtctataattcttcagagtcatttaggggaaactgtgaagatgcagcataatctagaaaaagagcaggggctgtaaaaaccctgccagggagaacagaaaaggaacagacagtgataaaatagacatctgggattcatagaatagatggaaaggcagcccctttttgttgttgtttctggagtgctttgtccaaggaaacgctccttctgtgtttcttactgttattttattgtcaccatcactattatttgtgtcactggataccatgtgggctattattagaatgcgctcctgtgttttccattgacttccttcccatcccacagtgagataggtgggagggtgagacagagatcaggagaggtgttagggctttataaaagtgcattgttagtagaagagttctggacctgataagtgaatttagaaaggttgtagcgtatgaaacacacagaagtcaattgtattcctttatactggcaagaactagtggatacaataatttaaagaaaaaaaatgccatttacaatacccccctccccaaaaactgaactggtatactgtaaatctaggagaacatataaaggatgtgtacgattaaagtattcaaggaaaccttaaatacagagtggtatatcatgtcgtggtttggaatctgtaatttaggtaagatgccaattctttccaaattatctacagatttaacacaattccaatcaaacccaagcaggatttgtctgagagagaaacaaaataactctagaatttatatagaaaagcaatggaaactagaatggccaacacaattttggatgaggaaagatggtagaggactcacactatccaatttcacaattactcaagctacagtaatgacaacagtgtagtattggcaaatggatagacatggatagacacatagatcaaaggaacagaataggttccagaaataaacccaaacaaatatagtaaattgtcttttgg

SEQ ID NO: 1560494 - DNA, 4001 bp, Homo sapiens
gtcagacaacttactgttgcatggaaaaatgccccaaaaaactgcaatggtttacatacattttacattacacgtattacctcttaaaacccccaacagaataaagtcttagcaaacacaaattttaatttctgaacacccttccagtaagattgtaaaggtgggaggaaggggaggaaggacttgttttttgtattcctagtctacttgattaaaatgtaatcttccaagggtttgtttagctcactatccagactgctagggttatgatgaacattattacttctttccagggtaaaaaaaatgacatttgaaaataatgtaaatgctatgacatgattttcccaagcatgacctcaacttgaaacattagattacttaagaattctaaagattggtataccaccactgcaccagaatttttaattattccaacagctacaggaattttttaatagtttttttaattttatgaacttaaagctgaagaaaataaccgatttagaaaccataataaaaggacagatatttagccagagatatcagttcctcctgaaaaaggatactgacctcctctcactgcagtttttctccaggtatcttactgatttcagatagaatttaaaattcatcttaaaaatagaaacaaaaggactacttaaactgacattaactaataaaaatatgctcaaatttactgacagaatcatggacacttcatacaatacttagactctaccagttttaagtaaagtaaggaaaaaattataattacaaagccagtctttccccttggggaaacaaaaaagccacttttgaccaattgttccctgcatatacatatactgtatattattataagcttcttcagagaagcaaaacatctttgtcttcctgacactggattatttagcatgtttttttacatcaggaaggcaactgcactgcttgcatttttctaccagctgagtgtctggtgatagctgggtgcaagaagattgtgagttatttatgcaggaggactgtttgtcctcgaccatgaagaaaggcagacttatagcttatctgcttcttctttttgctttcccctgctgccaccagcctgactcttttgccgttagaactccacaaacaggagttcctcttcaagccctctgtatccctcatccctccctcattcctttagttaagagcaaggtagggacctttacctggtacagctccgggagatgggagataagtgacactgagacttcatacccagaaccctcaacttcacaagaaacttctgctgggggccaaaagactcgggacagcagagctcaaagcagggccagaaggtgcaggtggagccacagcggcgggtctcctttaaggataagatggcatcatcataacagcactgctctgaagggttgtagatcttgttcccacacctgggtgtcggctggcacagccacagtcctgagccaacaggagcgtctgggggcagacattgatggtgtacatccaaggaagaacagatactcaattcccagtctcttttcccaacaccacctcttccctcctcatttttccctgtcctgtccttacctgtagttccttttgaacactggaggaggaagactgttatccagcagacaagagctaagggagaaaggaaaaaggttgaacatggagctgagaatgtgacaagtatggaaaaaacaaacaaacaaacaaacagaggttagggtggtttaaaggtggagattatcacttggggctaagtctgtatgggatcccgttcaggcaggccctgagcagcacgctcagtcaccctttgaggtgactagtagggcacaggaggctggaataatgttagagataaagaggaataaatcgggttgaggtttgggagctgcactgggaatgagatgagatgatgtttggatttggggtcctacttgcccaagatgcagcatcgtggcctcatgcttccaaagatgctctaggagaattgaagaagagtggtaaaaggctggaacttatggagacagcctaaatggggttgtctgttaacctggtaagtttactgattggatggctgctgatcatgccacctgcagtctcccaagcacattccttgaagataaccaaagtctcccaagcacattcattagtttctttaaggaggagactgggtggcgtaagggaccacagagccgaatgttgcagactgactcattgcattctccatatactattgcagacctcagggtgaatgagtgtaggttggtcctactccaagttaggcttctaagagttttcaagctccgacattgaggagacagtgcccaactaagctccaatcagagagaatgcttcagccacttccccatctggtttcacatcctccccttcctaatacttgcttcttctatattccccaagcacgatgtctctggaaatgtcaaggggaccgtttatgaagccactttattttttgctctggagtcattagagttgccacctgctctagcagttgagccacggctctggaaactccaataaagggggtaggggtggagaatagcaatggcccaaatctcctggtgtgcttggtgtgaggattcagagacctccagcatcttagttacatggtcagggaaagtactaaacacctgcttttcataatcatattatattagtggccaatgataagtgatgtagtacttaggagtgtgtagtacttaggtgtgcagacagagggaagggcagggcaaactgaggcctgccaggcaagtgccagctagggaagggcttggacaaattcaaataatcccgaagctgtggaaaggacctcagtcttcatggatgtgtgatgattcaatcagaaaatgtctaaggattggccagactttccatcctccacttgctggcacagcatagggaagagttgctgacttaagttcatccagcctgtaccatagcctttgaaatggttctccttttctgagcttcattcttagcttcctgtacatgtgcggaggtgtggggtgtggtttggatgcacaaggctgctctcccctaccccggaacctaagaaggccaacaatgtgaagattcctagtgagcccaggctgtcagcttgtttactaccaaatgttaaaaagaaacgtttgagtttgattaggtaaaatacaaaggacaaataataatatctttaatatacaattatcattcttattccaaatgaaacttcagctttactattgggcattgggaagttaatgtgtacttaatttttcatcttacagaagtggcaaggggcagcttgaagggataatttttaatgcattttataatgataatcatttagagaaatccttatgttgtatctcattaacactaagatgttattgaaagatacactgttgttttgcaactctaagatgcaatctcatcacttagaatgtttattaacagagcttcttgcaacatgttgagacgtagacttttggaaggcgaatagaaaaataaaaatatatgggaaataaatctgttaaagatttcttaaaatgtctccacatttggagactgcctcctgtgaatcatctttcaaccccagattggttcctgtgctttcttacacaacatcattctcagttctaccaacagcattggtcatgcaaagtttggttttattctaagctgctgacacccatactgcaagttatcattgaactggtgacactagccccttctttctttgaattttctttcatctattcctagagattttgacaactccttctgcctttcattatgttgttttccttgtgctaggcaatccttctgtgcctgtctcagaaacaaaatgtgatactcttcatctctttatcttcttgtgccccataaagcacttggttgttgatctgcaagaaaatatgtacttgggttcattcctaaaacaatgagcatgtgcttcattaacagtaaatttacgtcatcgtcttcta

SEQ ID NO: 1560495 - DNA, 4001 bp, Homo sapiens
ggttttaggtctaacgtttaagtctttaatccatcttgaattgatttttgtataaggtgtaaggaagggatccagtttcagctttctacatatggctagccagttttcccagcaccatttattaaatagggaatcctttccccattgcttgtttttctcaggtttgtcaaagatcagatagttgtagatatgcggcgttatttctgagggctctgttctgttccattgatctatatctctgttttggtaccagtaccatgctgttttggttactgtagccttatagtatagtttgaagtcaggtagtgtgatgcctccagctttgttcttttggcttaggattgacttggcgatgagggctcttttttggttccatatgaactttaaagtagttttttccaattctgtgaagaaagtcattggtagcttgatggggatggcattgaatctgtaaattaccttgggcagtatggccattttcacgatattgattcttcctacccatgagcatggaatgttcttccatttgtttgtatcctcttttatttccttgagcagtggtttgtagttctccttgaagaggtccttcacatcccttgtaagttggattcctaggtattttattctctgtgaagcaattgtgaatgggagttcactcatgatttggctctctgtttgtctgttgttggtgtataagaatgcttgtgatttttgtacattgattttgtatcctgagactttgctgaagttgcttatttgcactccagcctgggggacagagtgaaactctgtcacaacaacaacaaaatcaatgcagtataattaccaagtattagattctagagtgatctgtgactctgctaccccagaacagtctagatgaggtcagatcttgacacagggctttttgggtggtattcctgcagaaggagagaagtgggagaggggaataagagggagggtggtagcagcagtggcggggaaggaacagagacatggagaaagacagagttgcatggttactgagagatgggaaggtatggaacccagcagagactgcacatctgggtgggacatggacaaccaagctccattccctactcccccctcccacagcctggactggagtcagatccttacctgggcacagatcctggtgataggggaggacttgcaatctggcttcatgcctgggaccttgaacctcacaactgtctggttctgagagcccaaagactccaggcagcagtgctggaagcagggccagaaggtgcagctggagccgcagagccgggtctggttcaagtctaggatgacaccgtcatcacagcactgctccaaggggttgtaggtccactccccgcacctgggcgctggctggcatagccacagtctaagatctggaagagtcggggctggatgggctgcaaggaccagcctaggaccacctccccaccaaccttaatgctgttctctcctccctcactgcatctgttctcacctgtgactccttctgagtttgaacccaaaagttcaaaaatgaagatggcagctgagaagcagaaggagagcgagaatgattctgaggtcactaggtcttgaccacggggcacaggatgatgtctctgagcttctctggttgctgttaacagctcagagtggattttgggactggctgtgggtgcaggtcctggggactgggcttggcaggtgaggaaaggcagggagggctctgggaaaagttaagcttctggaatttgcagttcaggagacagattacaatgcagtcacagatgacatagcagtgattatgaggtgggacaccaataattaaatagggaagagagaattaactttgaagttcagaaataattagggatgtgatatcattagggattagcttagcctagggctggggtctccttaccagaaattctgggcaccatgggttaggcttcagagcagcggacgagggagcagcagtggaaatgggtcagtgactttacataggggcttatataggatatgaacttaccgccatttagggaggtgtgcagaaggagtggtttcttgggaagagttaggcaaaaagagctgcagggaacataaataattcatcaaaagcttaatgagatgcttctggacctgttccaagtggttgctgcctcctcagacccttcagatcctcagggtaaaggctacccaggaacctatctaagctttgactctgctgagtgtctttctttgaacaccgcccaagggaaaaccacttggaagatattccttaactcttgcttatctaagatcaaattactcaccaaacaccggctgtctctaggctccccatattcctccaccctgaagtttcaaggagtccctctactccccgtctcagttcacctgcagacctgcactgtctataatttttcagagtcacgtaggagaatttgtgaagttgcagcataatctagaagaacagcaggggctgcaaaactgtgccagggagaacaacaacaacaaaaataggcggtggtaggatggatctctgggattccagataggaaagcagcaccttttttttttttttggtttgtggagtgccttgtccaagaaaatgctcctgtgtgtctcactgtgtgatgggattacatgtggcgtatttttagagcatgcccctccattttccactggtttcttccctgtgtcacagtgagaagggtgggagggtgaaagaaggataaggcacaggtattagagctttgtaaaagtgcattgttagtatagactctctagagtctcttcctcctccctcctctctctctttttttttttttttttttgagacaccgtatctctctgtctcccaggctggagggcagtggtgctatctttgctcactgtaacctttgccccccaagttgaagccatcctcccacctcagcctcttgagtagctgggactacaggcaggcacctcctggcctggctaatttttttgtatttttcatagagttagggtcctacaatgttctggtcttggaatcctgagctcaagcaatccacctgccccagcctcccaaagtgcattgattttgttgttgttgtgcttatttgcactccagcctggcctctcctttcttgactggatgtccaagtcttcggtattgatttcatgcaataaactagctctcctcgcctatttctgcagttgcgtatttgcatagatatgtctgtttgtctgcttatcaatatgccttctcctttcccacacatccaaacagaaatcccacctgtaaagacacattctctcacctacacagaacagctgctgcggaaacagacctataagaactacattcctgtttatcaagttaagtagtgtgaataccgcattataactccgagccagcaaccaagaaatttatgaccacttgaaagggaaagctgcaatgaagagtacaagtgactaaggagggaaatcccaaagctgattactagaattgatctctgtataattgaactatctatgtagaaaatcccacggaacccactgtcaagcaagaggtgagtctgacagattctgttagtgacaaaaacaagctctttttagattcagacactttattacttacacagacagggaaagaaagagccacaggtgccagcaccatgtcccttatacagggtgacactgaaacaaaagggccagatgactgaacaagaataataggatgcctgttgctgagtagagaatccagcctgtggctccatggtatagggaggtagaaagcctcatccctccctagaagccagaggcagtgagaagctgtgtcatggcggcctcccttatccatagggaagtgagtgacaagtgatgctgtagcagcttcccacaagcctcccatgacctcacgttctgggaagaccagagagtgttctgccatgacatacatcagctacagttaatttcaccaacgtggcccacgtggagatgtttgaggt

SEQ ID NO: 1560496 - DNA, 4001 bp, Homo sapiens
ggctacatagctccgcgccgtcggggttgcactgcccagaagaacactttcggaacgggggcgttacgaaatcgccgtggtcattgagtccgcagttttcccggaactcatagtctagcgggaaagctgcgctccagtgcggccgcctagcccgcccctgcgcgggcaacgccctctcccttcgccctatcccagcgtgccccgcccctccaggacgcttccagcctattagcgtgcgccccggtcttgtcacttttctccgggctcgccttttcacccccctccagcctgctccgcacgaagctccgcccactcccggcttctctacataaagcccaccctttccacgcggcccctatcccgcctctccagccatatccattcgctgttgccctacggtagcccgcactatctgcacaggctctgcctgccatccctgtctgatctgcataaggcccaccgcttagacccctaagcaagcctctctggcccgtagcccacagacctcgccccttccccgctccctatcacctgcaagctccgcccaagcaaggctcggtctcggattctcacccgggcaggggggcggcccgaagcgttgcaggcagctgctgcagcacttgttgtctgggttccagtattcaaggcggccgcagtactgggaggcttccggcggtggcgccagggccagaagcaacaaggccgtcaggaggcatcgtccaggccccatctggggggccgtgatagcgggacttccaaacacagcgcctctgctacactttccggggaaatcgggcagaagaaaggacgcggtgatgtgggggaacagaattctcacgcctcttcggaagccgggaatctacccccgagccctcatcccccaactgagccggttatcagagaagcccacaaggccactaggggactaacagggctgcggatctagattgcaagaatgcatatcccacctctgccgtgtcctcacccacccaccctcccttttccatccctaaaataagacaatgatagcacctgtctcatagggttattgtggagaattagaaccgtcattagaagtaaagcaggggctgggtgtggtggctcatgcctgtaatcccaacactttgggaggccaagacaggaggatcacttgagcccaggagttcgagagatcagcctggacaacaaaatgaaaccccatctttacaaaaaaaaaaaaaaaaaaaaaaaacagcaaagcactttgccaagtgcagtggctcacgtctgtagtccctgctactagggaggccaaggtaggaggattgcttgagccatgaattacagaccagcctgggcaacacagcaagacctcatctctaaaaacaaaaaaaactggccgccgggcgcagtggctcatgcctgtaatcccaacactttgggaggcccaggtgggtggatcacctgaggtcagtagttcaaaaccagcctggcctacatggtgaaaccctgtctctattaaaaatacaaaattagccgggcgtggtagcgcatgcctgtaaatcccagctacttgggaggctgaggcagaattgcttgaacctgggaagtggaggctgcagtgagctgagatcgtgccattgcactccagcctgggcaacaggaatgaaactccttaaaaaaaacaaaaacaaactaaagtgctgaaaacagcacctcacatacagtaaactcagtgtttaagtgtaaggcattactaactcccatcacaattcggcaggcacggaggagtcagccccatactggctggagaccacctcccagcacctcacctcacctttgaatcctaatctccttggggctagggctcctcccacctgccacaaccaggtctctcccccttgaataagcctcagatggaggtgctaaggttttcagcacaaaggtgtccccaccctaccagtaccgttagggtcctgggtcccaagctggccgtgccaagttcctcagctgaagttgtggccaggacccagtcttgtttccccttttcgtcacatgtgtgggtggagggaaatgccaaaccacagcaaaagcaagttgatgccgaagtgaaacacgcagctttattaagacaggggcggtagaagaaggtctccatgctgaacagattacattatggagcccgggagcctgggaaggatggggcaggagagtgaagggggctttgaggagaggtcctgccaggaacatctgtccctgttgggggtgaagggtaagggggccagggcctcagaagcggccatgccagtgatcaggggaacaccgatggttcctctctcggggatggtggccagtatggaacctcgggggtgacctgggaataggagcgttgagagttctgttagaaccctgaggagtggtgcagagatcctgcaggcctgcctctctgctctgggatgaggcaggagggtgctgaaataactagagttctaagacacgacctcagtggccagtatcaggggaactcagtggccagtatcaggggtggcaatccaggctggtcgtggattaggggttcaggctggtttggggattgggacttaggtactggtctccagatggagctcagaactactcttagggtataagagtcttgggaatgaccgggcgcagtggttcacgcctgtaatccccacactttgggaggccgagatgggtggattacctgaggtccggagttcgagaccaggctggccaacgtggtgaaaccccatctctactaaaaatacaaaaattagccaggcatggtggcaggtgcctataatcccagctacttgggaggctgagaaaggagaattgcttgaacctgggaggcagaggttgcactgagccaagactgcgcctttgcactccagcctgcggaagaagagcaaaactccgtctcaaaaaaaaaaaaaaaaaaaaaaaaaaaaaacagtcagccgggagtggtggctcacgcctgtaatcccagcactttgggagggtgaggcaggtggatcacgaggttaggagttcagaccagcctggccaagatggtgaaaccccatctctactaaaaacacaaaaattagccgggcatggtggcaggtgcctgtaatcccagctatttgggaggctgaggcagagaattgcttgaacccgggaggcggaagttgccatgaaccaagatggtgccaatgcactccagcctgggcaacagagtgaggctccatctcaaaaaaaaaaaaaaaaaaaaaagattcttgggaacgtggttactggggcttagggttaggctcatctgaggatataggggccttaggacatgaggagacatagcaggctggtcctgaggtacctgcgcctgggtccccgcccatagagctgcctctggaggttctgggaaatgggccgcagatgcatgaagttgcagaagccacctcgggtacattccctgcatagagggtagagagatggaggaagccattgtcactgacagcccctaccacgcattcaaagtctgggattccaagtgcccatcccacccttgaactaccataccccatctcatactggcgacagcatgactcccggaagtcagtgacaggagacagctcaccgtgcacagcctgcccgttgaaccagcggttactgagttcagccacggcccgctctccatcctcctccctccggaactgcaggaaatgtcagtcagggtcagcaggagaactcagagatcttcaggggactcactacccgctctggggctggactggatttagtgatgaaattcaagctgagagcctacagtggccaccatcaggcattgaaacgcctccacttctgggccctaagtggggggcagcaagcaccttgacatagacgttgcccacgaggtggtccccaaggttgtcgcacacattcatctcttcaatctccccatacttctcctgcagttctgtgaacacctcctgtggaagacggggaggaactcagctgag

SEQ ID NO: 1560497 - DNA, 4001 bp, Homo sapiens
tccagaggctgaggtggcaggatcgcttgaggcagggaaattgaggctgcagtgagctgtgtatgcttgcaccactccactccagcctaggtgagaaagtcagaccctgtctcaaaaaaacaagaaaaagaaagaaaaaaagagaagaaagaagaaagaaagaaagaaagaaagaaagaaagaaagaaagaaagaaagaaaaagagagagagagagaaaaagagaaagaaggaaagaaagaaagaaggaaagagaaagaaggaaagagaaagaaaaaagagaaaggtaggtcagaacaagaaggaaatgaatgagagaaggaaatgagagaagttaatgaagattaaggcataagtgaggaagcaagcaagtatcaagagactgagtcatgcaatgggcaacagtctgaaaagcagagacagacagatgtggaactgtgctgtcagcagcagggatggagagacaatgacccagagacagaggcaggtggaaagtcagcagtggataacagagatgggaagggatgggaacctccagaaatggcagggacacaaagacctaaagagatgcatgacagagacagagacaggtggtcagaaagtcagagggcgattcagactggtcaggtgggagacgggggaggactagcaagggactgaggctgtggcccaccaggtccctgcgtcctgcgtggatggggctgtgtttgtgtgactggtgtctgcaggtgctgcttcgggtgggacgctgtgacggggtttctgtgccagacttggtctatgcgggcggcctctctgagactcttggggactctgtcggggttcttggttgtccctggaactctttgttcaggggagggcctgggggaatcctccagaaagtctgaattaacccagctccctgccctcctgagcgcccaccctccagcctcctgcctccttgcactctcctcccttttcttagggggaaatctaggaatctccttgaccaccccctgcctgccaggccctactggggagactcaaggtccagctatctaacctcagtgcagaaacctgcccctggccctctccccaactgggagggccgggccgggccggggttaacccttcaacctgctttaacccttcccttccgtctttccttcatcctcccatgcccatcgctcttccactgtccagccccacgaacctagacattcaatcagagcttgggaatccaagaccccagcccagcaccccaacttcctgtatctccagctcccttctcccccacataactgcaacctccccaagtaccaacactttctctcaacctagatgaccctgctgggggatttcagacccttcccctcttttcctgaccctgggactaggtctgtggacacccttgtcccctcctcttactgaccctgggaaggcatccatcccctgacctctgtcccgagatgactaccccagcccccggcaaggacctcttcagggaccctctccacgtacagatgaagacccctaacagggcattatcccctgccccccaccccaactcagttcggagatccgacccggggaccccgagtccagtgtctgccccctcctcaacaggagccgcagactcctgcccccaggcagggctaggtgtctgcgaccctcttgcctgctcggggaagcagacctccgcccctagacccggctccggcccgaggacgccgacccctgccccggggcgcggacccccacgtccgaggtccccctgcccagccagggaatgcagaccccacccccgggcccagaccccggcgtcccggggcctccccgcgccggcccagggatgcagccctcgacccccacccctgatcccccgattacccacccaagaccctggcgtcccggccgagccccccgcccccggcgctgcggtacctcggctgatgacggccaagccggccagggcggcggcggcgagaagccggagccgggccccgggcgcaggggggggcatcgcggcagaggcggcgcggagggggaggggaaagggggggccggtccggggcgcgcgaggcctggggggagaggggggagggggagggggaccccgcctgcgctgcaccggcccggggggcggcgggggcggggggagggggctgggggggcgcgacgaggcggctggagctgctgcagacccggggaggggggcggcgctgacgggcagggagaccggccaatcaggagaggtggggggccggggaggcggggtcaagggggggttgcttgttggagggagaggcctttgttactgcggcccggcccctacccctcccgccccaggcgtccccacgtctttccaccacatccgcagaacacggagtctgggatacttcctaaaacccagctccctcctccttcaagtcccaatctcatcctcccatggacctaggagactagccccagtccctcctctctcagacccaggagcccaggtccccagcccctcctccctcagaccctggagtccaggcccccagcccctcctccctcagacccaggagtccaggcccccagcccctcctccctcagacccaggagtccaggcccccagcccctcctccctcagcccaggagtccaggcccccagcccctcctccctcagacccaggagtccaggcccagcccctcctctctcagaccctggagcccaggcccccagcccctcctccctcagacccaggagtccaggcccccagcccctcctccctcagaccctggagcccaggcccccagcccctcctccctcagacccaggagtccaggcccccagcccctcctccctcagacccaggagtccaggcccccagcccctcctccctcagaccctggagcccaggcccccagcccctcctccctcagacccaggagtccaggcccccagcccctcctccctcagacccaggagtccaggcccccagcccctcctccctcagaccctggagcccaggcccccagcccctcgtccctcagacccaggagtccaggcccccagcccctcctccctcagacccaggagtccaggcccccagctcctcctccctcagaccctggagtccaggcccccagcccctcctccctcagagccaggagtccaggtccccagcccctcctccctcaggcccaggagtccaggtccccagttcctcctccctcagacctaggagtccaggcccccagcccctcctccctcagacccaggagtccaggtccccagtccctcctccctcagaccctggagtccaggcccccagcccctcctccctcagaccctggagtccaggcccccagcccctcctccctcagacccaggagtccaggcccccagcccctcctccctcagacccaggagtccaggcccccagccccctcctccctcagacccaggaggccaggcccccaggcccctcttcctgtgggccacagttcagcttttccatctattttcatggataacgaaaacactgacttttggagtgaaatttgcttttttcctccaccccaaccctcatccccagtataataaggcaatgggaagggattgggggacttatcttgggggagcaggtggggaggaaaccataatccagggtttaggtgcaaaacatcctggctccctgttctttcactgacttggctgtgtgaccttggacaagccatttctcttcccagaacctcagcgtcttcccctgcaaggtggaaaattccctattgcccaaggttattgagaagaatgagagatcttggagcagctcctggctccagccagcacctcaaaaacctgtagtgagtttctccctcccctttccactttgcatctgtttactaggtgtattccaccctcctgttcccgtccccttggcatacgcaggagcaaaataatctctgagtctacgttatttctgtagcagttcaaggcaggagcttttgaagttacccagtaggggctgttctgcc

SEQ ID NO: 1560498 - DNA, 4001 bp, Homo sapiens
ttttttaaagatggagtttcgctcttgttgctcaggctggagtgcaatggcaccatctcagctaaccgcaacctccgcctcctgggttcaagcaattctcctgcctcagcctcccaagtagctgggattacaggcatgcaccaccacgcccagctaattttctgtttttagtagagacggggtttctccatgttggtcaggctggtcttgaattcctgacctcagatgatccgcccgccttggcctcccaaagtgctgggattacagcactttgtaatcccagccactgcacccgtgagccactgcacccggctcagaactgaactttatttatttatttttgagacggagtcgtgctctgtcgcccaggctggagtgcagtggcacgatcttggctcactgcaagctccgcctcccgggttcacgccattctcctgcctcagccttctgagtagctgggactacaggcgcccgccaccaggcctggctaattttttgtatttttagtagagacggggtttcaccgtgttagccaggatggtctcgatctcctgacctcgtgatccgcctgcctcggcctcccaaagtgctgggattacaggtgtgagtcaccgcgcccaactcagaagtgaacttttaagacctggataaggaagcaattcattcactatctgagaggcagatgtgtgtggtctctggaaagtgtggtctgggaagccagcccatctggcttcaaatcttcagtctgccacttccaagtgtgtgacctggagagggcacatgacctctctgaacctcagtttccccttctgtgaaatagggatcgtacagctctgatctcaaagagttgtgataagaggtaaatgttactataggaaagcacttagaacgggctgacaggctgggcgcagtggctcacgcctgtaatcctggcacttggggaggccgaggcaggaggatcgcttgagcccaggagttcgagactagcctgggcaacatagtaagacctcatctctactaaaaataaaaaattagctgggtttggtggcgcatacctatggtcccagctacgcaggacgctgaggcaggagaacagcttcagcccagcaggttgaagctgcaatgagtcattatcgggccactgcactgtagcctggacaacagagcaagaccttgtctcaaaacaaaacaaaacaaaaaaacaaaaaccccaaacaggctggtatatagatctattcagttacagtgaccttctattacggctgttattattttatgattgttattatttatatgtattattactaagttgcggattgcaggggtgagacagggcattctggtggaagggggctgggctggggtcccaaattctgatcctgccccttgccagccctgtgatcttgggtaggtgacctgttctcctctttgcgcctcacttcccttcttcctaaaagaagccaatagggtcatctcttgtggcggagtggccttcaagagttctcatgagttgggtgcctgagctgcatgggcctcaaactgacagggtcaaagctctgagtgggggtgacttggactcgtaaggagacactctcctccttgtccctggcccgtggtgaagccgctgtctccaacgcacctgttaaaagcagcttcctccaggtaggggtgtggctggagctgacgtccagaggacccctcatctcgtgttctgtccagggactgtgcagagaaggtctcctcatcacacatggggtcttcatagacctgtacagtcgcgtctgcagccccggcctcaccctgcaggaccctgctcacgatgaccatgccctaccctggccacttccccacatgacttacaccaagttggctgggaagtcacctccagccgcatccttctctagcatcgggtcagtggtggtggtgggtggggaccaggctgggacagggttcctgggaagggggctctgaggttttgctctcattctctcaccgtacaatccccgccgggagatggagggagaagcagaatcgcccgctcctatcactcacatcaaaggcaaggaatggccaaaggtcaacctggtaggaggtgacggggctttggactctgaaccacagcttttctcctctgtaaaatggaggcgttaataatagtgcctgccccagagtcagacagggccgtggacacaaggtgcttggagtagtgcctggtcacgtagtaggcgctcaacgaatggcagtcactatgaagtcaatgctaattataatttggtgtctaggatgtcctggaggcatgtttagaatcccgttatcaggagcttgctcagactatatcctgaattttagattctagaaggataagctacactagctactttttcctcacccttctcactccccaggtccattctttcctcctcaaattaataattatattactcaaactaatagctggtgtttattgaacacctactatatgccggacacagcattaaccttgtaacagggttgcctaatttgaatcctcatagcaacctcgaggggtagatatgagcatccccattttctcgtggtgcacaggggctaagtaactcacctaccatcacacaaccgttcacaggggctttctgccagtttttggaggcaccagctcaggggctttgcatgagccgttccctctccttagaaccttactcatgtaatctcaaagctgactgtatcttattattttggcttaattcacacacatcactctatcaaaaaggcctttcttaatgcctgctgcaactcagttccccacctctttgctagcaagccacactgttttgttttctttacatcatttaccgctattttagatgatttatttatttgtccacttgtattatctgtctctccctccttagtcccacctctccgacttgaatatcagatccaggagggcagggatgttgtctggcttgtggctatgtccctagtgactagaacagtgccttgcatataacaggtgctcaatacatgtttttgtttttgagacggggtctcactctgtcagccaggctggagtgcagtggcacggtcatagctcactgcagcttcaaccttttggattcaagcaataatcctgcctcagtctcctgagtagctgggactacagtctcacactaccattcccagccaattaaattttttttctttttgtagaaatagagtttcactatattacccaggctggtctcaaacttctgggctcaagtgatcctcctgcctcagcctcccagagtgctgggattacaggcatgaaccacctagccagcctacatgttttctttttagtgaataaatgaatgaagagcaagtgagtgaaatgggagtgttcagacttgaactcagatctttctgacttagaagctcatgcttttccctcccagagaggttcaggttccacccaggggctaaggttcacccataagtctctaataatagtcattatcaggtgacacagttatttctttattagcatttgctaaagtgccttttttatagttggtctgaaggcctctgctggagtgattagctaggtcaggagaccactgtaggaaaaagtaaatatttacgatgcagttaataaccattatgttgtaaggtttctggggtttctacccagccagtactctcttgtatccaggtaacagcacctggagttctcttttggaaaccagcctcctcatggctccagggaggtgaggggcccaggactggccaatcagagcacttcatcccctgacaacagtgatttttggagacctgggcgtggcactcagaacaggccaaggagaagcaatctcttacggattttattggaactctggggaataaagcaatttttcttttttctgtttttaaatttttatttatttatttaaagacagagtcttgctgtgttgctcaagctggagtgcagtggtgtgatctctgctcgctgcaacttccacctc

SEQ ID NO: 1560499 - DNA, 4001 bp, Homo sapiens
cccactcccttgcccttacctgtagagctcccagtgcccccgcactcatggccagggtgggcagggaatccaggttgtggtccccgtcagctgggaatttgtccctctggcagggaaaaaagctgtgaggtggcccctgcccagcctcggggctccctccatcccccacgccaggcccccaactcttcccctccctcactctgccacctgagagcccagaacccctccaagtggctgcccgcagactcctctccgttcctctctgcctctcactcctgtgctggccccagcccagtctctcctaccagctgtgcagccagctgccgcgtgtccgccaggagagagcgggtcaggagcacggtgctgtccagctcggcccgagggtctggggaaactcgaggggggccaggtggtggcccaggggcgacagctgtatctggccacaggctcagcacgaccaggaccaggcggcaaacacctgggggcaggataaggcagagagctcaggctggactccgggtctgagagaggagggcctgggcctggactcccgggtctgagggaggaggaactggggtctggactcctcctgggtctgagggaggagaggctgggggcctggactcctaggtctgagggaggaaggcctggggtctggactcctgggtctcggggaggagggtctggggcctggactcccggccttagggaggatggagctggaggtcttaagtcccagggtggaacgcccgcgggcaggtcgcagggccaggcgggcttccctctccctccctggctctggctgccccgcccgtcggagcagacgcggcccggggcgggtagacgggccgggcgtctcccgtccgcccccggacgccggaatctgggccccggggcggggcatggtgggggaggcacaggccagaacctgccccctccccgggccgcgggagcccgagctggctgggagcaggggaaggagccagaagccaggacggagcccgggagacacggacctctcccacgggagaccccttagacgccctcccaggagccccgccgggtgggcggcagaagcccgggccgcagcgcacctgggcggagaggggcagagccatgggcccggccgggccgcgggagcgggagagctggcggcggggggcgcggggggcgcggggggcgcgggggtccggagctcgctccccgcagcccaccccggccgccccgcccacccggccacccgccagccaatcagcgctccccggccgcccgcgcctcgcacacccccagcccgccccccgggcccgccagccgtcggtctgtccgcgcctccgtcggccgcatctgcccggctctccccgctttccccccgcgcccagtctctctcctccccccggctggggtcgctactccctggcttgctccgctctccgcggaccctgcctcagtttccctccggagcctctctgccggaatcccagggagtctcccggtccccgcgggctccctggggcctgggtcgatgggggtcacctccctcccggcaccagtccctgcgtccctgcccctgctcggtctccgcgtctcgctccctctcggggccctgtctggcccgtccctcctgcggcgcctctgattggctgcctccatccgctcctgtctgtgtctctctctgcccatctcctccgccgcctcctgtctccgaagctgctctcctccccggctgcctgtctccgggtccctctctgtgcgactcagcggggtctgctcccacccccgccgtgggtccctctcctccctgcctccctgtcccctccaccctccccatgaaccaacttacagttcatgtccccacagggccaggggttccccagggcagggggcagggagccgggggcctttaacccttccctgtccgctgccgggggagccccgagggtcagctgggccgcggcctggggaggggaggcatgtgccctgagcagcagggccgcggcagtgagggagtgtggacgcctggggggttatatagggggctggggcgggcgggcggggggcaggcggcaggggagggcggcctgacacatcctgactcaccctccctgcctgccttttccattcagacggagcggctgccttgcagggctcacgccgccgcgctcggaggagggcacggaaggaaaagttggaaaagttgaaaagggaaaggggggggtggtcggagaggggctggtgaggtcattggcgtcccctccctccacctccacgggccggagcagacactcaggctcaagcgctggggcccgactgtgggtgggggtccggctggaccaggactagcagagagagatggggaggcaggaggacggaaaggcagagaaaggccggacggagggacaagacaggggcctggagaggtggaggcaggaggaagagggagtggaagggaaggagagagagagagacacacacacacacagagtgaaggacagactgagacagagacagggagatggagatccacagagatggaggcagccagagagacacaccagagaagcaaagaggatcagaggggcagccctggagacagagggagaggttctgggagtcagagatcagagagcgggaggaagacagcaggagggacttggggagacccagggagaccccgaggggaaaggaacagagacaccaagactctgagacagaggatgccgcagctgaagaaaggcaccaggcaaacagagacacggggcagagtgacagggacggagaggccccagggacagaaaaggggagacagagatattagaaagacagagacgctgagatgttggggactcagcaatgggggcagagagtaaaagcctttctcattttttgtttgttttttgtttgtttgttttttggtactgagtctcactctgtcacccaggctggagtgcaatggcgcgatcaatggcacaatctcagctcactgcaacctccacctcccgggttcaagcgattctcctgcctcagcctcccaagtagctgggattacaggtgtgcgccaccacacccggctaattttgtatttttagtagagacggggtcttaccatgttggccaggctggtctcgaactcctgacttcgtgatccgcctgcctcggcctcccaaagtgctgggatgacaggtgtgagctaccgtgcctggcctcgtttttggtttttttgagacagagtctcgctgtgtcacccaggctggggtgcagtggtgtgatctcagctcactgtaacctccgcctcccaggttcaagtgattctcatgcctcagcctcctgagtagctgggattacaggcacccgccaccatgcctggctattttttgtatttttagtagagatagggttttgccatgttgcccaggctggtctcaaactcctgagctcaggtcatcctcccgcctcagcctcccaaagtggtgggaatacaggtgtgaaccaccacgcctggccttttgaaaagcctttctcaaagaggcaggtggagacaggaaggaggaggagagacggagactgaggaccaagaggcgctgagacactccatagaggcaagacctccatgtgcgactctccccctctgtgcctcagtttcctcatctgtgaaggggggttaatgatgcaccctcatccgcctaaatgccacgatgaggataaagcgagctcattcacgtgaagcacaaagtcagtgctgaccatccttattcccctcgttaacttttctgaacacatcagggacacagagaaaaagatgtcgccttcgagagagatggggcaggagcaagatggggtgaagacgggacagtggggacacggagacagtggccagaaccaccggggccagagccctggacgtcaccgcacagaggtggaggcaggagaggagtgcaggggggaggggacccacaggccaggggggaggcagcgacgcctacccaggctcacagtgggccagc

SEQ ID NO: 1560500 - DNA, 4001 bp, Homo sapiens
gtcagggcaattattaataacatttctccaggaggcagcgacctccctcagccactgggatccccgtgccctttgggattgccacagtctgctaggtgtggaactgggtgagagaaggagggggatgccaccatggatgggtcaggaagaccccggcgccctcactcccacaagaaggacctgtcctgagccctgcaggcagattggaagccttgggggagaaggcggcaccccaggaaacagccccaagtgtccaaccttgaggggggaaagatgcttaacacacaaggctctccatccttccatctctctctgtgatgacacagaacccccacccacccacccacccctgagagcctaaagcccatcctccttccctttccctggactgaccactcactgccactatctccaggatacctcgtgggctgcctctcgccccctccctgctgctggtctccagccatgcctggcccctgaaggcgctgggaccttgaggtgtggccagcactgctgtgggcattctacaggcactcagtgcatctcaagagccattgaaaaagtcagcaccccgctgatccccagtgtacagagaaggaaagtttatttattattattattattgagatagagtcttgctctgccacacaggctggaatgcagtgctgcaatctcggctcactgcaacctctgcctcctgggttcaagcgatcctcccacctcagctcctaagtagctgggagtacaggtgcccatcatcaagcctggctaatttttgcatttttagtagagatggggtttcaccatgttagccaggctggtctcgaactcctgacctcaagtgatccacccatcttggcctcccatagtgctggattttcaggagtgagtcaccgtgcagggcctgagattattaaaagtatatgggaaggctgggcatggtggctcatgcctgtaatctgagcactttgggaggccaaggtgagtggatcatttgagcccaggagttcgagaccagcctgggcaacacagcgagacgctgtctctgtaaaaagtatacaccaaaaaaattaaccaggcatggtagtgtgcacctgcagtcccagctactcaaggggctaaggcaggaggatcacttgagcccaggtggtcaaggctgcaatgagttatgattaggccactgcactccagcctgggacacagagtgagaccctacctcagtaaataaataaataaataaataaataaataaataaataaataaataagtaaagtatacggaaggatgtgcataggttatatgcaaatactttaccattttatatcaggaacttgagcatctttggattttggtatctgcagagggtcctggaaccattgccccgtaaatatggaaatgactgtatacattatattatgtatgtctatctattgtaaactacatacataagatactatactatgtatacctattagatacatacttgctttttattccttccttagttttttttctcattgaactccgggaggtggaaaaaatttagtgcatttcacagaagagaaaatctagaccagaggaaagatgtctaagttcgatcccagaagccatgactgcccatctcccatttgacagcaggaaagactgaggcacagagagatgaaaccaacccacacagcaggcccacagctctccacacatacacgtgcctccacccagcaagaggagccgccatgccagggtcaggggactcaccgccctgcctggacagcaggaagaggaagaggagggggaccacccaggtcaccagcggctccatcggatccacgtagagccccacagccccaggggagcctctctgccacctgcgaggttcagccaccccgtccccactccggaacacattgaagctgagcaaggagaaaagactgaaaaaaaagaaaaaagaaaaaaagtaaagtgtcacagcccatccctaaggcaagtcaaagtgaaagagaaacccaggaagtcagctccgtggtggtggtgatggtggcggccacagactctggagcaagtctgactttggagcaagtcagggttctagggggttctgccctgctggccccagacctgaactgaacacccagatgccagccccatgggcccatgggccacctgtggttccatgcacttggccaggtctctggccctctctagccaatttttttttttttttttgagatggagccctgctctgtcgcccgggctggagtgtggtggcatgatctccactcactgcaacttctgcctcccgggttcaagcaattctcctgcctcagcctcccgagtagctggaattacaggcaactgccacaacatcgagctaatttttgtatttttagtagagacagggtttcaccatgctggccaggctggtctcgaactcctaaccctaagtgatccacccacctcagcctcccaaagtgctgggatgacaggcgtgagctaccgtgcctggctgccaaattctttttttcttcttttgagatagggtcttgatctgtggcccagctgtagtgcagtggtgcaatcacggctcactgcaacatcaacctccccaggctcaggccatcctcctacctcagcctccccaggaactgggactacaggcatgcaccaccacgcccagctaatttttgcatttttttttttttaagagagggggttttgccatgttgcccaggctggtctcaaactcccgggttcaaatgatccgtccgccttggcctaccaaaattctgggatcacaggcgtgagccaccgcaccgggccatctcgccagcttctgaatctgagactcaagagctgaaggagggcagtgttcttggatggcctaatttcatccttccaacaaattgttacaaagagcttgcagcatgctggccctccacaatgcccacctccccacatgccaagctccagccttgtgcacctgggctcacccctctaatcccagcactttgagaggtcgaggtgggaggatcacttgaccccaggagtttgggtctacctaaacaacatagcaagaccccatctctataaaaaataaagaattaggccaggcgcggtggctcacgcctgtaatcccagtactttgggaggccaaggcaggtggatcacgaggtcaggagtttgagaccagcctgaccaaaatggtgaaaccctgtctctactgaaaatacaaaaattaaccgggtgtggtggcaggcacctgtaatcccagctactgaggaggctgaggcaggagaatcgcttgaacccaggaggtggaggttgcagtgagccgagatcgcgccactgcactccagcctgggcaacagagtgacactccatctcaaaatatatatatatatataaattaaaagttagccagtcgtggtggcacacatctgtattctcagctactcaggaggctgaggtgggagaatggcttgaacccaggaggttgaggctgcagtgaatcgtgattgtgccactgcactccagtctgggtaacagagcaagatcctgtctcttaaaaaaaaaaaaaaaaaaatttaagagatgcaacttagtctttcccccatgttccatttcttagcctctgagtattttgtttcctgcccctccctccccactgtcggcaaagcctctaaatgtcagtggagaagctctgatccaagctaccatgtggatgaaccctcaaaaacataatgctgggctgggtgcagtggttcacatctgtaattccaacactttgggaggccgaggtgggcggatcacctgaggtcaggagtttgagaccagcctggccaacaaggcgaaaccctgtctctactaaaaatacaaaaatttgccaggcctggtgacatgtgcctgtaattccagctattcgggaggctgaggcagagagaattacttgaacctgggaggtagaggttgcagtgagctgagatcgtgccactgcactccagcc

SEQ ID NO: 1560501 - DNA, 4001 bp, Homo sapiens
actcgtctcataaattaaaaaaaaaaaaaaaaagttttggtgttttggccatatgcggtggctgacacctgtaatcccaacactttgggaggcctaggcagaaggatcttttgaggccaggagttcaagaccagcctgggcaacatagtgagatccccgtctctaaaaataaaataaaaaataaaagttttgatgttttgttcatcataaatgttttcattaattttatgtttttaaaatattatttctcttgatggctgagttttgtggggccaccttaaattttgcacaggggtgagatcctcactcgcctcaccctagaacccgttctgctgtgtgtactgggcacattttttgttgttgttttgtttttgtttttgagacagagtctcgctctgtcgcccagtctggagtgcagcggcgctatcccggctcactgtaacctccgcctcttggattcaagcgattctcctgcctcagtcttctgagtagctgggattacaggcgcgcgtcaccacccccaagtaattttttttttgttttgttttggttttttttgtttagtagagacagggtttcaccatgttggccagggtgatctcgaactcctgacctcaagtgatctgcccacctcggcctcccaaagtgctgggatacaggcgtgagccactgcgcccggccaatgcgctgggcatattgattaacctatcttagcctcagtttcttcatctgcaaaatggggctgaacgatgctgccttacttctgagaggattcatgcaaaatatttacttctgcgctctgctggaggggcggggccagctcgcccagtgggggcggggccctgtggtcgggctccccgggaggggcggggccaggccgtgtcagctgaccggcctggccaatggcacctggcggcggggcctggcaggccggggcggggccgggggcgggcctggcggcgcggactcccgggccatggacgagtcgagcctcctgcggcgccgcgggctccaggtgaggcccctgcgcgggcgggcggaaggcagagggcgcggccaagtggacgcggcctgaaaggtgccgggaggggcggggccttcacgggctgtagggaaactgaggcagagggtggggaacgctcagatcgcttctttttgaccacccgcttctcaaagtgctttttctcatggtgggaagggggaaggtgcccccttggacatctagggaaactgaggctccaagcgatggcgtgggaggaagaggctgagggctctgcccctccccaccagctgttctaataataatgctagcaacagcagccagagagctcaccatatgttcatggttgttttagtcctattactagcgatgtattaatatgagttcatatgtattaatacctccttgggtcgtcgctgcaccactgtacaccctcagctcagccctacgacgacctggggaggttggggctgtcaggcgcccatttgtcagaataaggaaactgaggctctagtcccggaaagccactctccagaggtcgcctagctgggattcgatctgcgccctcaaccagctctcttacggcacaaggcgctgccaaccagcagtgtgacctggggggagggcacccttgcttctctgggcctcagttttccaatgagccatagggtcctccttttactgagtttatgtttaggaggctgtgtcatcaggaggtagggacacaggcgtcggggacagcagaagcctaagtttgaagccacacagggactacatgaccccgggcagccaccctttgacttctctgggcctcagtgtccccattataagaaaagaaaaacaggaattaagatttggccattttcctctgggacttagaccacacccttaagaagccaccaagttttcaggtagggaacctgggattcagcacttacccaacgaacatttatggagcgcctgctgtgtgcctggctctggagaggcagcggagtgttctgcaacctctggagctgccctcctagaaaccccaacctgttgggggaggtagacgccagagcagcggtgaccccacggagtgatcagttgtgataagggactcacagcaagtgaaggaggcgcctgacccagtcattgctgggagccctggggtagaggaggcagccaagggtggcgaggcattgcagcggggggcggtatttagggaaatgaaagaggttgacagaagctggaacctagggaggactgagcaggtggggtgggggtcggggactgaggttagctccgggcgggttgagggggtgagaggaatggggccggcgggtctccaacctggagccgcaccggtagctgcgggactgcgaactcagcaggtgatgggaagccaggtcgggagtggtcagggaaggcacgggctgagctgcagatcagagacacccggtctctggccgcgcgggggtggggcagaactggaggcgctgaggccagaggcaagagtgggggacttgggcggaaaggagggggcggggcgggattggcgagcagcgtggtgttggtgggggggcagtcccgcctccagccccagttagatgccaacccgcccgcagcctcttaaaatagagaaaccgcctccgggtaggcgaatgggggtgctgctgacgtcaagaagtggggcctgttccatggtgggggggtcaaacatttcctgatggtaagttctatgttacaaaaggggaaactgaggttcagagaagcatagccactgtccgggtttcacaaagtataggtgacagagtcagacaggatttgaacccacgcagttccggcttcctctccaaaccaacccagcacaggcgtccctccacgaaggtggagggatgagcacggattccccgactgaatgagggcattccgggcagaggccacagcacgtgcaaaggcccagaggcatgtagcctttcttacctgtttatatggggaaacaagaacttgaacctatttcttagcactagaggctgatggccaggacttaatgcttccagggccttcagtgctgattttgaagaggttagactttccccctagggtgatggggagctatggaaggtgctggagcaggagaggacatgcccatattgaggggctgggaagactcctctggagggctaggagcaggagtgggggaatcaaaaagggcaggaagccaggaaggagcatggaatgaaagtctaagtgtaccaggtgtggtggctcatgactgtagtcccagctactcaaggaggctgaggcagaaggatctctctctctctctcttttttttttttttgagaaagaatcatgctctgttacccaggctggagtccagtggcgcaatctcggctcactgcaacctccacctcccgggttcaagtaattctccctgcctcagcctcccgagtagctgggattacaggcacatgtcaccacgcccggctaatttttgtatttttagtagagacggggtttcgccatgttggccaggctggtatcaaactcctgatctcaggtgatccgcccacctcggcctcccaaagtgctagaattacaggcgtgagccaccgcgcccagccaagaaggatctcttgagcccaggagtttgaggctatagtgagccatgatcacgagaccctatctcaaaaataaaaataaaggtccaagtggaagaagattaaaataataataaaataatagtaaagtgggaataaccgttcatattaacaggctaagccctctcatgcattcaattctcccaacagcccgagtggtcagtgctattattagttccacttttcaaaggaagaaactgaggcccaaagagggaagtacccaccaggaagccagagaaattctaaccaatctggcacgtgaaggtgttgtcttcatcagccccagtttggggtctcttttgactggaaaccttgttaatggtccaggagcaccccagccaatcagggggtagatc

SEQ ID NO: 1560502 - DNA, 4001 bp, Homo sapiens
cccgcctcggcctcccaaagtgctgagattataggcgtgagccaccacgccagcttttattttttaaaatttttttgagacagagtctcactctgtcacccaggctggagtgcaatggcacgatcttagctcaccgcaacctctgcctcctgggttcaagtgatcctcccacctcagcctcccgagtagctggaattactacagctggtcttgaactcctgacctcaagtaatctgcccacctcggcctctcaaagtgctgggattataggtgtgaaccactgcgcctggcctatttccctttatttatattatattttatatttttaagagacgggctctcggccaggcacggtggctcacacctgtaatcccagaactttgggaggctgaggcgggtggatcacctgaggtcaggagttcaagaccagcctggccaacatggtgaaacctcccccctctactaaaaatacaaaaattagccaggcatggtggcacatgcctgtaatcccagctactctggaggctgaggcaggagaatcgcttgaacccaggaggtggaggttgcagtgagccgagaccacaccattgcattccagcctgggcaacaagagtgaaactccgtttcaaaaaaaaaaaaaaaaaaaagtgacgggctctctaaaactctgaactcctcctgggctcaagcgatcctcccgcctcggcctcccaaaatgctgggatgacaggtgcaaaccacctctcctggccctatgattgctatttaatagagaaatgaaaaggagactcaaagagggaaagtgacttgcccagggtgacacagcaaagaaacgagggaagctagaattgaaggagtggaggagtattgggggaggggggcagactcctgggactttcttttcttttcttttctttttttttttttttttttttgagacagagtctccctctgtcccccaggctggagtgcagtggcgagatctgggcttactgcaacctccgcctcccgggttcaagcgattctcctgtctcagcctcctgagtatcagggactacaggcgcgcgccaccacccctgggtaattttttttttttttttttttttgtatttttagtatagacagggtttcaccatgttggccaggcttgactcctggaacctttcaaccaaagcagcctggggcctgagcggccacctccaaagcctgtttccccacgtcacctccctgtactcactacttttggctctggaggtgtaactcggagggggctcccaggtccccaagaggctcccacgagcagttcaagtcgcccaagggtccaactccgtagcactgcagtggcccggcgctgcctggagagggagtcagagggtctcaggaaagggggtcgaatcccccccttccgcctgcacaccccagaacttggacttctgacaattgcaaggtgggggggcttagggaaatgagcagcaggaagggaggcgctaggcacccctgcccgggctccgtgcaaaccccccctttccctgtgctcgccacatcctgttaaccacccagagagctcccccaccccgccccggggctccggttcgacctcgctgccgcccattccccagtgtcgccgggtccctgccccgggaggagccgagtggcgcctgcacctctaccgttcgctctgcatacgcgtggcttatcctggagcactggcgccttcgcggggagcgcagcggcagcgcccgggacacgagctccctccagcactcaccctggggacgcgtccgctggaaaagcacccacaacagaggcagcagcgccagcttgggcagcggccacagccagaaaggggcgcccctgcctccccgcatggcgtccctcgggagccccgagtccggcccagccttgccgggtccgcgcggccgcgctgctcctcttcgagctctgggtacagcgcccgaggcggcaacgggaagccgaaccaccccggcaggccgcctccgcacctttcgctcagggtccccgccccttccccgcgacggaaagtccccggctggggctgcttgagggggagtggggaggcggcctgggcgtctgggggtgggggcctccgaggggtggtaccgcgtaccgcgcatccccgaaacctgtcctacgcccaacaaccatacacacacacacacactctctgccaaagtcttcgaatttttattattggagtttgggaagattcgaatgtgcccagagctctcctaggggggccacctgccaccttctctggggtccacagccttggaactctggcaggggagttggagggagaggggatggaaagcagggcaaaggaagcgtgcgtgcaaaggctggactgagacagaggcttgattttagctggtcaggggacaatggccacagtttggactgggaagggggcaggggtctctgtgtggccagcctaggtagagtagggacccagttgtggcagtggagtgtgtaggccaggcaaacgcatggttagggctggggagaggtcaggggtcaggatgggggggtccccacttgaccaggcaggggcacagcttccttaggggccagggtcatgataggctggtcaaagggcagggttggataggtggtgtcgggagactgtgcctgagcccacagtgcctctgtgacttgtagatgaatgaatgaatgtgtgaggctcgaaagacaggtgcccagccagacactagttgagtggatggcaggactggggcattggtcctggtgcccacggctgcccagccctcaaactagcaaaggctactgatttcacttttgctacacccccacttgcagcagctgctggaaaggccagccaggacatctcggctgccccgaagaaccccaggggttccttgccagctgggtcgccccctgtaaaaggcctggggtgacttggtcagggccagccactcgctggaccccatggcctcatccagctcgcctgccagactgtcttcatcagcatctgcatccgggaaggtatctcctgcaaaagatgaacagagttagtgatcagggctcagctgctgctgcacccacagtcatggctcctggccagtctagctctgatcttgtgacaacagtcatagacatagttcagagtttttattccacccagtcctgggttcaaattctggctctgccagagtaggtgggattacaggtgtctgccagcaggcctggctgatttttgtattgttatagagatggggttcaccatgttgttcaggctggtcgcaaactcctgacctcaagtgatgtgcccacctcagccacccaaagtgctgggattacaggcgtgagccaccgcacccagccctgtcatttatttctccttactctttattaattgaggacctggtacatttgggagctgggctgactgagcatgaatccagcttctctaatcgtgagcaagtaaatttacttcttggagcctcaatgttcttttctgcaaagtggaaaaaaataattactccaaccttctcaagttttataaggagttaatattcattaaaaaaaaaaacttagaacaatgtctggaacatgatgagcactcaaaaatgactattgagtccgggcacggtgtctcacacctgtaatcccagcacttccaggggcacatgctggaggatcaccagaaccaggagttcaagaacagcctggacaacacagcactaccctgtctctacaaataataaaaagttagacatgttggcacaagcctgtagtcccagctactcaggaggctgaggcaggagaattgcttgagcccaagaggttgaagctgcagtgagctgtgatcacaccactgcactccagtctgggcaacagagcaagaccctgtctcaaaaataataataataataataataataataataataatttattgatcacttactttgtgtcaaacaacgttttaagtgctttagcaggttaacttctttattctt

SEQ ID NO: 1560503 - DNA, 4001 bp, Homo sapiens
tgataacacagcccctataggcccaagaaaatatagggcaagtgctcaaaaactggcagagtggacagtaagtgctctaagggaaggtggtcagatcccaagaaggacttcctgcccgcaacaggtaaggaaggagaaagaagcttgtgtgtaccgctcagtatcaggattcctccaccttctctggaccttgattcagtctcctaactgccacagaagggatgaaggttgaactccagctgggatgtcctgatgtggatgggacaaggtgggtttctgcaacagagaaaagacggacatccacctcggctggtggaggagggcccagtgcatgagaaggggcaagatggctaccctgtgactaaacgaaaacggagatcttccatttttggcagggttgggagatagttcctatccagtggaagctgaaggacggtttgaaaggaagccaagggcaagggatggagaaaaggacgcagctggggcctcgatgtctgaatccctgccaggggatggggcctgggcacccatcatttggaatggaagatgaggatagctggaaacagacactttagagggatgagggagacagaagaatgacagcaggtgttggacagtccaacgtctgcggctcttacaagtggtaaggaagaaatgagactgggccccagagttcctattaataaaatatgctgaggccgggagcgatggctcacgcctgtaatcccagcactttgggaggccgaggcgggcggatcacgaggccaggaaattgagaccatcctggctaacacagtgaaaccccgtctctactaaaaatacaaaaaattagccgggcgtggtggcgggcgcctgtagtcccagctactcgggaggctgaggcaggagaatggcgtgaacctgggaggcggagtttgcagtgagccgagatcgcgccactgcactccagcctgggcgacagagacggagagactccgtctcaaaaaaaaaaaacagttgaacaggaatgtatgagttgagctctgtgcataaggcttgccagacatcgtcttatttgagtctcataaacccaccaggcgagttgatttttcttattttacagatagggaaatgaagtaagagaacttaagttatttgcccgaggccatcctggcaggtctgtatttgggagagtgctgtgactcatgctggactctaacccacgagggtttctcagagtcagcagctgggggatgaagaagtgaaaagtgactggcaggaaattctgcaagcaaggaaagggaaagagaaatgaactggtgcaggtctgcgggaagagaatgaggctggatcctcaaaatcacaggaggaagcaggcccagacctcagaggcagaaagagaaagaaaccagagcttagagtcaggaggaggaaaccagaccccggagccacaaggagagggctggatccccggctcagagggaagaggtcggatccccagctgagagggaggagggtcccggaccctaggagtgggaaggaaaggctcggatcccctgatccccaggaggaggggacccggctgcctcccggttggggccgcgcgagggcggggcgcggaaggatccgggagggccgtgctccgccacccagtatatatctgtccccagtccccggggccgcctcattccctgtcctcggatcacagtctcttctcactacagtgtcgccgcctctgcctgcgtagccccggccatggctctgtagcctcgacccctttgtgcccccggcccgtctccgcgctcaccacgcctgcgctctccgctcccaccttctttcttcagccgaggccgccgccgcctctccttgctgcagccatggagtgagtaaccgcttacctcttctccaactgcctttcccgccctttcgcagctcgtggccctctttagggagccctggggggtggggagtcgcgagcggggaatcacggtcgcgcaggcgcagaagtagtacggtgggccgaaggcgcgcggctgcgcatgcgcactgggcccggggccgggtgggagagttctagactcgatgtttgtcagcccgcgtgcagctgggcctgagcactccaggggagggtgtgttttttttttttctaaacgattcttcgtgcttggttgttcctgcgcagtagcccaccagtgccccgtagtgaaagagctgcggaccctgaatggccgcacatgcgcattgatccccaagagggcggaggtgtaaaggcaattggaccgctcgggcgacgtagcatgcgccttggccctcggcgcagagccgcgtgtggacgggtggcgttcgggtagccgttctccgcgtgccccctctaccctcctccaccctccctgccccacgttgctctggctcacagcccagcttccttccttttaaaccaggcacctgctgaggcggggactggcttagattgacagggcagaaggcgggacccagaggcaaccctctaagtgggtggggatagaaccactgtcgtcacgatgggtgggatttcggaagcacattgtgagaaggggcggggctaaaccaaccgttagttgaggggtggggtttcgatgtgacaaagaggcggggcctctggggaatcgggggaggggcggagctaaataaacaatgaggggcggggcttggaggggcagcggcagagcgaggagtgggatttgagtggataacattgctgaagggctgcggcctggggcagttcccctgggaactggtttgggatggaagctaggaaggcagtggggccaaaaggaaatattttagaggaaggggcgtggctggaagaaaatgtccctgggattgagtttttccttgaggcgaaatattctgaggtggatgggaggggcctaaggtaattcccctgggagacctttaggttttttttttctgtattgggggaaggggtggggcatcggtcctactttaggacctaaagaaattcccttgggagtgggtggggctcagagatttgggtaaagaaagggcaaatttagaattcggagaggctgaggcttagtgttctaaacggtggttggaagggggagggaggagcctcatggacgtgcctgggggtgtggcttggcttccccttgattttggccggtggatgacgctgtcctgaccacacccactcttgtctcacgcgtgtaggtcttccactttcgccttggtgcctgtcttcgcccacctgagcatcctccagagcctcgtgccagctgctggtgcagcctctcctgttgccatcagtgcccagcacctgtgctacagccatgtcactcctggcgaccctggggctggagctggacagggccctgctcccagctagtgggctgggatggctcgtagactatgggaaactccccccggcccctgcccccctggctccctatgaggtccttgggggagccctggagggcgggcttccagtggggggagagcccctggcaggtaagggcaggtggaaggtggagctggggagtggagggcaggggaagatgggggaggaagaactcatccatgtattcaataaatattgagtgcctacaatgtgccaggcactgttttaggtgctgaggatacggctgggaacaagaagaacatggtctgtgccttccagcagctcacactgtggggagtagaccagagataaattaaatgagagtgtattggaataagtcaaaaacacctagcagctgagctacaaaatgacaaaggggacctaatatagaatgggtagccagaaaaccttctccaagtaggtaacatgttgactgaggcataaatgatgggaaggaagccaggcatgatggcctgtaatcccagcactttgggaggccaagcggggagaattgctttagtccaggagttcaggacgtgggcaacatagcgagacctcatatctataggaaaaaaaaaattagccaggcatggtggctcacgcttgtagtcacagctacttg

SEQ ID NO: 1560504 - DNA, 4001 bp, Homo sapiens
gttgccagaggcccagggctggcgctggaggcaagactgaggtgaggattaggcgaaggatggggttggaggctgggtttgggagtcagagtggaagttcgggcccactctggtgtgggcatggagctggggggctagttgagtctaggcacacaggtgggtgggttgctaggtcacctgtgagagctgggcatgcgcatggctcccagctccccaatccagcccgtgttctggtcccggtaggtgaagatgcggcccccgatcctgttatctgcctccaggatggtgacctgagggagtccgtggggcgaggagggcccttcagctccacccactgaccatcccctgccctctaccaccccgtgccagccccctgccttcttccatccccacagtggcccagacccagactaggagagggtccccttctgtatggaggtgggggaacagaactgagtgagcagttccagactgcaggaggaaggctgccagctagactgcaaagggacttcccagctcggggagttcggagatgacccatatgcgtagaagcccctgggctggcccattctcattctcggattgcagtgagtaggtcagtggttagacctcagggcacacatccccttggtagagtttccctctccaccaacaggcgccccaccccaggacagaggagctttgagccagtgagacttccctctgggatgaaaaacgtgggacaggaaagtctggggcctctcagtggagacatgtgacagcagggggcttgggcctcacccccagactacagggaaagatagcctctccccccacatccccacctccaccccctcaaggaggaacgcggccgtgtccctgtgcccagggactccagcctgcagcaggagggactccaggtagactgcaagcagtgcttcccaccttgtgtccagcatcgctgagcaccttggcggccaccagcccggccacaccagcgccaaccacaatcaccctctggggcttcagggtccgattgagcccccaggtcaccaccttgagcagctgctcatagtcaggatcctgcatgcatttctcgaaggggtcttggctgcgttcagccttccagtcctgggaggccaccaggctgaggaggatggggacgaggacgaggaggtgcagggctgggaggaggaggacagggtcaacggggttgtggcaggtcgggggagaggggttctactcacttgttccagagcccctcccctgcttactcacccaatggggccatgactctcggtgggagatggtgtctggggtggaggagaagggagggctgttgtgactgaggcctgtgaccactgtagcctgactctgtctcccatgggctgcccagctgctagagccggccctcccccagtcactgtcctgctctctggacctgtgtcccctaaccccattccttcagagtcccctggaccgtccctgcctccctcctcaccggtctccacctctgccacagctctctcgggttcctgtctctttctcttcttttccctctttctttcctttctttcttttttttttaacagtctttctctgccatccaggctggagtgcagtggtaagatcttggctcactgcaacctccgcctcccaggttcaagaatcctcccacttcagcctcccaagtaactgggattacagacacccataaccaaacctggctaatttttgtatttttagtagagacggggtttcgccatgttggccaggctggtctcgaactcctgaccttaggtgatccacccacctcggcctcccaaagtgctgggattccaggcatgagcccccgcgcccggcctcttttccctcttcctcatctccccagctcctgactgcttctcagtccctatttctgtgggtcctgtctctctgtccccccaccactggccgtgtcactacctccagctcttggtgacagcaggacagcgcggtcctctccactgccctccactgtctctgctgtggccctttctctccccttaaactggcagagccccgcccacccctccttttgggaaactggccgagggaaatgaaactggtttcctggagctgctctggtccaatgctcagagtctagttgaggttggagaaagggggttggaggaagttaatcagtctattcacttccttttgccccagatagttctggggtggtttggaggccagaaatagatgctcaggtaaccgtgccaacaacggggaatccccttcggtttgcccccgtccctgatcaccaggccacttgtttctatcctcccctgcactctctctgcctccttgattcccacggggacagaggggctacaggtccctgggccaggccaactttcccctccaagtccctctccgtcaggtgtcgccatgtcctgcagggccccccatggttccacttccctctccacttgccacccagagcctcagtctccccctccgttacatgggtgtagcagtggggctggcagccgtggtcccggggtcaggacgtgggctctgagcccgccctcccctctgtggctctcgtctacagctgtcaaatgacgtctacagacgtcacagtgttttaggatcaagtgagtgaatccaggttaagttctgtggccggaacctggggtagtactggaagctgctcctttggaaatgccagctgctgtggccgcaggggcactcaggggttctatgagtgaccacccggcagagggaagcgcccaggcttcacccatccctgctttaagaaccacctcagtgctcagggcagggagtggggcggcaccttggagtgggtgggggtggagaaacaatagcagggactttccttggggtgggggagagggagccaggggctccgtgaggaggaaaaccagagggaggcagattctctgcagcaagggttgggtgggggttggagggcattaacaagaaggaagatgggaaactcccgcagtaaatcaaagagggatgcggttatggccgggaggggctggggggtgaatgtgagtaacaaggcatgtgacgcaggggcgggaggccgtggcaaagggaaatgatcaaagagctggagagttcagggaccgaaagagcttgggtcagcaaaaatagtgacgagggccaggggtggctcacgcctataatcccagcactttgggaggtcgaggcaggcggatcacctgatgtcaggagttcaagaccagcctggccaacatggcaaaacctcgtctctactaaaaatataaaaattagccgggcatggtggcatacgcctgtagtcccaactactcaggaggctgggacaggagaattgcttgaacccaagaggtggaggttgcagtgagctgagatcgtgccactgcactctagcctgggtgacagagccagactccatctcaaaaaataaaaaataaaaataaaaaatagtaatgagggccgggtgcggaggctcactgctgtaatcctagcactttgggaggccgaggtgggaggattgcttgagcccaggggctcgagaccagcctggccaagatggcgaaaccctttctctaaaaaagaaaaaaatagtgacaaaaatgttcccatggcgatcacctgccttggaggccgcctggtgctcagggctttgcacccatcgtaagcctcacaatgcctgcatttgaggccaggcacagtggcttacgcctgtaatcccagcactttgggaggctgaggtgggcggatcacttgaggtcaggagttcaagaccaacctggccaaaatgatgaaaccctgtctctaccaaaaatataaaaaattagccaggcgtggtggtgcacacctgtaatcccaactactcgggacactgaggcaggagaatcgcttgaacccgggaggcagaggttgcagtgagccgagattgcaccgctgcactccagcctgggggacagagtgagactccgtctcaaaaacaaacaaacaaacaaaca

SEQ ID NO: 1560505 - DNA, 4001 bp, Homo sapiens
attcctcatgctcaggaatatgggccttcaagaccctgaaaatactagaaggagccaaaggaatttttgcctagaggcaccaaacaagttcaatcagaaaaaccacaaacaattaggcacctctcagctccaggaagactcggctaagctccaggaagatagggagagtgataaatagcgcccagtggcggcaaggccaagcctggcagtcattgctagcctccaatctgaactaaagaatattccagacaacactggggcctgcagactccattcacaaatcccagggaccaagagccacccacataagcaaggggccccagcaccacggaacagggagaggagcacctgccaatgtcctgcggcctcctcctgctttccagctgtgaatgaggccctggttcccacacttcattcacagtctgggcggctactgtaactacatcccacgagaccacacacaaagcatcacgcacaagggacagtggcagcactctgagcaatccatggagattcccatccacaaatacctgaggaaaagagagcttaaagtcctaaatttgaatcctaacttcggatggcacctcgcgattccatgtggaccacaaatatgccatcacaccactcattttaaagagagcaaaatcttgaaaaagattcagcagcagtgaattaccggagtccagaaaaagaaaccactgaaaccgacgcttcgttgctgatccatgtcacctaagcagcaactggcaaacaatgttggaaatgtggagaagagatccctcattctcctcaaatttggccactgaactgggggaggagcatgcagaccgccgtacaccccaaataattcatccaggcggtgaattaactggggcagaacctcatgagtaacctcgagaatctcaatcgttcaactacttgagaaaataaaggtagaaatgggttttaagcatccacgtttcggggcccaggcttgcacccaagtagattgccggtctagagaaggcaaatactaacaatctggaaaaacattcaacaatgaaaacaaactaactaaagaaaaagctgaaaccctctcaagttttgaccctgatctgagagaggcctggctgaccagagatttggaaacccgacgaacccacaaaggcttcctcagcaatccgcgtgggaaggggcttccaaggagggggtccgcctctccgcgacctgtgaggacaaaggaggcgacttttcccgcctcgggaacctgggactctcctggaatcgggggcgggaccgggacaaagaggaggagggggtagggaaggagtgaggaaggggggtcgccccgccgcggaactcgggacccgagggggtgtgtgctccaagcacgtgcgcgcgtccccaggacccccgcaacagacaaaagcccagccgcggggaggcggcagccgggggcccggtgcgcgcgcacccccccgcgcgtggcgccgccgccggccgaggggccgcgtgcgggggggagcggctgcgcgcgcaccgagtcctcgccgccgccgcagccgccattttgtttcctccgcacaatggaagagagttaacggccgagcgcgggagcgaggccggcaagggaggaacgggccaggcgccgggatgagggaaccgggcggaggcggcgagcgtgggatccctccagccttgtcaccgcgaaccctcagtggggatctcactgagggcgggcggggggaggggcagaggcgggagcgggcccggccgccgccacattgacgcttaccttgtcggcgtccccttcttcgaccgcagccgccgccgccgccctcctgccacagcccgccggggtctgcccccaaaagccacgcggtgcgcgccgggctgctgggtccaactgcaatggcgagaagaggaggaggaggagtccggaccgggggcgagcgggcgggcgggcaggcgcgcgccggggaggtgcgggaacacgtgaccggctgaagccccgccccctttgacgccgcgttgcgcctcgacgcaggcccaacccaaatgggagggaggggcgaaaagagataaggggggggctgagggggtgggcgtgagttgcacgtggtgcaagcgggagtgtttgcgtgcgtagtcacgtgacttcggcacctttccctccgctttcgataggttgctccatcatgtgacaatggcgaatttcgcggtttccttcgccatctgacaacttttggcgccttccctttgccgtactgggagtcctccatcacgtgacgagggcacgctctggttttcgctaaggcgttttttgagcggccattaccacgtgatgcaaggcaagcgtcagaggcggagcctccctacggctgcgacattttgcgcctgcgcggccgccatcttacgcccgtcgccctgagtacgttagcggaaatggctccgagaggctttgacgcatgtgtacctttttagtggcggtatctcggccggggattttcgggctccagtggaggtggctatgctcaccccatctcccttgagaggcacagaaggttagagatgtgtgcgaggaacggccaggtccagcgtctcctcgttgctgccccttgagcccgggaccggcgccaatgcgcgcccgggttcttgggttctttcgtcccgcagacctgccttggtgtggcgtccctgggccgtagcttccgaaggctgcagccgacctggtcggggtcctctagcccgccttccccttcccccattgacagatggagaaactgaggcccaggccaaaaaatatctcactagagggctcaccgccatttcctggaaaaattggggctgggactcaacggacgctcgtccagcagcagcgcggagctccgaagtaaaggcgcccgtgaccgagtgctttgtccttacaagcgtggtgttcttgaatgcttccaggcgccttatgaggcccccgatgtacaatctgtgcttaactaaaccccactgtcttccagggtcaggttggccatccgcaggcgtagttgctaggaaggtttgacagatgtccgcctgttgattcagacgttcccaggatttggagcaagaagagcaaggaaggccaggcgcggtggctcacgtttgtaatcccagcactttgggaggccgaggcgggcggatcacgaggtcaggagttcgagaccagcctggccagcatggtgaaaccccgtctctactaaaaatacaaaagaaaattagccgggtgtggtggcacatgcctgtagtcccacctacttgggaggctgaggcaggagaattgtttgacctggcaggcggaggttgcagtgagccgagattgcgccactgcactccagtctgggcgacagagcgagactctgtctcagaaaaaaaaaagagcaaggaggtgttgaaaatgggtttcctggctgggcgtggtggctcacgcttgtaatcccagcactttgggaagctgaggtgggcggatcacttgaggtcaggagtttgagaccagcctggccaacatggtgaaacaccgtctccactaaaaatagaaaaattaactgggtgtggtggagggcgcctgtaatcccagctaatcaggaagctgagacaggaggatcgcttgaacccaggaggcggaggttgcagtgagccgagattgctccattgcactccagcctgggcgatagagtgagactcagcctcaaaaaaaaaaaaaaaaaaaaattcgccaggtgtggtggtgtgcgcctataatcccagctactcaggaggcagaggcacaagaatggcttgaatcacttgaacctgggaggcagaggttacaatgagccgagatggcaccactgcactccagcctgggcgacagagcgagactccgacttcccatcttaaaaaaaaaaaaaaaaaaaaaaaagaagtgtaaagatgtgattatgtggcagggggtaagggttaaaaagaaaacaagaacaagttttcctctgcttagccagcttacttca

SEQ ID NO: 1560506 - DNA, 4001 bp, Homo sapiens
catcaaggcttgcccaagtaagactgaaagttcaatagaacccacgctcttaagtgccccactgttacactgcctgtctccaggatggcagggcaatcagggagagaggagagggttatataacccagggggtttggccaggggcacaacgcacgcagagcagatggcagggagccatctgctgtgactcctccctgccctccagtatccttgcagagcctggcagctgggctcctgatcccagcctccctgatgccctcctgatggacgctaaacaggcccagggcttagttgacaggctgccagccaccatgtgcctggcacgggagtgagctgctggcacagactgtgccgaggcctcccaactccagctgcctcacagccctacacatccaaggcttgctttaaatctcctaagtcctgaaggtcagtggcatcactcctggctagcagaggaagcagtagagaagggtttggggagggagaggtcaagcttggtccctgctaggagagaaagggttgaggaaggggtctggagaaggggtaaatttcaaacagaggtgcaaggagtttagggggacacctgtggggtcagctctctccaaacatgtcacctagggcaaaccaccacacaatctctctgagcctcagcttcctcttgcagaaaatgaagacagaaagaacagcacctactttcaaggaaaaggtaaggggtaggtaagaaagtctacagtactgagctcagcagagggcaactgttatgaaactgtcactgccaccccctcgctggagcctgccctctgccccatttatcccatccaggttagggagcacagagtgctgtccatctgttctgtgaaaagagtcactggggaaggaggtaggtggggtgcgagtgccccggcagcggcagcttccgtgttctctcttaccagtggcaaagtccaggcctccatacacagcgtggcaatggagacagggccctggacagaacctcttaccagtccctctggactagtcggggctcgctttcccaccctgcacaatgagtgagctggaagcagcaccacgaggcccctccctctttgactgcccccagcccacctcccattctgtgccccgcaccttgtgcagcagctgatagaagagccccaggcggtgagcggcgcccagcaaggcggccaccagcgtcccgcaggccaggagcaggaaggaggggaataagctcccagcgggggcggcggccgcgggggtctccatgaggtggtacctaagagagaaagggcacttcccagacttgggcgcgacagggaacctctccggaagaaatcgcgccccttctcgcagcaggatccagggccacgacccttgccgccagtttctgtgcggccacgcccccaaccctgccagaccacgccctttgtgcgcctaggctcggggtgaagccatgcctctccgtgacaaggtcacgcccctcgcggggctagccccagtcctttacatcaccaccactcccacccaaactagccaccacaagtcaaggtggcgacgacagcaccacacagttatcttccacttacctacttgtcaatggacaggcggaagccccgcctctctttccacaaccggaccccaaatctcagccccagtagtgagcccgccccatgttacgtcaccaagaggcacgaggtcacgcccccgggttagcgggcgcgaccctccacgcaacccacgcctctcccttaaagagcgcacgggcccgagcctgatccccgaccccgggccaggctgggtcgaggtcacatcgcatcaggatgtggttctcccacaccagctcgacccccgacgctattcaccttcacctccaggatatggcgctgcctccagcagaattcggccccctccgtgtcacgtgacccgggagcgtggccgtgcccgggtggcccacttggctcagcggcgccccgtagtccggcccgatgcgcatgcgcacagtcggagccccgctccggggccacccgaaagagccttgcctctactggccgcctccctcatagaccccgcctccccttgcctttcattggctcgcactgcagacctcacacccattttatgttttaaaaccaggaggccacgcccctcagcggcttcaggagcccagacctttgggggcccaccttccgcagctttccattggccccacggtggaagcccgtaggttcaggccctccgaacacagctcgctttccacaccagcggggccgtaccagagcaagaccatgtctcacaaaataataataatacttaaaaaatggtaaattttatgttatgtatattttccacactataaataaatatttgtgcatgtatatatatatatgtgtatattttttgtataataggtatagtagtaagcaaaggaaattcacactgagtcacattctacaaaatgcctaaccagacctctacaaaactgtcaaggtcatgaaaaacaaagactgaggcactgccacagactagaggagggaaaggagctgtgacaactaaattcaatatagtaccctggactggatccaggaatcaaaaaaaggacaaatttgtggataaagttggtgaaatccaaataaagtttggagttgagttagtagtaatgaaccagtgttaatctttttgtttcagtaaatgtattatggttatataagatgttagcattcagggaagctggataaagagtagacaaaaattatcttgctatctttgcagcttttctgtaaagctaaaaaagaaaaaaaaagtcttaataacaaggatacaattttccagagagagagaaagatgttgtaatagatgtaaattctttcttgggagacaaagctttaacatgctccaagactaattatctgaccaatctctccccagataaagaaagattgtcactaggcaaatgtccaaaaagcttctcagccgaaagctggattattcaacagtccctgaaacaaatatacacagaggacaagtgatttttttaaaaagggaaacaagcctggcatggtggtccatgtgtgtaatcccagcactttgggaggccaagacaggaggatcgcttgaggccaggaatttgagaccaaccggggccaaaaagtgagacccagtctctccaaaaaacaaacaaacaaacaaacttagccaggagaatcgcttgaacccgggaggtggaggttgcggtgagctgagatcacgccattgcactccagcctgggaaacagagcaagactctgtctaaaaaaaattttttttaaaagaaaaaaaattagctgagtatggtggcacgtgcttgttatcccttttgcttgggaggttgagaagggaggattgcttgaacccaagaggttgtgtctacagtgagctgtgatcgtgccactgcactccagctggggcaacagagcaagaccctgtctctaaaaaaaagggggtgggtgtggggcaggggaggaaacaaataccatgtatctaaattgatcgaaatttaaagagaagtgcaacaaattattgagttagagggatacagtaagggcctctcttaggacaagcagaaggactctctaaggaggtgacagttgagcagagagaccaggaggaagtgaggacatgggccccacaaggatctggagaaagagtaatccaggtagagaagatggcacatgcaaaggccctgaggtgttttattaatttcctttgatggccataacacattaccacaaattgggtggcttgaaacaacaggaattaattctcttacacttcgggaggccagaaattcagcatggaggcatcagtggggccatacactctctcgagatctttggggaggatccttaccttctccaacttcaagaggctccaggcattctttggcttatggctgcgtcactccaatttctccgtatatcttcagatggccttattccctgtgcctgcatctccttctgtatctttttttt

SEQ ID NO: 1560507 - DNA, 4001 bp, Homo sapiens
aaaaatacaaaaaaaaaattagctgggtgtggtggtgggcacctgtaatcccagctactcaggaggttgaggcaggagactcacctgaaccagaaggcggaggttgcagtgagcaagatcatgccactgcactccagcctgggcaacagtgcaagactccatctcaaaaaaaaaaaaaaagaaacacagaggtcaagtgacctgcccaaagtcacacagtttgtaatgagaggagctggaatttgaacccgagtagtctcgccccagtcagtgcccctaactatcacctatgctgactacaaagaagtgctggcttcctagattccccttcacaaccaccctctggggagtggtggtggggtaaaggggaggtgagcagagcagctgaccttcctaaccacctccacagatctccaggagccacagcgtgggagaagatgctcagcctcactctcctgggaaggcctccagctcaagcggggaggctggacaggaaccagcttcctgcatgtcagatcccaggccctgtccagagccaggcctcagtcttccaggatggaacatggcctccccacctcggactccttgcccagaagctagacctcagtttcccggccttggtttcctagcagcgccccaggccagaggctgcaccagtcttccaaggcagcacagcgctttggtcattggctctgagatttccagacaggctgagaagcaacaccaccgccgccgccatccactctcatctctctgaccccaggaagtgggccagcatcgttccctctcggcagccaactgagatccctgggtgattcagcctctgtccctgacatgataattacaccaacagcaattcccagaaccccagctattgtcctatatcaccccacccctcctcttgtctcctgtgctgtaacacgagggcagacactctgcttctccccagagacatttgtcctttgctccaagcacacaaaaaactgggaagcccttcccactgtctgaccttcaaaggccctgctgctgctaagctgcttctccctactccaagaaaagaagagctccttaaggaaggggaacagcccacccgggacaaaacagacaaaggccacaccccaggaaggtctttcccacacaaacttgggaggggaggcatctctgcagacaacaggacagacacagcacgaggcagccgaggctgtcgtttattgcagatggacacggattcagggaggtgaagaggcagatgggctgtgggctctgtgctcagcatcccacagcaggaggggcaggagacagagctcaggatgggatcttcctgatggtggaggacccggcctgaccacagagtagctgcaagaggcaaggccccgagctgacaccccctgggcccccattccgcgggatgacggctccagagacgctgagcgatgtcattaggaagaaggccggaccaatccagagacggtgcatcctcggcgtggagcacagagctctcgagggctggcgatccgggttggggtggaagggagagttacccgggtcttcgcccctccgcggcctctggcgtctctctgggtgtctggcggctcggacggcggtcagggtcgctgtagcggcggcggcggctcagcggcagctggagctggggtcgcggcccgccggggactcccaggaggcaggagagggaggcagcggcgggcgccgggacaggcggcacgcccgggcgggcagcacacggaggggacggcgcgctgggctgtgggccggcgggtgccgcgggagaccgcgtgggtacccagatgagaccgtagtacacggcgagcagcacggcagctagcgagacgcagaggaagtaggcgcataccggagccaagcgcagccagcgcccccgcgggccctcgctcagccccgcgcctccggggctctcggcgccgccgcccacgcagctggtcccccgcatccccgcagcccactcggctccgcgccgcagaccgcacaggccccgcccccaccaggccccgcccccaccccgcagaccgccccgctctctaaaccgcccgcctccggccccgcccccgccagcatggtcacgcccccacgcgagctgccgcctccgcatcctaggcccaccccctccagcctccgccccaccaccgacaggcggaggtgctaccccgcccccctcgctccagccccgcccccgcgcttagccccaccaccccaatcaccgcctcctcccgccacaacacggttctcttcccagactcggacttcatccagcccaggcatctagcccgcctcggagcccgccccctcgtcccgctcaagccctgcctggagccctaacccgccctgtgccgcagccagtctcacttctctacctgtcggactgctctactccagtgctcgagccctgcccgctacggcctctggctcccacactctagttccggaatccccgctctcctcccgcgcgggttcccgcgcgacaccccgaccacgcccccgctgacggccccgccccatgcccatggccagagccccacccgcgcgcgctgaccccgccccccgctctaactccgcctgtcaggattccggccccgcccaggcagcctagctccgcccccgcgggacccgcctcctccagcacactctcagcccgctttcaggtatcctcagcacctcaggccccgaggttccagctccgcccctcaccgcaatcgcgccccttctcccagctcctccccaacggtcagcttttccctctccctagagccaaggggtccagactaggctctggggtagaaagaacacagcctggaaatccagataaacccctcctcacgccccctccccatcaaggcggggaagcttcagtcccctcccagcagcgtcttcaggaattcggggaggcctgcgggaggggggagggaagacggatcagaagggtggaggaagaccccttccttccgcctcttccgccacagaaaagcccgccaagcacagcgacccagcctgccccctccagaaacacagttcaagggtgagcggaagcactgcgtttaatacgacagggctggcgcccgagtaattcaagcccttcggaagtgtcaccggctgccaggcctcggatgcaatcctggaggcgggagattcggcctgaagactggctcgagccgcccagggcctccatgggagactaacgcggaagcgtcccagccgtcccagtgccgtgacgtcccccgttggtggggcctgcacccgactactgccctggccccgcccggctcgcagaccctggctcctccccccttagatttaaccctctcctggctggagtgtggcagaagcagaggacagaggagcgaggcggtgggaggttagtgcagagcgcggaggccgcggtccggcgggcgcggtcagcgagcggcccccggcagcggaggggccgccaccaccttgcagaaacgcaccctctggaagtcggtgatctccgccgtctcctggccttcggggcctgcctctgaggagagaaggggctgagtcagcggaggggagcagtcttcccacctcccccccggcccagcacccctcccccgtctagccacgtctctcatccagttcgagcccttgccacagcaggctcggcgctaagcggtttacggggcccagactaatcctctcagcggacccacgcagcagcaaacactcccaacataaccgtttacaatcgaggaaacgcgggtgtggcgagatctggctcccgaccaacaagtggcccaagacagagggtctgggcccccgcgccacccaaggctgcaaactgtcctctcccacccccgccccatctcacggccttcatcaacctccaccaagccagtcctagaggacccgccctcccctttccttcgccaacgcctgctattctaaccagtccttccttggctctgcccccaaaatcctaatcccactctgggggaaggggaggccatctg

SEQ ID NO: 1560508 - DNA, 4001 bp, Homo sapiens
ctcatgcctgtaatcccagccctttgggaggccgaggcaggtggatcacgagatcaggagattgagaccatccttgctaacatggtgaaaccccatctctactaaaaatacaaaaaatttagctgggcttggtggcaggcgcctgcagtcccagctactcaggaggctgaggcaggagaatggcgtgaagccgggagacggagcttgcagtgagccgagatcacaccactgcactccagcctgggggacagagcgagactcaatgtcaaaacaaaacaaaacaaaacaaaacaagaccagactggccaacatggtgaaacctgttgtttcacctgttcacctgtctctactaaaaatacaaaaaaaaaaaaaaatcagctgtgcatggtagtgggtgacctggggagtggcctgtaatcccagctacttggaaggctgaggcaggagaattgcttgaactcaggaggcggaggttgcagtgagctgagatcgtgccactgcacttcagcccgggtgacagagcgagactccatctcaaacaaacaaacaaaatacaaaaattagccaggtgtggtggtgcgtgcccgcagtcccagctactctggaggctgaggcaggaaaattgctggaacccgggaggcagaggttgcagtgagacgagatcacgtcacagcactctggtttgggtgacagagcgaggctatgtctcaaaataaataaataaaaataaaataataaaataaagtaacataattgtgaaaagcaatacttttcaaaagcaatacttttaaatacttttaaagctggacacagtgactcacatcgctaatcccaacactttggaaggtcaaggtgggaggattacttgagctcaggagtttgagaccagcctgggaaacagagtgagactccctctctacgaaaaagaaaaaaaaattagctgggtgtggtggcagcacctgtatcccagccactccagaggctgaggcaggaggatggtttgagcccaggaggttgagcctgcagtgagccgagatctcaccactgcactccagcctgggcgtcagagtgagaccctgtctcaaaaaacaaacaaacaaagcaaaattaaggcaaaaattcatgaagatcaaaatattgaaattttaagacaggatctcaccatgtacttgcaagagcctacctctcctgcctcactctgtttctggcccctcagggggactcatgctctgaggactttcttttttttttttttttgagacggagtttcactctgtcgcccaggctggagtgcaatggcatgatatcggcccactgcaacctctgccttccgggttcaagcgattctcctgccttggcctcccaagtagctgggattacagatgtgcatcattatccccggctaatttttttaaaaattatttttagtagagatggggtttcaccattttggccaggctggtctcgaactcctgacctctggggatccacccgcctcagcctcccaaagtgctgggattgcaggcgtgagccaccacgcctggctaacggctctggggactttcacacgcgcgttcacacacactccagtgcggacccacgatctgtgcacgcagccggcaggtgagccctgggcacatgcatgcaaacctgcccacctccctgcacgtgtgcatctgcgcctacgtgcacctgccccacctcggcttcccagagcgctgtccctgcccgtccccactcacggtcgcctccggtcgcaggcctcctggcttcggtggaccagcgggggcccccgcacacgcgcactagcgcgcgtacgaagtggtggccgcacaacttctcacgcatctctggggtgggcgcggggcccaacgcgaacaccagggcagggcccagcagcaccagcgcccaggcgggcagacgggggtccatggtggtgggtggcgccggggccaagcggggaccccctttataggcgcctgggccgtcccagctgggggccttggagaagggacagaacattcttcaggaccgcccaggaaaaaggtcaagggtggggttagtgccagagcctttctcccagggccagggccttggatgtacttctcccagagggagcactgggcaacgagtctttcttttttatttttttcttctttttttttgagatggagtctcactctgtcacccaggttggagtgcagtgacttgatctcggctcactgcaacttctgacacccgggttcaagcgattctcctgcctcagcctcctgagtagctgggattacaggtgcgcaccactatgcctggctaatttttttttttttattttttatttttagtagagactggggttcgccatgttggccaggctggtctccaactcctgacctcaagcgatccatctgcctcggcctcccaaaatgctgggattacaggcatgagctgtgcctggactattattatttttattattattattgagacaaagtcttgctctgtcttccaggctggagtgcagtgatgcgatctcggctcactgcaacctccacctcctgggttcaagtgattctcccacctcagcctcccaagtagctgggattacaggtgtaagccaccacgcccagccacctatttttattttttatttttgagatgagttcttgctctgttaccctggctggagtgcagtggcacgatatgggctcactgccacctccctatccctgactcaagcaattctcccacctcagcctcctgagtagctgggactacaggcccacgccaccacacccggctaattttttgtattttttttgtagagatggggttttgccatgttgcccaggctggtctcaaactcctggactcaagtcatcttcccgcctcagcctcccaaagtcctgggatcacaggcgagagcgaccacaccagggtatttattcatttttgacataggatctctctgggttggcctgtaatggcaggatcatagctcactgtaacctcattcccctgggctcaagcgatccttcagcctctgcctcctgagtagctgggactacaggcctgcaatacaatgcccagctaatttttaattttttaatttttatttttatctttttagacagagtcttactctgtcacccaggctggagtacagtggtgcgatctcgactcactgcaacctttgcttcctgggttcaagcgattctcctgcctcagcctcctgagtagctgggattacaggtgcccaccaccaagcctggctaatttttgtattttttagcagagacggggtttcaccatgttggccaggctgatctcaaactcctgacctcaagtgatccacccgcctcggcctcccaaagtgctgggattacaggcgtgcaccaacgcgcccggccatttttaattttttaattgtagaggcaggggtcttgctatgttgcccaggctcatctagaactcaagtggttctccctactcggccttccaaaatgctgggattacaggtgtgaggcaccacacacggccaagtcttcgctattgtcttaaccagtttaaagagatgaaatagatcaactgaaaagtaataatcctgccttttctggggggcaggggggaagacagcgggcatcttccaagaccagaaatgttcagaattttgttgtttctattactgtacaaatgagaaaactgaggcacacaggccaggtgcagtggctcatgcctgtaatgcaagcactttgggaagatggggcaggtggatcacttgaggtcaagagttcgagaccagcctgcccaatatggtgaaactctgtctctactaaaaatacaaaaattagccagatgtggtggtgcatgcctataatcccagctactcgggaggctgaggcaggagaatcacttgaacccaggaggtggagattgcagtgagccgagatggtgccgctgcacaccagcctggggacagagactccgtcccctcaccagacaaa

SEQ ID NO: 1560509 - DNA, 4001 bp, Homo sapiens
gccaggatggtcgtgatctcctgaactggtgatccacccgcctcggcctcccaaagtgctgggattacaagcgtgagccaccacgccccgcctttttttttatttttttgagacaaagtctcgctctttggccaggctggagtgcagtggtgccatctgagctcacagcaacctcctcctcccgggttcaagcaattgtcccgcctcagcctcccaagtagctgggactacaggcgaacgccaccaaacccaggtaatttttgtattttgagcagagaagggagtttcaccatgttggccaggatggtctccatctcctgacctcgtgatccgcccgcctcagcctcccaaaatgctgagattacaggcttgagccaccgcagctggccagattttcttaacaagaactccaactaaccgccacccttcattgagcacctactgtctcccaggcacctgggggcggggctgggggggggtgggcccggggcttttagacattatgtgattgacagagtcgactcagcaaacccggttggtccactctagcacctgattttacatgcacccgtttccccatcaatacatttaagagcttcaattccttccctccctgaccccttcctcatcacgactgatttccttttatggagaaatctgaaacagtaacccaacagatatttttaaagcagggcctcagaccccacagtgggaaacccaggctatattccttaaatgattgcgccatcttcatcttacaaccccaaaggtgcctattgtcaagcccaaggaagatgctgcccacacgtgggagaggggcccatggggtcagggggaacgaaaggctcactcaaggtcaaaggctccttcatgaagcgcagggctgaggggagaggaggggtcaaggagacagcagacaagggacagtagtccagattcttgggcagaacgggacacacagaggctcaagtcctggctctggcactgactttagggcaagggagttatgcgtcctacatgagcctcagtttactcctctgtgaaatgggtgcataactgtatctgcctccgggggccactgtgacagtccagagagataagatagactaggctgtggcgtgcggtgataccaattacaataaatagggtaaaaaaccgccactacttctgctacaattgctgctgttgctaaggctttagaatttgcctccggacatctggaaacagaacccaaaagggtaaacatggacctagagtccggggtggccacgggcctagatccaaggtagttgggtagaggggggctctgcagtccctgaccccaggcagcgtcacccaccggtgaggcactcagggcgcttggctctacctacaccatatgcgctcgggggacttggctgttcggggctgtccagacccagtgaccccacttcccggccgcgacccaaagatgacgcgtgtcgtgtctccggagcgacttgggctcggaggggccggggcacgggtcggaggcgcgctccagagaggagcccgcggcggggcgggcaccggggcaaggttcctcgggctcaggtcgggcacgcagggcgcggaggcgcgagcccgggcgggcaaaggccaaggtcagaggcttcccgctccccctacgcgatgcaggagctaccgtcctggccaccgccccccgcccctggggagggttctcagtccacaagcgggggctcgattttggcttgggtggggtcctctccccatcgcggcgctccccgcccacgcccgcgcccccagactcaccctctccggggtacaggtggcccgcggcgcccagtagcagcgcggccaccgccaccagcagcggcgcggccgccgccccccgccggcccccggtggccatggctgcgggagcgcggggtctcctcggatcagagcgcgcggcgctggcccgcgggggtcatgctccgaggcggccacccaagaggcgctgggggccgcgcgtccttctcttccacgcccgcgacccgcgggccgcagcccccctgccggggagggcccagaggcagccccgggaagggcgcgcgcggcttcgccagctacaaatactgagcggaggcccttgcggtggtggccccgaccccccggccgctgcggcccgggccccgtcccaggatctcggggcccggagctccgcgctgcgcccgggactgtctctcggctctcggccccgcgcgctctgggtcgcgatctgcgggctccgggacagagggacgcgcggaccgacggactagctgactggcgggcgggcacctgggctggcgggtggcgggcgggcggcgggagagagggctgctcgggcccgtaaacaacgcggcccgtcagctgggccccgtgcgggccgcgggaaaaggcggcgcggatctggcctaggaagggactctgcgcccgggagaggcccaggagagggagggaaagcttgcaggggagggaggtgccgcccggccccgccccgccccgcccgcctccccgcctccctgtgccgggccccgcgcgggaggccctgggcgcgccgggaccgagggcgcgccccagatccgcgcgccctacagccccgagtctcctccagtttcagacccccggaggcgccccacaggcccgacgcagcggcacagatcctttctctaccattttgctattttgttcatagtgggctttggaggattcctgttgattttttaaaaaatactgcattaaaatgtttattttggtgactcgaggtggttttggtttctttctttttttttttttttcactcccttaaattttgcaccccaggcgagtagtgtctcactcgcctttcctcagtccgggcctggccagcgacactcgtcccagagcgcgtgggcgcccccagatgtcccgcccgcgagtgcgccccggcccaggggcgagacccaagccaggcccctggggacagccacgtgcccgcgtgcccagtgcgctccctgtgttcaagttggagaaatgacacctggaaaaatgtgcagacgcttctgaaagggcaaagacgacgccaaagaagacgccggagacctcgaatagggcgcaggtggacatctctgattttcagcagaccagcctgtatgtgtctgaagtctagcaacgacattcaccaacaaggcgggacagcggttccacctaccttactgcaggagaggaaggggctttcagtataggaaagccagaactcaatgggaggagggttcctccacccctcactcctgtgtggtcttggaccagggacttttctgtctctgggccagtttcacttgtgtaatgggtttaataatacctgcatgccagttctggggaggtacccgggaaagaaaacttaagaaagcgcccagcacaaccctagacccaaggcattcattcttctttcattcaataaacagtttgctaggagctggacccactgttcatgcaacaggccaaacctattcctgcctctgggcctttgccccagcatttcccttgcccgtaacactccaggatggcttcatctctgaagtgccatccctaaccatatttttgcaaatcctccccccagttccgtttccttctctctctctctctctctgtttttttttttttttttttttttttttttttttttttttttttagatggagtttttctctgttgcccaggctggagtgcaatggccagatctcagttcactgcaacatcacctgcctgggttcaagtgattctcctgcctcaacctcccaagtaacttggattacaggcatgcgccagcacacccagctaattttctgtatttttagtagagacaggatttcaccatgttggcctggccggtctcaaactcctgacctcaggtgatccaccggccttggcctcccaaagtgctgggattacaggcctgagccactgcgcctggccccttctctctcattttcatagcatgtttaccccactacctgcaa

SEQ ID NO: 1560510 - DNA, 4001 bp, Homo sapiens
atgaactcccgggagcagggaaagcagaacttgtgtccgggcaccgaggggcactggacgaagtgggtgtcttctagccgctccctgcacagggtacagcacaggggggccccaggggtcgccccagtgccgctgccacccccgctgacagcttcggcccccgctgtgggactgacttctgcttcgccgttgcgggccacaaggcgatgctgggttggcggctgggccgtggaggaggctgcagggctggcgccccctgcacgcacaggccccccgcctccgccagggtccttgggtgagtggcccagggcttcggccacattcttcagggcggcaatgggcgagggcacaccaggggtctcagcggagtacgggccgccgggtgccacccagtgccgttgctgctgctcctcggtggtcatcttcccagccgcctcgccctccggctcgggggatgccttgcgacggcgcggcgtgggcgccaggttccgggatggggctcgcgggggtgggccacagagagccgcaggggccggctctgggtactgctggggcagggcctccgcgggagctggctcgcggaagctgcggacgccgtcggtaagcagctcgcccagctgccgccattctcctgatccatgccggcgttcatattcgaggtacttgaagcccgaagaagccagtgccttgcccggctcccgcagagcatcgtggaacatctggcgagccactgccaggacgccggcgtacacattgccggaaccacaggggtattcggtgaagagcttcagctcgaactcgtatcctggaggacgggcagtagcatcgaaggcgaacactcgccccaccagcccgtgatccttcttgaagcgcacattgaacggggcgcaggcggacagcgccagtagctgttcccgcactgctttggggcgcccgtgccattcctctgcccggcctcgcatggcctcgttcagttctgccagacagtccgcattcctctgctgcttctctttctcgaaatcggagccgaagaggggacgggcaggactcaagccgggtgccagcgtcaggcctcggcttcccaggccagacactgcagctgccagcagcccagggggcatcaagccaggcatggagccaagcaaggcccttcgcgccccctcagccacggcctcctcacggcccagcccattggccaggcgggaccccagagtgtactccagggcgggcgagggcagggggaggcggcctgatgatgtggccctgtcatagcggtcctggcccgacacgccgccgccggtccctgacggctggggctgggcctgcgggggcggcagctggggcccctgtgcggctgccgccgccaggtccttggtggccgggtgcttaagggccgggggcccgggcgagcggccctcggggagcacgtggctgcgcttgagctggcgggcggcatcgatgagcagttcgatgcggtccgcgccctcgaagttcacgcagccgcgacacacggcctcgctgaagtcccacaccatggcccacggcatcttgggcaggtcgcacaggtagcaccactggcggcgggacgcctgcacagacgccatggccccagtccgcgcgccgcccagctcccgcgttccaccggccgccgacgtgcgatccgcgccgccaacgttcgatccgcgtcccggggacagcgcgagccacggtccggcctccggctcggcctccccgccggatccaggcccggccccccttccccgccccctgggccctaagcctttctgctcactcccgcctccctcgcgaaggcaggctgaggcacgtcggcgcccccgcccggtccgggctccgagccgaggcgcacagctcgggccccacgatgggccgcgagcgccgccgcctcgggctcccgccgctctcgccgccgccgctgcaacggccgccgccgcctccacctccttcttctgccccagaggccgcttcgcagggaaagttacataacacgcctgcaaagccttctgggaaacgtagtcccgccggggccggctcttaaagggaacggcgggcagacgcgggctgggggggttgtcgcctctgccggcgcaaaccttacaaccttctccgtggggccggagttcagcgcgccgcaagatgctgggacacaaaggtggtaggcgaggatgcaatacaaatgatcagagctactccggattcagaaattgtgggggtgggtggacaggcttccgggcttccaacttctgctcggatttgctgtgcagctttaggcaaaatgtcttgccctctctgaacctcagtttccccgcccagcaaaggtgggccaatgacggattaggaaagtagcagcttctggggcggggcggagaagccctgattggcttcagagcagggacgggaagctggcaactaggtgggggtgggggtggccacctggcacttcgtcctccccccggaatcctagatatatgcttctggggcccgccacagccagagaagggagaggactaagggcttccgagccagagccttgtctcagttgtttctctgctaaaagagtggggcgactggccgccctctaaccctgtcccagctctgcccgcgcgctctggtctctaaagggttacaccatcgggggctcggcgtcccccacccgcttcactacaattcccaaaatgcactgcgggtcggacatagtgacgcacttccgccctctgggaggtttggggaggccttccagattcacgctactttcccggctaccccccgcccccccacttttctgggggctctttacgtgcattcggagcgtggcgtttgggggacccttatcttctgttgctccccagtttgagggaagagtaaggggttaagaagtgacgggcaagaggagggagttgctggggaagggcaaacaccagaccaacctttccccaaccttgagcgctcactacctggaaggcccaatcaggctgtgaggacccttcttctttcccaggcattgggaactggacgaggctgtctttggggaagggcggaggcgggtctccaggttccaacccacaacagcccctttctctaggcctgggtccgtgttaggtgctcaaaaatatttgaatgacgtaccagttggccctggttttgtctagtgaggggctgcttgtcccttctcctcccgtcccactggaaccgcagcagctctgattctgttacccagacctcacaattttaaaatggtttcacaattttgtctactacctgtatttgaacacttttctcccttaaaaaaaagatttatcaggctgaagtgggaggattgcttgagcctggagataacaggctacagtgaaccatgattgcgtcactgcactccagcctgggcaacagagcaagatcctgtctcaaaaaaataaataaaaataaaaagatttatctatttttgcctcatcctaggtaatacgttcacaatcatgggtttcatgtactgtggttaccttaaaaaaaattagtgaaaactatcgactcattcaagaggacattaatatgtcacttaaagttgcctttgggctattatttacgaaacactaatgggagttaaggcttctggccagattcagccttcaggtggactggattggcctctgaccagctgtggccttgggccagtttctaaacttcttggaaaaaatggagaccccctccagtctccttttatttgggtaccttcagattgaatgcaaacatgcatataaatgcttagcttggtgcctggcacagaaaataagtgccacaaatggaagttgtttttaagctggacagttattcaaatattcaacccctcttccatgctgggcaatgctggggacatagcagtgactgagacaggctttaagccttgcccctgagaagccccagcctggtgatggaggcagatagtaaatttactcaaatgatgaactaaaatttgtgatgactgcggtggg

SEQ ID NO: 1560511 - DNA, 4001 bp, Homo sapiens
agtagagatggggtttcaccatgttggccaggctggtcttgaactcctgacctcaggtgatccgtcctcctcggcctcccaaagtgctgggattacaggcatgagctactgtgctcggcctcttcaaaagcctttgaaacctctttggtttttgttttgtttcgcttttgtttttaaagagatggagcctatgttgcccaagctggcctcaaactcctgggctcaagcgatcctcccgccttggccttgcaaagtgctaggattacaggtgtgaaccaccgcccccggcccaaaaaccttttctttctaagccaggcttccaagtccaacttggtgtctaatcccgtgcaccacctgccccgcgacaccctctgtgataaccccgcccctcacactgtttaccacctctggcatatactaattcggtagttaggaacctcagatttggggctccaggcctcacctctgatgtttcaagaaccatcccccagtatctatcctacaaccaagagccccggcctctagaaagccccaaacccccaggatgcatttcctttgcgtactaaccggctttcccggttttattcccgtaaccctgcagctccaaccctgcttgcgccccaccatcagtcagcggatccggctagccccgcccctcccgttctagccccacccaccagcgttggcacgagcccgcccctcgcgcgccacctccgccttctcagccgggcccactaggagtcctttccgcccagcgcgcagctccgggtttccagcgtcccaggtcgtcgcacgcacctggaagattccgaaatcctcctgctgtgcatcctgccgtaggccgtgcttccaagggatgcggaagcgcgtgcggctcttgttcacccaggccacgccctccagttgccccaggtccagctgcgacaccagccagggcaggatccgtggctttggggttcccatggtccggcctgcgcgtatagggcatttcctgggcgcgaccggcctcccccggacccacctggcctggagtttccgcacccagacctccttctcacgggccacggcacaggtccttcacccatattttcgggggtacaaacaggaaacctcctcttcccatcctcccatcctcccgagaggctctctaatcagctagggttccttcccatatccatggcacatccttccccagcgtcttcagtgcagaccctccactccctcaattccgccagtatagacctcctccctcccccacatcatcgaaagtaagtatccccactttcagggtagcatcctctttccctagttatttcagtgcagaatcgattcacgtgtaagcctctacctcctgcacttaccccaatgtagacccccttccacagtccccctacagaagatctcccaaaacatttccaacacagaacttccattcaattcccctccgactgcccgcctccctcctccaggacagagcacgccccaggtttcgagactgaactacccccatctacggagtccacccctccctctctagaaccccctcagtgtagacgcctcctcttttcctctttcctccctactttttctagtttttctgcagccgacctccagcgtcggccactgtagctccttccttgctccactttccccagagtacacagcctgcctttccactctccgtgcagacccatcctctttcccgctcctcgctctcggacgccaccaacgctctcccgggctcttccgcgttacctacgatggaaggtcggggcgtgcgggcagctggaacccacccctgtcttggagctccgggtagctctcaaactcgaggctgcgcaccccctttcccgtcagctgagctctagagcgctggggctttctttttgatcgacttcttgaaataaaaccaactttatcattctttgggtaacagacccaaaagccgatgggacggcccgctgggctgttcccgcccctatgcccttttttgggtttccggccagaggcatgctgggagcgtcacatgcaaattgagcgtgcacccagcgttccgccctttctacgctgggccggttatcgacccggcccagtgcgcaggcgcgggaaagttgaactaataaagtttgtacgagttcagtggaggagaccgcaagttgagtggaggaggcggcggtggggccccggaccaggtcagcggggtgttgacgaggggtggggtgaggagggaagaggagggggccgggatccagtggtgggcaccccagtcccgcttctctgatatccaagggtccagggtcctctagattccagcaggggtcggagatttggaactacacctcacagcaggctgcgcggcgaagaagcgcggacctaggggaagatttgccctgaaacctcttgggattggtagttcccgatgctttaagggtttcaggagtttggcatatgcctcttatagaatccaggagttggggcgctaagcctcttcttcctgggagacctaagggtctggggctccagttcctttttctctaagactcagaagtccaggaccccagctccctcctcctttagacccacgaatctgggcacccagccccaccacctttccttggatcgaagagtctttttcctgatcgctttttcgtctgaggactcaagagtctaggcccccagacccacactctccaaaggacccaggagtccaggccctcagcaccttccttgggactcacaagtcctggtccccaagcctccacttcttgctaaacccttggagtccagtccctaaccctctctctcacaggtgcctccatggcaggctctgaagagctggggctccgggaagacacgctgagggtcctagctgccttccttaggcgtggtgaggctgccgggtctcctgttccaactccacctaggtaagaggagtggcccttctcccccaggggccagcatttgaggctccctcctaactcttgctcctggtctcagtctgtctcctctctttatatctggctctattctctgtctttggggttttggagagaggtcctcagcgggggagggagggagttggggaaagagactgcttgcaggggatctctggtggggtcagtctctgaagtcctcctctccagaagccctgcccaagaagagccaacagacttcctgagccgccttcgaagatgtcttccctgctccctggggcgaggagcagccccctctgagtcccctcggccttgctctctgcccatccgcccctgctatggtttagagcctggtaagagatttccatgatcatctatgaagccggcagaacacgggataaggtgctagtttaagatcactcagctagggggtggctgtgtggagtctctagcaccagccttcaggacagaaccgtcctgtcctctcccctccccagttagatttctgtcaattctgtgggttggctttcagagagcatttggtcaatctggttgttgtctctttccttccataactacttccctgcccctaggacttttgtagccaggaatacccctgatagaggggcagaagggctggttttcaatcacatctccctggctgttttagttgcgtgactctggggaaaatgctttctcttccctgctcccctgtttttccaatagcagagtaggaattggggaggaggtcactggacttgatcaaggtgacccacaagtttcctcataggtgtgaacctggacagactagtaatggctgctgggagtgctagcttgaaaaggggttcacagcttgggagaggaagtgctgtgatcaattggtgatgtctgtagtgagtgagggaaggggatactaacagtaatgtcttgtgtttgccttccttggatgagatcatcttcaaggtctagttgagctctgacagtcttttggagacagattgttgctctgtcacccaggctggagtgcaggggtgcaatctcgactcactgcaatccccacctcctggg

SEQ ID NO: 1560512 - DNA, 4001 bp, Homo sapiens
cagggtctctctgtcatcgaggctggagcacagtgctacgatcatggctcattgcagccttgatctccttggctctagcaatcctcccacctcagcctcctgaacagctgggaccacaggcgcatgccaccatgcccagctactttttaaattttttgtagagatgggagtctcactatgttgtcccagctggtcttgaacttccgagatcaaggtcctcctgcctcagcttcccagagcgctgggattaagggcatgagccactatgcctggcctgaaattctttataatatttgaaccaggggccccatattttcatttcgtactgggccttgcaaattatatagccagggcaaattacatagccagggctgcataggaaagggtggtacaggcccattcagaggaaacagctgcactcctgcggtggctgggattggagggtagggtggaggggacccagacccggagccagactgcctgggatcaaatcctggctccaccacatacttactgagtgatgtgaggcaagttacttaactctctcctcactctcctcatctgaacactgagaatgatacctacaatcctggcaaaccacctcctaggatctctgtgacttgaatgagttatgacataaagcagcccataaaacggcgcctggctcagggcaggtgcctcgtgtcattggcatcaccatcatcgtcattattcttatcattagtaatattcttagctgtgtgactttgagcaagtcctcgccctgtctgagcctcagctgccccgtgggggatactcctccccacctcgcagggctgctgtgatgcccacaaaccccgttcagctagccctaggctgactttgggttcagacgcccttgggttcgggaagccagacatggggaccacctggacaccaggagtcatttccatgaaaccccacccctgccatggcagcccttgcctcccggggttcagttcccctcccaccgcccagagctcctgtcgtgatggtcccccctcagatccctcctcctcaccaggagcttccctggtcctccctcttcccactcaccctcctctggcccatcatctctaaaatacatttactcactaagggtcttcagggtgccctgggagagctgctcatgtctgggatcactgtccccatttgacagggagaaggactgaggctcagacaagacaaatgaggtctcctcatccagaggcatagccaggaccccaacccaggtccccaggctccttcacccacctagagagctactctcccttcagctgcatgtccctgcctcctgcattgtctccttgccccctgcaccccgtctcttcacctcctaccactcaccccatcctctgctaccccactccaccccccacagaaatatgtccttaagacattgttcccggctgggcatggtggctcacgcctgtaatcctagcactttgggaggccgaggtgggtggatcacttgaggtcaggagttcgagaccagcctggccaacatggtgaaactccatctccactaaaaatacaaaaattagccaggtgttgtggcgcatgcctgtagtcccagctcttgaacccaggaggcggaggttgcagtgagccaagattgcaccactgcactccagcctgggcgacagagcgagactccgtctcagaaaaaaaaaaaggaaaaaaaaaagacattgttgcctccagatctgagcctcctatcctgggtgtgccctctccctagtatggtctgcggtgggaagagtaggaacctggaacaggtcctggcagcaaggggcagacaagtcagtggttggaatttgggctgagggggtccggattagaccataagctcctgctccgcccacgcacaggggcccagcgagagagccctgggggactcacctgccctgcaggctctccctctcccctcacactctccccactgataggatctccttccctcttagccaaggtcagacaccgttgctaggacccattatcatagcaagcagcagcttattggtcagccagacctggtgcaataatgcgacagtgatgtcagggggtggggcccggaggtggagcagggaccccaagccccagctgctcatggggtcaccacccactcacactgggccctccagttcccctgaagactccagagagatctttctaacaccaagacctgttcaaaatcctccatggtctccatcaccccccaaggacaaagtctcagattcacagattggtttccaagggcttggccctgctaccactccaccctccacccaggggactgtcagttccccagagaagtgtgaaagttgatgatacaaattcggtcattgctggtgggcacagtggctcacgcctgtaatgccagcactttgggaggccgaggcgagtgcatcacttgaggccaggagtttgagatcagcctgggcaatgtggtgaaactccatctctactaaaaatacaaaaattagccagatgtggtgcatgcatgtagtcccagctactcgggaggctgatctgctatcttgtaagcccaataatttagtcattgatttcttttttttctttttttgaaacagtgtcttgctctgtcacccaggctggagtgcagtgacacaatcttggctcactgcaacctccgcctcctgggttcaagtgattctcctgcttcagcctcctgagtagctgggactactagcatgcaccaccaggcttggctaattttttttttttttttttttttttagtagaggtggggtttcaccatgttgcctaggctggtcttgaactcctgacctcaggttatccgcctgcctcgcctcccaaacctcctgacctcaggttatgccgcctcccaaagcgctaagattacaggtgtagccactacacccggccccttcttgtcctttataagtgtctctgtcctgtctcccctccgggcttcctctctgcccaggccaggctccacagggccttctccattctcctcttgtagggaatttacaataacgctactcagaggattttcctgaccatctgcaggccagttctggaaaggagcctctgagaacaactaaggagagagaggcccagaaggggaatagactagctcagagccaccctgagagctggggaagagtgggctgttggccgcatagtacagagttcttaagccacaggtgaaagggaggtgcagggcaaaagacacacgactcactcatgctctcactgactgacacaaacacacagagctgaagagagtgaacaacatggttctcagacttccccggacaccgagcacacagaccagcagacagcaaggactccttcccaaaatgcatggacacgcacccctggcccaagagagaagggaaagacacagaaagagcctcaaatacagagttacttcgtggctgggcatggcggctcactcacgcctgtaatctcagcaatttgggaggccgaggtaggaggtttgcttgagcccaggaggttgagaccagcctgggcaacatagcaagaccctatctcttttttttttttttttttttgagacggagtctcgctctgtctcccacgctggagtgcagtggtgcaatctcggctcactgcaagctccgcctcccgggttcctgccattctcctgcctcagcctcccgagtagctgggactacaggcgcctgccaccgcgcctggctaaatttttttgtattttttagtagagacggggtttcaccgtgttagccaggatggtctcgatctcctgacctcgtgatccgcccacctcggactcccaaagtgctgggattacaggcgtgagccaccgtgcctggccaagaccctatctcttaaaaaaaaaaaaaaaatgagccaggtatgatggtgcacatctgtagtcccagctactcaggaggctgaggtgggaggattgcttgagcccaggagttcaaggctgcagtgagccgtga

SEQ ID NO: 1560513 - DNA, 4001 bp, Homo sapiens
gatggtggggagggctcaaagattagagttttcaggtaaaatcttccagggggctgggcagagagtctcacgactgtaatcccagcactttgggaggccaaggagggtggatcaccttggtgggggcagggcctggaaaaaggagcctcagggccccagcagataaagtgttaagcctttcccttttaattctagggctttgggaagcctgggtgggggcatggcttgaggccaagagttcaagaccagcctggggaaacagtgagatgctgttttgcagcctgtagtattagctactctggaggctgaggcaggaggatcatttgagcccaggaggtggaggccgtcagtgagctaggatcgcggcactgcactccagcctgggcgacagagtgagaacctgtctcaaaaaaaaaggccgggtgtggtggttcacgcctgtaatcctagcactttgggaggctgaggcgggagtattgcttaaggccaggagttcaaattcaacctagccaacatagcgagaccctgtctctcaggaaaaaaaaaaaaataataataatagagctaagccttgccccaaactcactgggggagggatctcatggacctccatggtcgcacctaggtgcctagggtctcgactaacggacccagccagaaagccggcactcacctccgcagcgcttctgcctggctctgcagcgccgcccggaggcgctctagctcctcgcagccgtcgctgctgccgcagttcgccggtagcacaaacagatccgcagctcctaaccccgcgctgttcagcagagctgctgtctgatcacgggcctgggcggcagtctgtgaatccccaggacggaggttccgcacagccagtagcggggtccctcgggccagggcggccagcgctgcctctcccagggctggagccaacggttccccgttcccctcgggtccgggcagcaccagtaccagcacgttggcttccgccgcccagggccccggcgctgcgggtgggcagctcagctcgcccagaaaaaggcctgggcccgcagctcttaggctgggaaccccggagtccggccgtccctcgggggcctcgagcgtctccacatccttgtcgcacagcgctgcgatcagcgcggacttccccaagcccggaggccccaggaacaaggcggtcacgtcaccctgcggcggaggcatggctggaaagcaacgggtagagaagacctgggtcagggagcacctagccttttcctttcctagccgccccactcggaacccaggcctcagtccttcaccctgtccccttcggttcttgagtgtcactctccaggacctaaaaaatccagagcccagaccctattcccccagaatcccaggcgtcctgtctgtccgccctccctctagatggaaacgtttccctttctgcttcaaaaactctgaaatcaggcgcggtggctcatgcctgtaatcccagtgctttgggaggccgaggccggaggatcgcttgaggccaggaattcgagaccagcctggccaacatgtggggggactctctggtagagtctccgtctcgataaaaaataaaatttagccgggcatggtggtgtgcgcctgtagccccagctactcggaaggctgcggcgggaggatcgcttgagcccaggacttggaggctgcagtgggccgtgatcacaccaccgcactccagcccaggcgacagagcaagaccctctctgaaaaataaataaaaataaaacctcagaaatctggcttccagtccctcctccctcggacacattgttattttcatctttccccttcccccttccaaatcaccaaccgagcaaaaagccgacccacgggagagagcgcagtcggtggcagtaggtcagcagctgagaagcccggcccctgggccgcggcggacggaggccgaagaggccagggagcggtgatttagagatgccgggacccgtcccggtagctttaacctgacgtcactccctctcccaagggggtgtgtcttggaaggccgacagcagagacccagcccttcgccgcgcctgcgcagaacggccgaagtgtgcacgcccctctttggcggcctcagggcctagaacaatgaatgagtcaacgcgcctgcgcgccacgagagcctacccacgcatgcgcaaaaggcttagctagctaagccgcgggaggctgaacgtcatcaaacgcgccatagggcagagaaggacccctcccgttattttgaggaccgggctggtgcgactatactactgccggatggcaaatccgggatctcggctccgagaggctcatctggcaaaagggcgcggaaaccacgggggccctgagactgagtggtccctatcccacttctctctggggcggcgctgtagccagcggctgacaggcgcagcgaaaggcagccctctgctgtaaggaggaaaactgaggcctgggagcaggaacctgtaggcagcgcttgagggtagcgggatagcagctgcaagcgcgcgtgggaggcgggggctctgggcggaacaaaaatcacaggatgtcagaggatgtttcccgggaagaactgggataaagggtgggtatcactacctgccccaagacacttgagattgggatgacgctggtgtcaaagatcaaggcttccacgctgagttcagggagttagtttgatgcagcaggtcataggtcacaccagtgagaagactctaggggagtcccaaacccaggaaatccagtcctttgggaggtttgaagcttcttttagcaagaactccatcaattagagttcaaggagatagtatgtcgtaggggtcaaaggcaggcaaggagagcctctggcgatgtcaaaggtcatagacttagggtgccctctaagactggtaacagatgaacagcttcacttatgcacgctcctctcctgactagaagggtcccagcaccatggaggacccgaaccctgaagagaacatgaagcagcaggattcacccaaggagagaagtccccagagcccaggaggcaacatctgtgagtacacatggctggcgggctagaggagggtggggtgcaggagctgatgctaagatctctgtggcacttcggtgtccaaggcgccacagagttttgcctgttgagaaggggctgtaatggtccctgagctgctctagcaggaagtgcatctcctcacaccagcttatgtggccagagtactcaccctcctctggccacataagcaggattgcaatgcttatgcattcagagggatagggtggcttccaggagaggcttgggttggagatgtggctgggaatggttctattgggagagaaaccccaagattctggtcccaactctgccctagactttcagtgtaacttgggccttggtttccttgactgtcaaaagagggtggtacttcccacctcacagggtgggtatgggattaactgcagcaaaggggaaagctaggggttaatgatggtagccagtttgacatgtaatagcaacacctcctgctcagtgttttattatgagctaggtgtatttattctcatattatgaaccattttaacattcattatctcattgagtccttctaataataggccctttaaactgggaactgaggcagagagaggtatttgtaacaagagctgtagtctcaatgcccttgagccagagactaccaggaacacacctgcagttgaacacgttgggtttctcactgcaatgaacacagaccatggggggactgtggggtgtctcactaagaatggtaaaaacgacacaggatttgggcttgtgggtggtgattttggggaaggttcaagcaaaattgttttgctctggattggatgctaccaggaagcaggggcaattctatgattggctatcgtaataaatcttacccagaaggaggaaggaaggaggcgaggctcaagctctgactgataaagcagcagcagacatt

SEQ ID NO: 1560514 - DNA, 4001 bp, Homo sapiens
ttgcggtttcctccccatggagtgaccctctcacggccactcatgtgctaactcttcctcccctgtgcaggaggcgggacctggacacccgggccccaagggatggttctgagggaaccaggagctggagagctgacaggtgggtcacaagggccctggagtctctctgctgagggcagtgaggagccatggaggggcagatctgggggccagcatgtccaaaagcctaggacaggcatgtggagcacccaggaactcccctctggcctggtaggagtgtgggtcacaacaactcctagggacagccgagcagctgcatttctcaaaatgatggatacacaaaccctctgacctcaaaagctgctcctaagcatttatcctacagacattcatgtgaaacgacacaggattattcattacaggactcttccccagagcaaaggagcagaagttaagtatcaatgtccacaatgagggtactggttacgtaagtcatgccataactatactctgttattcctcgcagccagaaaaaattacgaggaagctctttaagtaacaatacgaaaacatgtttgagagaagtgaaaaagaagcagaacagtgtgtatggaatgctcctttttgtgccaaagaaaaaagggagaggaaaatgtgtctgtgttgcctatatctatatctgctatctctggcaaacaagcaagaaacgggagactcaggcgggtgaaccaggcaccggggaagtctgtaggagccttttcactgggtcctattctgtttcttctgaattctggacaatgtgcaacaagttgtctagtcaatactatatacaataaagggttggcataaagccaaaacccggcaaaactgatctatggcgtcagaagccaggacagtgactgcccttggaccacagtgatggaaacgacgacggcgggagatcctgggatgtggcgcatgtttgacttttttctttggatacttgtttacaccagggtgctccctttataaatatttatttaagctgtgtatttgcaaaccgttcgattttctgcgtttgtggtattattccagaaaaagtgttcaaaatgcaaaatacaaagatggcttcaggcccccgccgtgcggttgaactggaggcaaaaggccagagagcaggaggtcggcgctggggcccagtgggacaggggagagtcaggaaggggcagctgggacggtggggaaagtcggggagaaaggcccccagtttctggtcgagcgaggggcatgatctgaagattcataggggatcccggggaggggaactggtttttgggagatgaaaaattggggtgagggtgggtgtgtgagagagagagatgtgaaggggaggtctgggctggagagggttgggcgtgtcctgcggaacgaggagagattcagcctgggtggagggtacccaaggccaaagggggcgtggctggaggtgggcggcaacagggggcggggtagggccgttgatttccccacccggtctcggaaacccggccttggagcccggacttcctggctgtgtgaccttgggcaagtttctctttgtcttagcctcagttttctcgtcggagaaatggggattaaacctgcccaccccccagcgctgttacagaggcggcaggcgcgacccggggacgcttccaatctctggccagccaattctggcggggccaggtggagtcctccttctggtcctgtgaccttggcccgggacgcccaggcagagcctcagtttccccatctgctaggcggtaaggtcggtctccaaatagcgccagcagcgagagaggacttacccggaaggtgccgggttcgagcccggaacggcccctctgcaggtgaggcgggggcaccctcacctctcggctctcggacggccaccgctgaggcctcttgcgggcttcccagggctggttaccgtttcgttagggctggacacgtggcccaccccctgcaccgtccgttttccgcccacttgggcccagccgtccaatcgacactcatcatgctctgcctcgccgctctctccggccaatccgcatgtgccactgcctctgcccgcaatcggcgctcaccaactcaccccgccccctgcctctcaaccaatccgcatatgcagctgctttgctcccgccccagggggggcggtgccggcaaggctgtcagtctcaagaaaatgattagctcgcaaaggcgccgtgggggcggggcagcaggtcgttctgccaatggagagccgtagagggcgtgagtggcggccgacggggcggagtcgcgcggtggtctccgaaggctcagactctggctggagagagggcgtctcggccggccccattgcacagagcagaccgccgaggccgggagagagagagaggggtcttacctagagtagaggcatgtctgcggttcgaaacctggccctctctcaagaaacggaggcttacaaagatacccaagcactttccaggaaggggctggctgagggagcgatcaagtgaggaatttgacgcccccctgtcctttgcgctctgtgctgcctcagtttccccatctgtacagcacctgcctcctcgggtggtgtttagaataatttagactctgtgcttggaaatggaggttgagagaaagagagaatttcctatctgtcttggaataaatccaaactcctcccaattcatggtcggccttcctggtccgtgcagacctcgcctctcaccactccccctgctcactccgctccagccacaggggtctcctcttgctcttccctcaatgtcccaccgcagggcctttgcacgtgtgctgcctcagcctggaatcctaggactccccatggcccaaccttccaggctttcaaagcctttcctgaccacctggtgtcaggtagcccttccatcaggtcgctgtttttaatttttttgaaacatcaaaaaaaagaaaaaaattgctctatcacccaggctggagtaccatggtacgatcacagcttgctgcagcctcaacctcccgggctcaagcgatcctcccacctcagcctcctgagtagctgggaccacaggtatgcgccaccacacctgactaattttttaatttttttgtaaagatggaggtctcactctgttgcccaggctggttttgaactcctgggctcaagtgatccgcctgccttggcctcccagagtgctgcgattacaggtgtgagccgccgcacccggccttgtgttttattttcttttcagcactaactccaatctgaattggaaatgaatcttgctttttgaaaaatgcatggatatactcttttattgtctgttccccgccaaaacacacacatgcacacagaacagggagctccctgaggcaggggtcccgtctgcctcgttcacagctgaatcctcaagtcctagacctgggcctggcccatagtaggcgctcgatacatctttgggaataaatgacaggagagcagacattaggcagaggtgagcctgggtgagagtgaggggtggatgcccagatggggctaggcagaaggaagggggaaggcaggaaagcaagaagaggtggaggtggggcccctgggcccaggaggagacccctgaggcagtggtctgaagtgggggtctgggttggtttattttcccaggggctgccaggaagggagtggacaggttgggggctcctggagagggctgtagagccgtcgtggaggggcctctggcttgtcctgggttctgggctgggttgtgattggcctcatggggagctggtcccccaaccctcggggatcccctgagaatcccaggcacgaggcacctcccagcagtccacccaaccccagtcgggagccacgagatcagcctcttcccccagggcatgctggggaaggggcagggggccgcagaaatgtgggacctgcctcaggtccagctggcccaggtcgcgatgggacagacccggcgctggca

SEQ ID NO: 1560515 - DNA, 4001 bp, Homo sapiens
gacccgctccacccgggcgttcgcccacctcaatggtgcgcagcaggttctcggctgtgtcgttgaggcctggaatcacctcacagaagcgctccgtgttcgccgtccacagcactatgactttgtccagccccgcgctagaccggaagtctcggatgtccctgcggatctgctccagctgtgggttggatggtgagggtgtggggaggatggagagggtgtagggaagttggttgtacatactctcggactcacagaggcctgggctactcagttccccgggtgtcaagtgaggcctggattcgcggggtggggcaaaaagagggaaccaagtggcgaagaacaggtggcaggaagcaagggatgcgggatgggacagcacctgctgcgcacgcgagcctgggatgaggttgtccgcgcgcgcgctctggttggccgcgatgaattcggggatgtaaacagaaggccggggccgcagggcctccatgtgcggccacagttgctcctgcagcccccagtccagcaccttcgcgcgccgcatcgcctcggccaggttcagcgacgagatgtcccagcctggggggaccctcacactcggccctgcccggatcctgggcccctccagaccccatctcccatcccgccccaccccggcccagggctccgcccaccatcgaacacgaggtcgttgggcgccaccatgggcagcaccgcgctgaagggtacgaacacctcctggccctcggcgtccaggcccaggctcacggtgcccgcctgagtcagcgagccgtagtagttggcctcctgggggtcagcagacacggcgaggtgacgggtgggagtggtgaaagggccgcgacccggcctgggccccacctagactctcaagccccgccccactttcgggcatttttcagttccaggctcacagccaggacggaagccgctgcccccaggcccctcccctgagacctccggcaccttaagctccgcccctgtaagactcccgaggagtccccgctacctcgcgaaacccttccacggggtccgcctgcagccaggccccgccccctgcaagccctcccgccccacagagcttcgccccctgcaggtccctcgcccactacaggcctccagacccgggcaggtccctcgcccctgcagcccctcgccccgcggaaccccaccccctacagcccccctggtcccgcagagccccgccccctgcaggctcccgcccccgcccgcaaggactcccaccaagcctccctacccaccacgcccctcccgcccccaccttgcggccgctgcgcgtgggccaggacaaacgcagtcgattggccagcaccgcggcggtgagtgtggagccgttgttcccgccccagccgacaagcatgaccccgagccggggcacctgccgggcggtccggaaggtgaagcgcgtggacgtggggtgcacctgaagacaggccgcgcagtgaatcccgggtcccgtgcccttctccccgagccgccccgctctccccagcacgcctccttcctcagccccctggtccaccttgagaacgccaccctcgcggctgacgcgcgtcgtccggtactcgtattgcgcctcgatggcctcggggccgtagaccacgtccgggctctcgacgaagaactgggcggcggcctccatcgcggcgggctgggggcccggggtgagcagggggtcagcggggactctaagcggccggggccaagccagcctgggtccccacggaggccgtccctgccccgaaccgcactcaccggcgcagagtcgactcaggcagcggcggcggacagcgcgggctctcgggcgcgcgacctccggagaaaagcgctgcggcccctcccccgccccgcccccttccccgcctctcccgcgctgggagggaggggcccaacgtctggagacccggttcgaggcccgacaacccagagccaccgtggccatcgggtccccgcctggcggaagtggccaggcgtccacgagcgcggcgcgtataggttcacctcgctcgctccgcagcccccaggggctcatggctgcctatcccccctttacaagaggacaatgaggctacacatgagcccagccacaagccagggggtggagctgggcagggaagctgggcctccgggggggtaggtagggggtctgggtcagagacactgcaggggaaacaggcagaggaccagaactccaaagccagaatctcctcggagccacactgccacctactcccccttcgtgggcagcagcacctaccaggcagtcccatcccctggctccccatgtccgcccccatccatctcgggggacaaagtcactctgtccccacggggctcacaaggatggggcctgtttggcctgtttccccacctgcagcaggagggcttggcaggagtgggccggagcgggaggctgttcgctggaaaggggaggggacgcacaggcgggcagggccgaggcaggggaggaatgaggcctgcactgcagggcgcccccctcatgcgcgctgataagggagcgtgggaacccagcgggcaggccggggcagctcccccaggaactttccaaaacaagcgcctggaggccggaaagtttccaccactggagctggcccaaaaggtggatagttgggaacgtttgcaagagacagggcctgaccttggaggatgagggcttaagactctgggtccaggcctcaccctgaaggggccccagtctgagggagttggaagtggactgggacacccccgccccagtgggtgggaactcacaggcagggcccctgcaagacaggctccccagatgagggggctgctggcaagggttttgagacatgaagaggagttcactgaaagaaaactacaggccaagccacctgagccacccagacagggcagatgaaaaattggctacgtgggaggcagtttggggtcttgggcagaccctgagggctggggatagggagtgtgaaagagtatttggtgtttgttcctggttcttggttagacattgagctcaatcaccagtggccaacgatttaatcaatcacatatatgcaaatgagacagttggggctcagaacacagaaactcccctcagcctcaagttatggggccttggcctgccccgcgctttgagcagggcatcggaaagctcagaatcgagtctctccgaccttctcctgccctcctgcctctagcccctttctcccctggaaaccatagaaaccagaattcctcttccccaaggcaggtcagagacactggagcccttctccccttaaaacaaaaaaaaagccacaaagccggcaaaggtcactctctgcctgctcccttgaagaccctcattccgggagggtcctgcccataccctggaggaaggaatgctacccagagtctaggaagtctgggcaggctggcccccctcccccacccagtctgctccctttaagatctacagtgtttcaacacattgatacacattcttcatagaacctaagccgaaaaataggcagtcagccaggcacggtggctcatgcctgtaatcctagcactttgggaggtcaaagcgggcgcatcgcttgagcccaggagtttgagaccagcctgggcaacacggggaaaccccgtctcaatacaaacaaacaaacaaaaaatagccgggcttggtggcgcacacctgtagtccagctgcgtgggaggctgaggtgggaggatcacctaagctcaggaggtgtaggctgcagtgagccatgattgtaccactgcactccagcctgggcaacagagtaataccctgtctcaaaaaaaaaatggggtttaggggaaaatatggaggggctgggagggtggcatgcctggaaaaggcatggaagcttcacggcccgcccataccttgccctgtgcgcctcctccatttggctgtgagcattttccggagttctgtgagctgttccagcaattat

SEQ ID NO: 1560516 - DNA, 4001 bp, Homo sapiens
gaccaccgggctgccgggcggcactagtggcgccttgaagaggaagctgagcagggacagcacggggtggaaggtctgcggctcggggtccatgtcagtgcagaagctcacgcgctggcacagctcggtcagcagcgctaggtccagcatgatgggtgcggccagcagcgagtcctgcggggcgggtgggtcaggagatgggggcggtggccaagccctgcctcccatagcagcccctgaagccgcgccgcacctcacacgtgttgtgcagcaccagtgtgttggttccgcccagcatcagctccgaggtatactcatccagcgcgcgcttgctgtcacccacgtacggcacatacttgatgaccacctggagtgcagcaggagtttgcccgggtccctgccacccctcgccgggcaaccccgcgcccgcgcccgcgccccacgcacgcagtggtcaggctcttcgccgggcgtatagagcactgggttgctctgcaccatgtcgtccaccacgttgctcttggacacctccttagagcggaactgcaatggcgccgataggttctccccatcgttgttgcccaggtggttgtaactcacgatggacatggtctgtgggtacaagggaagccccagcagctgcaggccctgcggccccacaagccaggtgctcgcggcccaggcccccttcctgcactcggcagctccctaggcccacgcaccttgaggccggagccaatgaggaagtccacaagcacggacttgactttggtctggcctgacttgaagtcatctccgcccacaaaaacccggtgctgccacgcgagctcaagagctccgggcaccagggtgttctgcggagacccattgaggaaggcacagccctccaggatgctggccacggcgaagagcgtggagggcgacacctccagaccgagctgtgggcaaggcgggcagtcagcacagagctgtgtctgtgactggccctgcctgacccgctccacccgggcgttcgcccacctcaatggtgcgcagcaggttctcggctgtgtcgttgaggcctggaatcacctcacagaagcgctccgtgttcgccgtccacagcactatgactttgtccagccccgcgctagaccggaagtctcggatgtccctgcggatctgctccagctgtgggttggatggtgagggtgtggggaggatggagagggtgtagggaagttggttgtacatactctcggactcacagaggcctgggctactcagttccccgggtgtcaagtgaggcctggattcgcggggtggggcaaaaagagggaaccaagtggcgaagaacaggtggcaggaagcaagggatgcgggatgggacagcacctgctgcgcacgcgagcctgggatgaggttgtccgcgcgcgcgctctggttggccgcgatgaattcggggatgtaaacagaaggccggggccgcagggcctccatgtgcggccacagttgctcctgcagcccccagtccagcaccttcgcgcgccgcatcgcctcggccaggttcagcgacgagatgtcccagcctggggggaccctcacactcggccctgcccggatcctgggcccctccagaccccatctcccatcccgccccaccccggcccagggctccgcccaccatcgaacacgaggtcgttgggcgccaccatgggcagcaccgcgctgaagggtacgaacacctcctggccctcggcgtccaggcccaggctcacggtgcccgcctgagtcagcgagccgtagtagttggcctcctgggggtcagcagacacggcgaggtgacgggtgggagtggtgaaagggccgcgacccggcctgggccccacctagactctcaagccccgccccactttcgggcatttttcagttccaggctcacagccaggacggaagccgctgcccccaggcccctcccctgagacctccggcaccttaagctccgcccctgtaagactcccgaggagtccccgctacctcgcgaaacccttccacggggtccgcctgcagccaggccccgccccctgcaagccctcccgccccacagagcttcgccccctgcaggtccctcgcccactacaggcctccagacccgggcaggtccctcgcccctgcagcccctcgccccgcggaaccccaccccctacagcccccctggtcccgcagagccccgccccctgcaggctcccgcccccgcccgcaaggactcccaccaagcctccctacccaccacgcccctcccgcccccaccttgcggccgctgcgcgtgggccaggacaaacgcagtcgattggccagcaccgcggcggtgagtgtggagccgttgttcccgccccagccgacaagcatgaccccgagccggggcacctgccgggcggtccggaaggtgaagcgcgtggacgtggggtgcacctgaagacaggccgcgcagtgaatcccgggtcccgtgcccttctccccgagccgccccgctctccccagcacgcctccttcctcagccccctggtccaccttgagaacgccaccctcgcggctgacgcgcgtcgtccggtactcgtattgcgcctcgatggcctcggggccgtagaccacgtccgggctctcgacgaagaactgggcggcggcctccatcgcggcgggctgggggcccggggtgagcagggggtcagcggggactctaagcggccggggccaagccagcctgggtccccacggaggccgtccctgccccgaaccgcactcaccggcgcagagtcgactcaggcagcggcggcggacagcgcgggctctcgggcgcgcgacctccggagaaaagcgctgcggcccctcccccgccccgcccccttccccgcctctcccgcgctgggagggaggggcccaacgtctggagacccggttcgaggcccgacaacccagagccaccgtggccatcgggtccccgcctggcggaagtggccaggcgtccacgagcgcggcgcgtataggttcacctcgctcgctccgcagcccccaggggctcatggctgcctatcccccctttacaagaggacaatgaggctacacatgagcccagccacaagccagggggtggagctgggcagggaagctgggcctccgggggggtaggtagggggtctgggtcagagacactgcaggggaaacaggcagaggaccagaactccaaagccagaatctcctcggagccacactgccacctactcccccttcgtgggcagcagcacctaccaggcagtcccatcccctggctccccatgtccgcccccatccatctcgggggacaaagtcactctgtccccacggggctcacaaggatggggcctgtttggcctgtttccccacctgcagcaggagggcttggcaggagtgggccggagcgggaggctgttcgctggaaaggggaggggacgcacaggcgggcagggccgaggcaggggaggaatgaggcctgcactgcagggcgcccccctcatgcgcgctgataagggagcgtgggaacccagcgggcaggccggggcagctcccccaggaactttccaaaacaagcgcctggaggccggaaagtttccaccactggagctggcccaaaaggtggatagttgggaacgtttgcaagagacagggcctgaccttggaggatgagggcttaagactctgggtccaggcctcaccctgaaggggccccagtctgagggagttggaagtggactgggacacccccgccccagtgggtgggaactcacaggcagggcccctgcaagacaggctccccagatgagggggctgctggcaagggttttgagacatgaagaggagttcactgaaagaaaactacaggccaagccacctgagccacccagacagggcagatgaaaaattggctacgtgggaggcagtttggggtcttgggcagaccctgagggctggggatagggagtgtgaaa

SEQ ID NO: 1560517 - DNA, 4001 bp, Homo sapiens
tccggactcggctcccagccccacggctcccagccccacgtgaggctctccagtttcacaccggcctctgctctgtcccgccctccctgaacctgcccggccggtcctcctgattcaccaggggagagccacacccaagctgggggtgacggtggacaaagtaaacaagagtgttcagggggctccttggggatgtaggggtcacaggggagaccaggtgggctcccggctaggccaaggatcctttggcgtttggggtcacacagcccttttgcgaatctgatgcaagctgggggaatcgctttgctccctagaaaaatgtacatacaaataggctaaggggtggtgaaggtttgtgaccctttaagacagccacaggccccagattaagaaatgtggggtagaaagtgcaccctgcctgtctccctatcccagtgttcttcagattccagaggattagacagatgtcagaccgtcgctgcaacaatgtatgtgaacacgcacggcaggctccttagtcctacaatttcaggggttcctgggccccataaagtcggtcagtggccctccattgtagacccccaggagtggagacagtgcaggaaggggaaaggagagaattaagaaggggtgcctggagtgaattagtaacctggctgtcagagggaggaggtcagtggatggaagaggttcccggagatgaaattgctggtgggcaactaacagtaaatgggtagagaacttcctaagcaaaggcggaggaataaggagttttgcgtgatgtggctcaagggcaggatgggtcccactcaccccagacctgtcctcgggatcgctggcacctccgcccccggccaccacgtcatcctcagactcgtcgaaagaagaggcagaggagaagccgccgctgcccccctcaacccgggaggggggtcccactggctgggcctcaggctcaggggtctcaggggtaatgatgaggcggggcacagggcacagggggctacacttcaggtgagagtacaggtgagtcagcaattctccaggctctggttcctctaatgggccatcctcaggctctcccaagaggcagtctgtcccaggtgctgtctgggaaccgtcagtgctaggttgtgtccaggagccatcagtatcctgttgtatttggaaaccaccagtgccaggctgtttcctggctgcttcagtatcctgttttttctgggagccatcagtatatggctctgtccagggaccttcaatatcctgttgtgtcctggagccatcagtatacaattctttccaggagccatcagcacttggctcttttgagggacaggctccttctgggtgagtctggaggctggaactgttctggtgggtccagaggttatcagcccaggacttgaccctctctggctgagtctgtgacccatgcgtttccagctctgtccagggcccatgaacccctggctgtgtccaggggctggcctcctcgggctgaaactggaggtcggacctgtgcggatcagtccaaaggccatctgtcccggtctccgtccaaagacaagtcgtctccagctctgaccagctccattctagatgcgtccggaggctggacctgtctggctccgtcttttgcttgggcctctcggtctctactccaaggccagctgccgcgggctcagtctgtccgtctgtccagaattctgcctgcggactctctgtccccggcgcaggcccgaggccggccctctcaggctcgctgtggaggctggacccctctgtccgggcccagggcccgcccccctccggccgccccgccggggcccctgcgccgggcccaggtcgctgctgtcccggctgccgccgccgccctcctcgcggcgcctccagtcccatgcgggccgccgcgggcagcgccccggcctccgcctcgttcaggctcccacggcacgggcagcgcctcatgcccgctccttcggttcgggcttcggccgacccggcccctcctatccctttaaatcccgcgaggggtgtggctggggagccccgactcccgggttccggcccgcggagctccagcccgccccgccgcgcaagggttaaccgatactcccctcaaaggggaaagccccgaagccccgccccaccggacgtgacggaacggaacgagacggagccttgtccgactccgcctcccaaggggagggggtttgcctctgagcatccgaagcgcggccaggtatgcatctagggcaccggggtcctggtggcgcgccagtgggccccctccctccacccctgtgactaaaccaccctccctacacggttgaatgacaagttcaaccttccctaaaacccccggtgacgagtccagccgcgcgcccattcttcacgcaggggcgggacggactttcaaagacttggagttcccacgggtgtgggttcgagaccttcctctgccagttcccagctccgctaccctgagcaaatgacttacgctccattggattttccgtaagaaatctctgtcatgtatagagtacttgttctgtatcagaccctgacacgatttcagttcattctccaaggctgaacaatagggatgccagggctccattttacacgtgagaacagaggctcagagatctgccggcctctaccctttgcttgcagctacggggctatctgacatgatctcatgtatgtgaagcatgtggccccgggcctggcactgtcagttgtagcccagtaggattatttattgtcctaggtgattttgatatattttgcccccaaggctgagctgccacccagctcctgagtcagccgttcacctctgaagggggagaggaggtggtttgtcttgaaattgagtcaactgggggagacattgggcacaggtccaaggctctaaaatgagtcaccttttcacagaccaatgagagaaatcgaaggcaggagcccacctagtacctcatacaggttgggaaggagaagtccagagagggatgagggcttttctgaggtcacacagtacgggaatagagacaaagaggcctgattcccgacaagaggggttggggcagcggggttctgtgggggaagcatcggcatccctccctctcccagtggtgggaaagatgccccaaccagatgcctctattccagactgtgagaagtgggtgagtcagcctgttgtggggagagcaggctttccaacgcgcgcgcgcacacacacacacacacacacacacagagaaagaaagataggatgggaggtggttttctgggatgccaaggttcctgactcagcactgggaatcttggctgagtgtgttctgggaaatgtcaggcctacaggaagcagagggctcccagtcgcaccattccgcaggtgggcggggagcggagagaacagggtgtgtgagggaacagagactcagtgtgcaagtgggggggagggtatgtacacgagagagttgaaggcgtgagcgggaaacagttggcaagcaaggcaagggatttatatgcacaaggaaggaggttgggtgccagaatgtgggtgtttgtgcaaagtggaggggctccatgtgcaagggaaatgtttgctgggaagaatgtgtattcaaaggaattgtgttgagcctgccaggggtaaaaataagaaggggggttggcaagatattcgtgcagaagagaggcgtcaggtttgtaagggagactttgcaagaaagtgtagggaacagaagggtctgtcgcgtacaaggcactttgaggtgagtggaagggcagacagggcacgcttgcgctcccgcgatgcctcagcaatccccccagatgggcccccgatgcccaccttaattccaggctccatcgctagggcctctctctggccccttcccccgcgcacagatggagaaactccgtgccagtcagcgagttgctgccgcgccattggttggctggccgaagggggcgggcatacagaggctcccgga

SEQ ID NO: 1560518 - DNA, 4001 bp, Homo sapiens
tggtcttgaactactgagctcaagtaatctgcctgcctcagccttccaaagtgccaggattacaggcctgagctaccgtgcccggccagcaatacacatttaaactgaacaactgaggaagcattttagagccaagggagcttcaaagtcctttgctcaaggccgtacagctaggaagtggcagagcaggcattggaatctaggcggtctgggtccacagcctagtatctgaccaagagaccaggcatcactaacgctggcttctctgagagattcgggactcccacccccttgatgcatttaccttttacatcactgtctgtgatgcgtttcagatccttcagcaaactccaggaccccttttgcagtgtggcctcatctgtcagaggagatataaccccagattccagccttactgtctcattggcgcgcctaatcttagaaactacaatacccatgaggccactgggcaaagataggcctggttaaggactcagccgcccgttgccttctgggagttgtagttttattacataaaattgccagccgaggatagggaaaacggtatttactagcctcggggaacctcggaatctgcatctcagccttctccattcccgaatcccggagaccctgctgtcagcctcttccttcccctggtcttatctccctcctttcccaggacccaggggtccgtggtcccccctgccctcaccaacgacccccatataggcatcctcattaagcgacagttcctggaaatccttcacggcattctctaccctttccatcatggctttgtgatgcttcgcatccaggtggccaggcaggtaatctttctccagggactttagcgccagcacgacagacgggtcacatataacacacccctcggcaggaagcaagcaaccggccagcgccgcacacaggagggtaaaatgcggccccattgcagccggcgcgcacagttcccgaagaccgttaggaagggtgctctcaccccaaaccgagagcaggagaacgctaaacggagaaaagccaaaatccatcttaagaaatcccactgggccgcctatccatggggtccgcaaacctcgaaaagaggatcttcaggaaatctccaaataaagaggacctatgtccttcatcaaatgcctccgaagtgtgaaactgagccccaatccaggggacccaaaatttagggttctcactgaatcccccaactgagagatcagaaaaactattaaacaggaatcactcataagtccccaaactcagaacctggaatctcccaaccccatgcgccccttcccaaaatcccaaactgtggaattttccaagtccccagattgacgtgagcctgaactccaacccttaagagcaacaccgaggcactcccccgccagccccccaaaacctgttgaacctcaagctgaagattcaatgcccaaaccaataaacatctaacacagacccaaccacgatattatcaaactcggaactccttcaaaaccaaaacacataccagattcctagaactgaggaccccactaacacttaagcgagactccatgcggtcctctagacctagggggcccttgttcacccttccccaaaactaacgggctcccaatttgcagggcgcacccttccgcttagaaaaaggagccccgatgcatcctgaacagtgatgcaccctaaacagccgctccccgaccttggttcccgatttgtggcctctaacactagggttcattgaggagcccggtccaggttctgagggcttttaaagaggaagccggggtcatgaccacctacgctaattttcccaggggtaaaatcaaggattgtgttggggacgagggtaaggttggttgcgtgaaatcgagagcttttcgacggggtctgagtcacggacgatcccctctccacaaggaactcctgaaaccaccccctccgagcttctcacgtaggggcccgaattcctttatagatattccttggggttttcctcggccccacccagaaactcaactctgtctgattggactgcaacaaagggaggtcccgcccatcgctccatgacgtcacagaggctgcagcctttttggactagaattttcccagcatctagggaagaggaagcctcctgactactctggcttccagagtcaaggaccggactcaggccttcagtttcctcccctccccttgccccaggacccaggctttgggctagatccggccccccaggccgctgccgcccccaccgcggtccttggaaacggctgtcgagccacgaagtggacattttagccctaagactacaactcccaaaatgccctggggcctctttctctgtagctgactgacgctgccaacctcatagctttccgggaaatgtagttcagtgataatccgctccctcctccgcctcttctgcccacgcggaggtcccagtgggaggagaggactgggggccaatactgacagtccaggagtgagcaactgggggctcagacgttagggtcctggaaggtctctctctcctgtgtgatagaaacagggaaccagaaaaacagggaccacaactcacacaagtccagcaacaaggggctgtcagatctaagtagggacagtactcccaatcacgagtaataaaaatcctcagggcccggcgcggtggctcacgcttgtaattccagcgctttgggaggccgaggcgggcagattgtctgaggtcaggagttcgaggccagcctggctaacatggtgaaaccccgtctctactaaaaatacaaaaattagctgggcatggtggcgaacgtctgtagtcccagctacttgggaggctgaggcaccagaatccgagaggtgggagtttgcagtgggccgagatcacactactgcactccagcctgggccacagagcaagactcgatctctgaaaaaaaataaattaattaaaaaaaaataaaagtcttcagaagtaccccaccttttcctccactctcttacacacacacacacacacacacacacacaaacccacacacacatacacagtggctctggctccaaaaaagctacagagacacgggttagtgctgtagacttttaattcatacctcctgctctctcacccgtggcagctgagttgggaacagtactgtaacaattgtaactgtaactccctgataagcctacaggcatggggtctggatgagtagacaggggatgtgatcagagctgactatgtttaaggtttcttctttcaccctccaaaaaacagcaaggggctcctgagatctcgacaaccccgtccaccttggccagacctcgtgctcctgcctggatctgaggctgggtccagggtctgcctacctttagatcgttttatctcagacctgcccaaagccagatgtagtggttctgggagttcagggacagacagtggttagcaatgagcacggtacctgccagtttgtcacaagcacagagggtgtgtttatacctgcacacttccagaaaacagatcccagaccctcagcagcccacctgcagacaaagaccaacttccttcattgtgagaggcaacctgaactcacacccaatatatggagctcttggcagtttatgagctttaaaaaaaagtgtccctggatccctggaaagttctgctccagaagctgtaccattttggcagtgatccctcaccccacgttcacattttagcctgtctgctcaaaacaaacaaaaaaaagtctttgaggggctgtggggcttgttggacagagtcccgctctgctcaccaactaccccagcttttccagagactgtgaacagagcaagacgctggccaactagagatggtttgttttccatctcaatttttccagcaatggtggaacattcattagatgctacaattaggttgcacattcattagattcttcacttggcccggtgtgctggctcacatctataaacccagcattctg

SEQ ID NO: 1560519 - DNA, 4001 bp, Homo sapiens
ctggctaattttgtatttttagtagagacagggtttctccatgttggtcaggctggtcttgaactcccaacctcaggtgacccaccgtcctcagcctcccaaagtgctgggattacaggcgtgagccactgtgcccggctgacgcctttcttttttttatatccctgtgcaattcgtcagcatgactggcaacaaatcctgtttgttcaatattcaaaatacccattccctccccttaactctaagatctcatcttccatagagacaatgtcgccgtctcactccactctggccttcttggatgttctgtgactatgccaaacatagtcccatctcagggattccaccagctgttctttctgcctgcacccttctacccctagaccccctcatggctgcttccctctccccttcaggtcttttctcacatgctcctttttaagggacatcttttttggatgccctactttaagctgcaatccccacccctactcacagcacttgctattccgtggtccctgctttatttttttcctccttagcatctccctccatttgacatattttatcgggcaataaaggattaactgagcaggcctgggttgtcccaatcctgcacatcccccgctcccccccaaaaaaatttggctcttgcctggctcacagaaggtaacctctatttccttggaatatcctgcctgttaagagtatcttggtttggccaggcatggtggcttacgcctataatcccagcactttgggaggcctaggcgggcagatcacttgaggtcagaagtttgagaacagcctggccaacatggtgaaacctcgtctctactaaaaatacaaaaattagccgggcatggtggtgggtgcctgtaatcccagctactcgggaggctgaggcaggaaaatcgcttgaacccggcaggcggaagctccagtgagcagagattgtggcactgcactcgagcctgggtgacagggcgagaccgtctcaaaaaataaaaataaataaataaataaaagagtatcttggtttatgaccaggtgcagtggctcacacctgtaatcccagcactttgggaggctgagacacaaggatttattgaggccagaagtttgagaccagcctgggcaatataatgagacccagtctctacaaaaaattaaaaagtagaaaattagccaggtgtggtggcacatgcctgtggtcccagctacttgggaggctgaggcggcaggatcgctggagccctggaggtcgaggctgcagtgagctgtgatggcgctactgcactccagccggagcgacagtgaggctctgtctcttaaaaaagaaaaaaaaaaggctacattgcatgcgtgtttgctcttatttttatattcaagggaggtggggcagaccggcggaaagaagaggggtgctggagaaggcgttccctcgtctctcctacctttcagagagttacccattaagtgctgcgtttggttcttgacaaaggacgccacaaggtccagttgatttgtctctggggggagaagggagaggacactccagtgagccccccagagagccaagtgacctcaccccctccaggcctggccccgacccctcttgggggcgtggtctccggcatccctcgcccagccccgctgcccaatttctcccaacacgcacccactttccccacaaacacgttcagcgcgtagtcccggaagaaaggcccctccatgcccatcagcacggccccggcgcgcgcctgcagctgctccaactggaagcgactggggatgagggcggagcgcaggtgacccagggcctccagcaccaaggggtcgcactgcaggcagccccagcctccgggggcgcccaagcccgagagcagcagaagggtcaaagccagaggcatggcggggcctttgtgacgtcacagagagaacccggcccgccccgcctcccaggcgagggcgcggtcaggaggcccagggagcatcacggtgttacaggcacgtgttcgctgagcacctgctatgtgccaggcatggttctagaacctagagagaaagtcaagaaaaacagaaagcctctgctcaacccctcttggaacttactaattcctcttaaatttattcattcaacacatattgttttattttatttatttatttattttttcccgagatggagtctcaactctgtcacccaggctggcgtgcagtggtgtgatctcggttaactgcaacctccgcctcccgggttcaagtgattctcctgcctcagcctcccaagtagctgggactacaggcgtgcgccaccacgtccggctaattttttatttttagtagagacggggtttcatcatgttggccaggctggtctcaaactcctgacctcaggtgatctgcccgcctcggcctcccaaagtgctgggattataggtgtgagtcaccacgcccggcccacatattgttttttttttttttttttttttttttttttgagacagagtcttgctctgtcacccaggctggagtgcagtgaggcgatcccgggtcacggcaagctctacctcccaggttcaacctatttttgtgcctcagccaaccgagtagctggggttaccatgccaccacacccagataatttatatatatatatatatatatatatatatatatatatatatagagagagagagagagagagagagagagagagagagagagagagagagagatggagtctcactctgtgtcacaggctggagctcagtggtgcgatctcagctcactgcaatctttgcctcccaggttcaagagattctcctacctcagcctcctgtgtagctgggattacaggcacgcaccaccacacccagctgatttgtgtatttttagtagaaacgggttttcaccctgttgttcaggctggtctggaactcctgacctcaagtaattcacccgcctcagcctcccaaagtgctgggattacaggccactgcgttcaaccttacatgcaacacatatttatttattgaacacctactatgtgccaggtgctgttcaaggcccccagagctagagctgagaaaaacaagaggttcttgtgcttgcagtacttaaattaattaactcaacaaatatttattgagcacctactatgtgccaggctccagagatagactgacataagacgaacacaatctctgctcatagagttcaggctagcagggatgggagggagtggcaggaagagaaacgtaaaacctggtacacagatgagtaactgaaatactgacaaactgcattacctgctgggaagcaaatacacagtgtgatacagttaagagagttccctgaggccaggaggtagggtctggttccctgctgttgtccagcgcctagcgtgtactagttgttcaacagatatttagcaaatcaatgaatccacaagggagggtatactgagggaagggcactttgtttttccctgcaattttcatcttgaaagttttaaaatctggagaacagttgcaaggatgacccaataaacactcagatatgacttcacattttgcattcgctgtatctctctatatatgtagatgaatttaatatcaattaaatcatagaaattcaactaaaagacattataatagtatacacagagatatagcaaatgtcaaaataatatgatatattaatatatagttaaatattaattcagagagattaaattaattaagactaaatattactacgttgagggagagaggaggagagagaggcagagtaggagagggcagttgtcttattaatagtttaggttctacaacaaaactccatagactgggtggcttataaacaacagaatttatttcttccagctctggaggctggaaatccaagagcagagcaccagcaaggtcaggttctggtggagctctcttcttgtatcctcacatggcaaaaagagggtgagaggactctttgggttc

SEQ ID NO: 1560520 - DNA, 4001 bp, Homo sapiens
cccctagcccccctcctctctccctttaccccctccccctgaagtccaggtcagggcggccttacctcatgctcgtgtcctgtctgaaaggcaatgtggggcagtcagcccctccatggggcacccctaaccatcgtagggaaccctcccaggctctgaccacagacctgggatggggtggaaccagaccctatggggaccctttaggaaagatgcccgcctccagctgagggtcggagacctttgagggagaaaaggactgcagccgcctcctgcgcagagctgggttgaggttccacctcctcgggagcccctctaggacgtgggagctgagggagccagcctgtgccccacacatactcacccacgaggtgctcacatacacacactgcctgtgttggtttgaggaggggacttacttgtgccagttatttctacaaagacagtgggtttggactcaggaggccgagtggccgtggccagtgttccctcccaggcccaggtgagcttgctgccacccaaagaccccactcacatgtagttcaggaggccctggacagctgacttccactgcgccgaggacctgtgggacacaggcttggaagtggtgcgcccctgaacccacggccccgccctacccgatgacagccaggtggaaggcggggagccccctccaaggagagcctgggaccccagggacagtagggccctggcacgggtgggtgtgatgcctgagccctactcgcagttatagccaaagcaggcgacgtgcgagtctgtgcagttgttgcaggagatggtctcgtactggaagatgcctgaaacacgtacaagagccgccagggctcccctcagcctccagggccccgagctgccaccggcacgcccctcagcctggacggagccttgcttaccacagcggtgctgacagtcgatgcggcctgtgggagggcaggacagcgccatcttaccaggcccagccttgtccccagtcctgcctcctcccaaccctccaaagcctcagggcctgtccctcggcactggggcccaggctcacctggttttcatgtatgtgtgtccatggcccggagggaaggggtccccaggttgacccccagcgtgagatggagcaaacttcaggggagggcggtggcaacactcccagcgcctctgggggctacttaggggaggtccccgcggggtgatggcattgatccttcaggtgctaggctgggtccctccctggagagctgccctcctccccagctgcctggtgccaggtgccctgttcacatcactccagcctcagccaagccccgtgggtctccgaggctctgggcaacacctccctcctctgaagccttatttgctcactttcgatgatggcgttctggatgaggtgcacctgctcccggaagatgtttcgcagctcgttggggaaataccctgagtcgtcgaggcaggagaaggtcaggctcaggcggtgggcggggtgtcccggggtgggggggccccgcctcggtttcgcgccccttaccggggaagtacatcttcccctggtacagctgatccatcatctggtacactgctgtcgccacttggtccagcttctcccgggctgcgggcaggaggagaagccaggtgaccggcctgccccggggtctcgctggcggggtagtcgggactgggctgggctccggcactcactgatcttggcggggatggccaggtgcagctccttcatcgtgtcgtcgctccagtcggtgagcagcgcccctgacacggggatgtcgcccacccaccaggacttgaagttcacatggtggcggtagaaggagaacttcttggagaagttgctgtggcagtgcagacagccgtgggccagcgccgccgtcaggcacaccaggcacagcagcagggccatgcccgtcccggcccgccgccggccaaccaacgacgctgctcgcgccacacccttcagccgcgcaccaaccaacggcccccactcgggcgcttggccgtgtctcctcccccgcccgccccaccagcgcaggccccgccccatcccaggcccagccccgcctccgtcctcagccgactactgacggcgccggctccgcctccaggccccgcccacgacccgcccctcagaagactccgccactgggtgggccccgccccaaggccgcgccctacgcatgcgccaatggcccgtgcctgtgccaatggccggtgcccgctcctcggccggctcccgctgaggccccgccccgtgtcgcagccacggtgcaggctccgcccacaggccgcggccccggttgctaggcaacggagacctccgcccggcccggctcagggcatcccagggctgctgcccggaacttggctccgtgcgccttcgccgcccgggccccttaaagcccgcgggaccgagtctgggagacccctgcacgccgcttctgcgcggagccccgggccctttaaggaaagtaggtccggtccgcgggtgcggtcgggcatgcgtgtggggcgttcccgcggccgtgtccctccgcggcggctgcgaggcggtgcggcggctgaggcggccgaggcggccagttgggtaccgggaggggcgaaggcgggcggcagaggcgatcaggtgggtgtccgggaggggcgaaggcgggcggcagaggcggccaggtgggtgcccgggaggggtgaacttaggcggcgaggagaccgagttctcaggaagggcgaaccctggcggcggggaagctggatccctcagacgggcgaacttaggctacggggaggccgagccttcaggaagggcgaggccgggcgcggtggctcacgcctgtaatcccagcactttgggaggccgacgcgggtggatcacctgaggtcgggagttcgagaccagtctggccaacatggtgaaaccccgtctgtaccaaaaatacaaaattagccggacgaggtggcgcgcacctgtaatcccagctgctgaggaggctgaggcaggagaatcacttgaacccaggaggcagaggttgcagtgagccgagatcacatcactgcactccagcctgggcaaccagagcgggggaaaaaaaaaaaagaacaaaagaaaaaagaaaaaaggaagggcgaactcaggcggcagggaagccggatccttcaggaggggtgaacttaggcggcgaggaggccgatcccccaggaggggcgaacgcgggcggcggggagaccgattaccccggagggggatacagggtgcggggtcgagctgcgggggtgaactcctggccctgcccgctgccctcccgcaggaccccgcacctcccggtgtggattaaaattctgcagggcttcaggatccccaagccaacgcggcggtcgggccctttcgaataggcccttcttgctcggggtccccaaagtcgctggcagggcccccccaccccggaaggaggcgcccgccagggacaagctgcccctcctccctgcagcgaagaggggctagaaagtgtaagcgagggtgcattttattaggagtcactgagaggggaggggaaattggaaaatgcagtcacagagcagaaaatcagtgctccaagccgcagctcatcctgggggtaagatttccagtctttgtacacactgtttttttgtttgtttgtttgtttgtttgtttgtttttgagacggagtttggagtctcactcacgcccaggctggagagcagtggcgcgatctctgctcactgcaaactctgcctcccgggtgcaagtgatcctcctgcctcagcctcctgagtagctgggattacaggcgccaaccaccacacccagttaatttttgtacttttagtagagacggagtttcgccatgttggccaggctggtcttgagctcctgacctcaggtgatccgcccgcctcggcctcccaaagtgctgggattacaggcgtgagccaccgcgcccggcccacactgcttttttcgcact

SEQ ID NO: 1560521 - DNA, 4001 bp, Homo sapiens
gtctggaactcctgacctcgagtgatcctcctgcctcggactcccaaagtgctgggattaccggcgtgagaaactgcgcctggcctaatgaggtttaagacaatcagaggactaggacccctaggactcagctttcgcagctgtgaaatgggctgactccccagcatcctcattgaggtggtctgctgagcgcaatccaggcctaaagtgtcaactcaattaatgtgcattaatttgtatatttcttgatgatgtgccggtaagcgatcaacaaacgcctgttaaaccaaacaggaagggcaattggcacagcggtgtggtggttactgtgggaagggaagtcttgtgggggaaagaaccttaccaaagggacactttgatgtcaccgatgcccagaccaagaatgagcacattcctagtcccgggaaccttggaggagccccatctctcccacagagagattgatgtctagttttgccctttatagaaataaaatcacacaccatagcctctctatcgtcccctcaacatcagccaatcaagttttttggtttgtttgtttgtttttttgagacggagtctcgcactgtcacccaggctggagtgcagtcgcacgatcttggctcactgtagcctctgcctcctgggttcaagcgattctcatgcctcagcttcccaagtggctgggattacaggcgcgcaccacagcgcccagctaatttttgtatttttagtagagacggagtttcaccatgttggccaggctggtctcaaactcctggcctcaggtgattcgcctgccttggcctcccaaagtgctgtgattacacacgtgagccacattgcccagcctttttatttatttatttattttgtaggggggaggacggattcttgttctgtctcccaggctggagtgcagtggcatgatctcggctcactgcaaactccacctcccaggttcaagcgattctcctgcctcagcctcctgagtagctggaattacaggcacccgccaccaaacctggctaatttttgtgtttttagtagagatagggtttcaccatgttgaccaggctgatctcgaactcctgacctccagtgatccgctggcctcagcctcccaaagtgttgggattaaaggcatgagccactgtgcccagccccagtcgagtttaaaataaggcttcagtggcagtggcgccccactgcaatcccagctactcagggggctgaggcagcaggatagcttgaggccaggggttagagacctgcctgaacaacatagcaagactcccatctccaaaacaacaaaaaaatcttaacagaatattattattctgtaatactgtaacaaaaaaaaatgaaaagtcagaggtgatgtttggtcccagaaaacgccatagtttttttggttttttaaaaatgtttgtagaaatggaggtctggctatgttgcccaggctggccttgaactcctggcctcaagctatcctcccgcctcggcatcccctgtttataatcctcaacgttctgcatcctggtatggtcgggtaccctgtgtctggaccgggaaggcctggagggtaggggctgggaactccgccccccaatccctccttcccaatccctcctccccacccccaaccccgcagcccccgtcgcgcatgcgcaatgactcctccaggtccgcaaggcaggcatctcccggccttagtcaaagccgaagcccagagaagcgagcgatcggaggatgcgagtctcggctcacgtctgcctcgcagctttcctccgaggcctggaaggcgagctagcctttgccctggcagcaccctgccccagcccagccatcccccgccaccaccatcctcccccagtgtctgggccgagccctgcggcatcgccagctcttacctagcgggcagggaccctggactttcgaagggcgggcagagccgggaggcagcgagaggaaagtcccactcggctccttcctgtgtgggccccttggtttcctgagccactgtcatttaccgaaagtcagggccctgcgggagctgggggcggggaggcgggcaaggaggggcagaaagttccggaagcctctgcatcagccgccccgttcagacaggctgctggagacccctaagccaaaggaactgatgatagcacagagaagggtctgggtcacaccaggggctcagccgactctagacccacttgttaagtggggctctggcccggcccttattgcctcagtttacccatctgtagcatgtgtgagttgggcacccagtggaactaattttgcacccagggaaggaaacctggctggatttgcccaggagggaagcagggaagttgccccagaggaaggtcaagttcttctttgaggtatttctcccttaagactcagggagacgctgggcgcagtggctcacgcctgtcatcccagcactttgggagactgaggcgggcgattacttgaggtcaggagtttgagaccagcctagccaacatggcgaaactccgtctctactaaaaatacaaaaattagccaggcgtggtggcctgtaatcgcagcactttgggaggctgaggcgggcggatcacttgaagtcaggagtttgagaccagcctggccaacatgatgaaaccctgtctctactaaaaacaggaaaattagccaggcctggtgatgcctgtaatcctagctactcaggaggctgaggtgggaggattgcttgaatctaggaggcggatgttacagtgagacgagatggcgccactgcactccagcctggcaacagagcgggacttcgtttaaaaaaaaaagaaaagactcagggagagataatgacccatttctgcctgtggtgccctgggcccagccctaaaaaaccaggtggatccggcctggcctcttggaacttgtgatctggcgctgagacaatgagcaaatgaaggagccaaatcatcgcagacaacaaagaaagccagggtgtcaggacaggcacagactggaacttggacccgaggcaggacagggagctggccagggaaagggtgctccaggaggagggcacaggatgggcaaagaccttgagagggcagtgatcttagcagcttgaagagcagtcaggaggccaggggcaggggtgagatgagggggaaggggactgcagggcggtcaacaggggcaagatcgtggggggacagggggatcagggtctttgggagaagggtgggttttgcctggagcataatctggagccacaggagagttggaagtaggagctgttataaatagaagaggcagaaggcccgggcagcatccaaatgcagagacttgggccagtgttcttaggataataggatcagagccccggaagtagagcttcaggaatagactgacgaagtggtgaccgggtacagtggctcacatctgtaattccagcactttggaaggcccaggtgggaagattgcttgagcctaggagttcgagaccagcctggccaacatggtgaaaccccatctctactaaaaatataaaaattagctgggcgtggtggcatgtgcctgtaatcccagctacttgggaggctgaggcaggagaatcactggaacccaggaggcaggcggaggttgtagtgagctgagattgtgccaccgcactccagcctgggcgacggagcaatactctgtctcaaaaaaaaaaaaaggaatagatttaagaagttgtggccaagaacagtggctcacacctgtaatctcagcactttgggaggctcaggcaggaggatggcttgagcccaggtgttcgagaccagcctgggcaacatggtgaaaccctgtctctacaaaaaatacaacaacaacaaaataataagctggatgtggtggcatgtgcctgtagtcccagctactaggggaggctgaggtgggaggatcacctgagcccaggaagttgaggctgcagttagctgtggtcatgccactgc

SEQ ID NO: 1560522 - DNA, 4001 bp, Homo sapiens
gtgttgggattacaggtgtgagccactgcgcccggccaaagagtgatgttggacattgtgaatagtgaagaggaacattccatgctggcagagaaggaagccatgccgggcagaaagaagtacctggaagcccagaggccgcacagaagggctcacgggagtggagagtctggtttgaggggggccgtgagggctgaagatgcggaggcaggctcggcctccgctatgaggagggccctgagtagggcgggggcgtgtttaggatggactggagagctgtgacagggcccagataagagatgcctgaagctgggtgagcctgtaatcccagctactggggaggctgaggtgggaggatcacttaagctcaggagttcaagaccagccagaccttgtctctaaagaaagaaccactgggccgggtgcagtggctcacgcctgtaatcctagcactttgggaggccgaggcgggtggatcacgaggtcaggagattgagaccatcccggctaacatggtgaaaccccgtctctactaaaaatacaaaaaattagccgggcgtggtggcgggtgcctgtagtcccagctactcgggaggctgaggcaggagaatggcatgaacccgggaggccgagctcgcagtgagcgagatcgcgcaactgcactccagcctgggcaacagagtgagactcagtctcaaaaaaaaaaaaaaaagaaagaaccactggattgaggtctggctggggctgaggccacagggacagacaggcacaggaggcaacatctccccagagtcccagcgtctagcttaggcaagtgagcgcggagcagaagaaagcccccaaggctcagcgcctgcctggcggcgagacccaggtgggtcactccgccagagctctgctgctccaggggctggggtgggtgacggtcacctcttgcagatctcatcggcagcctcctggctaaagagctgctgctgcagaacgttgttgagggcgtggacagcacacagctccaggcgctgccgttcgtggtacacggtgggtgggctcggctgtgctcccggggcctgggacatgccgtcctcggctcctgctgggggttgggagggggagaaggtcctcaggggcccgggatctagaggtccagcctcccagcaggcctttggggcatcgccattgattgagctgggactcggagcagcccaggaagacactgggcccctgaccccgctccctggcagtctcctggcagcacacgtccctccatcccttattcctattcctacgaaaaacgctgtctcttctgctcccctagcaacagaaaaccaccctcaccaggtctctaagtaaaagggtccctatcatggtcacctagcaacagaggaacctgcctccccgtccctaggtaaccagggcgctctgtggttacctagcaacaaagccccctccccaccgcactaggtaacaaagtctgtcctccgagcacctagcaatagagaatcctcctcccctgtctctaggtgatagggtcccctctggtctcctagcaacagaagactccccttccccggtcatgtagcagcgaggctctctgctcttgtcacctggcaacggggccccctccccagtcactaagcaacaggagttcctcttcctatcacccagcaaccaggccccctccccggacaccaaggaatggagcccttcgccgacccgcaccccagccacggcgctcgccctttgcctggcaacgcccctcaccccgcctgcctctccgctccaccgagccaggggtttccgcatccccttcctgggcggcggctctgggctccgagtgcggggcgggcaacaccgcgctgactgggcaggcgggacggactacagctcccggtgatccccgcgcgccggactacgactcccgtggggccccgcgggactcctgctccacacggaacgcccgggccgcgtggccctgaagtcggccgtcgggcctaggaaatgccgcactacaacttccgtcgggctccgcggcaggtcccggaagtgcgcctcagaggcccttctttcgcatacggccgcgcccactactgctcagagattctaggaaacttagtaggtaggctctcgcgatagcttcctggcgccgcgctctcatgggtgctcgcccccggcgatggcgtcatgcgcggtgcgcagacgcagcgtgacgtcacacaagggaaagggatcagagacgccaggcggtgcggggggaggcagcggtgatctttactgagtcagaagggagaccctggggaagtggggcagggcaggggtgggatggtggtggtgagaggccaggcagatgatcttgtctcgggagggaggaggcttctcagcagagatggatccccggcctggaggggagctggcagcaggctgcggggagaggggaatgagcgaatgagacagaggagagatgaggagacagacgcctgggggaggcagtggtgggaggaggggacagggcaggggggcggtggaggaagacccggagagagcgggacagagccctgggggtggacagagacagagagagtctcgatcagaggcgggcacaaatggagacatctacagtgccaggattcaaagtcatggagagaggttaaggaaataaaggtcagaaagaaagaaaggtcaacaaatacagaaccagaactgcagaactagtgagagcccgggacccccaagctctgcagaacacaggagcccagggccgggggagaggggcctggccgcacccaggaggctctgccagaaggccgtgacggtggcggagccggtgaccgcgcctggctcggcagggttctctctgcgggtgtgcacagcaaagcttcggcccgtggggccccggggtccgctcagctctacatccaccacgtgcatgtccgtgaggctgggacaagaggggcagtcagtctggagagcctggactcagcccaacaccctgcttagctctgctcacctggtatcagccacgagcaccccaatcaccccatcgaagcccaggctgggggcagccagggcagccgccgccatggtgttggaatttcgcggggcaaaggggcagagcccacggacagggccttcgtagagcacagtgcaaggcccagggctgtgggctgcagccaggggtccctcaagccggaagccatcggggtgtgtggccatggtgacacgaaggctctggaagcaagagcccgggttagggggagtggggtctttgcaggcctcccctggttcctggggagcccagcaggcctcacccggaggcccccagctgcatccaatctcctgatgtcctcagcgccccacagggcccctcgggccacaaacacggcgtggtcccagtgctgtgaggcctccaagagctgccgctctgtggtctggtcacttagagctgagggggaccccacctggggtggatgaaggaggggagggttgaggtcagggaaggatatccacttcagggtggggtgagaccaagacagaaggggcagggctctgcgtaaatggttggggtggggcttaccaggagattggcatggcgcaggatttgtgccccagattcatggattattttgggatgggccacttccacaaccagatcagggcgcctgggagaggggaaagagggcggagggtcttggagaggtattaggcctcttctccccaaggttccctccgagtctactgagggctgcccttcttctccctgacctgggaggcgaaatgagatgaatgggttcgtcctgtttcacatttgcttgaaccaaggcccagagagggtcagggaacccctgagatcacacagtggctaagagagccaggacaggagcttcagggagctccactctcccatggcaaggtcactgacctttccccaagggcagcaaggttctggagctgcagggaagggggcacgctccctgccattcgtcctgggtcacgattccagacaa

SEQ ID NO: 1560523 - DNA, 4001 bp, Homo sapiens
ctctgtctcccagcttcaagcaattctcccaccttagcctccagagtagctgggactacagacatgtgccaccacgcccagctaattttattttttatttatttttattttttagtagagacggggtttcgccctgttggccaggctggtctggaattcctgacctcaagtgatccacccgcctcagcctcccaaagtgttgggattacaggtgtgagccactgcgcccggccaaagagtgatgttggacattgtgaatagtgaagaggaacattccatgctggcagagaaggaagccatgccgggcagaaagaagtacctggaagcccagaggccgcacagaagggctcacgggagtggagagtctggtttgaggggggccgtgagggctgaagatgcggaggcaggctcggcctccgctatgaggagggccctgagtagggcgggggcgtgtttaggatggactggagagctgtgacagggcccagataagagatgcctgaagctgggtgagcctgtaatcccagctactggggaggctgaggtgggaggatcacttaagctcaggagttcaagaccagccagaccttgtctctaaagaaagaaccactgggccgggtgcagtggctcacgcctgtaatcctagcactttgggaggccgaggcgggtggatcacgaggtcaggagattgagaccatcccggctaacatggtgaaaccccgtctctactaaaaatacaaaaaattagccgggcgtggtggcgggtgcctgtagtcccagctactcgggaggctgaggcaggagaatggcatgaacccgggaggccgagctcgcagtgagcgagatcgcgcaactgcactccagcctgggcaacagagtgagactcagtctcaaaaaaaaaaaaaaaagaaagaaccactggattgaggtctggctggggctgaggccacagggacagacaggcacaggaggcaacatctccccagagtcccagcgtctagcttaggcaagtgagcgcggagcagaagaaagcccccaaggctcagcgcctgcctggcggcgagacccaggtgggtcactccgccagagctctgctgctccaggggctggggtgggtgacggtcacctcttgcagatctcatcggcagcctcctggctaaagagctgctgctgcagaacgttgttgagggcgtggacagcacacagctccaggcgctgccgttcgtggtacacggtgggtgggctcggctgtgctcccggggcctgggacatgccgtcctcggctcctgctgggggttgggagggggagaaggtcctcaggggcccgggatctagaggtccagcctcccagcaggcctttggggcatcgccattgattgagctgggactcggagcagcccaggaagacactgggcccctgaccccgctccctggcagtctcctggcagcacacgtccctccatcccttattcctattcctacgaaaaacgctgtctcttctgctcccctagcaacagaaaaccaccctcaccaggtctctaagtaaaagggtccctatcatggtcacctagcaacagaggaacctgcctccccgtccctaggtaaccagggcgctctgtggttacctagcaacaaagccccctccccaccgcactaggtaacaaagtctgtcctccgagcacctagcaatagagaatcctcctcccctgtctctaggtgatagggtcccctctggtctcctagcaacagaagactccccttccccggtcatgtagcagcgaggctctctgctcttgtcacctggcaacggggccccctccccagtcactaagcaacaggagttcctcttcctatcacccagcaaccaggccccctccccggacaccaaggaatggagcccttcgccgacccgcaccccagccacggcgctcgccctttgcctggcaacgcccctcaccccgcctgcctctccgctccaccgagccaggggtttccgcatccccttcctgggcggcggctctgggctccgagtgcggggcgggcaacaccgcgctgactgggcaggcgggacggactacagctcccggtgatccccgcgcgccggactacgactcccgtggggccccgcgggactcctgctccacacggaacgcccgggccgcgtggccctgaagtcggccgtcgggcctaggaaatgccgcactacaacttccgtcgggctccgcggcaggtcccggaagtgcgcctcagaggcccttctttcgcatacggccgcgcccactactgctcagagattctaggaaacttagtaggtaggctctcgcgatagcttcctggcgccgcgctctcatgggtgctcgcccccggcgatggcgtcatgcgcggtgcgcagacgcagcgtgacgtcacacaagggaaagggatcagagacgccaggcggtgcggggggaggcagcggtgatctttactgagtcagaagggagaccctggggaagtggggcagggcaggggtgggatggtggtggtgagaggccaggcagatgatcttgtctcgggagggaggaggcttctcagcagagatggatccccggcctggaggggagctggcagcaggctgcggggagaggggaatgagcgaatgagacagaggagagatgaggagacagacgcctgggggaggcagtggtgggaggaggggacagggcaggggggcggtggaggaagacccggagagagcgggacagagccctgggggtggacagagacagagagagtctcgatcagaggcgggcacaaatggagacatctacagtgccaggattcaaagtcatggagagaggttaaggaaataaaggtcagaaagaaagaaaggtcaacaaatacagaaccagaactgcagaactagtgagagcccgggacccccaagctctgcagaacacaggagcccagggccgggggagaggggcctggccgcacccaggaggctctgccagaaggccgtgacggtggcggagccggtgaccgcgcctggctcggcagggttctctctgcgggtgtgcacagcaaagcttcggcccgtggggccccggggtccgctcagctctacatccaccacgtgcatgtccgtgaggctgggacaagaggggcagtcagtctggagagcctggactcagcccaacaccctgcttagctctgctcacctggtatcagccacgagcaccccaatcaccccatcgaagcccaggctgggggcagccagggcagccgccgccatggtgttggaatttcgcggggcaaaggggcagagcccacggacagggccttcgtagagcacagtgcaaggcccagggctgtgggctgcagccaggggtccctcaagccggaagccatcggggtgtgtggccatggtgacacgaaggctctggaagcaagagcccgggttagggggagtggggtctttgcaggcctcccctggttcctggggagcccagcaggcctcacccggaggcccccagctgcatccaatctcctgatgtcctcagcgccccacagggcccctcgggccacaaacacggcgtggtcccagtgctgtgaggcctccaagagctgccgctctgtggtctggtcacttagagctgagggggaccccacctggggtggatgaaggaggggagggttgaggtcagggaaggatatccacttcagggtggggtgagaccaagacagaaggggcagggctctgcgtaaatggttggggtggggcttaccaggagattggcatggcgcaggatttgtgccccagattcatggattattttgggatgggccacttccacaaccagatcagggcgcctgggagaggggaaagagggcggagggtcttggagaggtattaggcctcttctccccaaggttccctccgagtctactgagggctgcccttcttctccctgacctgggaggcgaaatgagatgaatgggttcgtcctgtttcacatttg

SEQ ID NO: 1560524 - DNA, 4001 bp, Homo sapiens
ctgagggtcccagctactcacgtggggcacgctgccggagtcggccagcctgggtgtcgctgtgggaacacaggcagagtcaaggttgtggggacccccaggccaatcccaccctctcccctggccctgctgggtgacgtgcgggtgactaaccccatcttatagataagaaagtaggtggaggccagcacagtggttcacacctggaatccagcattttggggagactgaggtgggaggatcacctgagcccaggagtttgagaccagcctgggcaacatagtgagaccccatctctaaaaaaaaaaaaaaaaaaaaattagcgaggcatggtggcctgcacctgtggccccagctacttgggaggctgaggcaggaggatcacttgagcctgggaggtcaaggctgcagtgacttatgatcatgtcactgtactccagcatggaagacagaatgaggctctgtctcaaaaaataataataaaaatatataaaaatataaagaaagcagacaggcttggagacagctttgcccaaagacacccagcatttcagtggcaacgtgggattcgaacctagatctgtgtggcccagcacctgtcttccttgggggctccttacagacccctgaggcagaaatgagggccaggggttgaacatggggagcacactataagccagtccagtgtgggaggctaagaagctctagtctctgaagatgggcctcctggctcaaggggaccatcagggaagggcttcctcccgccagcgccacaagggtacctgaagccctgtcctcctgggtctcggccagcgcagagtggtcctccagggcctggcagctgcccaggccgccatccagctcctcccaggctctggttgtcatggacatggctggagcagcagcaggtcccaggccaggctgggaggggtggggaacaaggtcttgcatttactgagtctctgccacaggcctgggcctgacctggaggttctgcggacaccaactaacaggccccgtcctcccacccctcctcactcggcaaattcatactcatgccaggcatggcccggcgcccactccaggcatctctctgaccccgcatgcctgccctgggacccctccctaccgcccagcctcactggggtccagtatccatcagtacagtagcccaggctgctctggcccagagagggcgggagcccctgcaggacaacacagcaatgagtcccagacgcaccccaaaccgaaactcttggccccagagtcagctcatgttctctgagaccagggactatttttatctggtgcctgaggccagcgggacaggctaacaggtgccccagcccctcccaggcctctgctctcatggggtctccctctgggccaccctgacttgccattctgggcacccacatcctgctgcgtgaccctgtgagtctacaggctcaggccccagcagcagaaccatcctggctctggtcgtgacaggccggggcaggggaggagggtcccggttgtggttgggggtcttctgatcctgacacagagtaccctgccttgtcccactaactctgttcccataggacagatgaggaaaccgaggctagagacagtgccattggctggaggtcgcaaggagcttcaagtcagacccaaagctgtactcttcagggtccccatggcctctggctgctgggattagggtgtccctgtatctaggctgaaaaaccacccagccctggggctccaagacctggaaggggcctattgcgtggcagtgggggaggggcccaagaagcatgggaggctggtgtgtggcccctgggtgtgcatgggggcagctccaggaattggggacccttacagtcctctgcaacaccccttcacaccccgggagcccacacctctgcccgggattcccccagcctcacttccttacccccgagcctcgcttacccgccagccgctttgctgagccttgtggacaggacggaggatggggagggtggccccgtgatggacggcaacaggtggccagagaccgcgggtgggccaatcagcatgcccgctggagtgaggtcacagccggggagtcccccacccttccctgccattgcagcagggcagggcattgctcctactcagcactcgccactgccacccagggagacgtagcgcctgcagctgggactacaggcgcgcaccatcacacccggtaagttttcaattttttttgagacggagtctcgctctgtctcccaggctggagtgcggtggcgcgatctccactcactgcaagctccgcctcccgggttcacgccattcccgtgcctcagcctcccgagtagctgggactacaggcgcccgccaccgcgcccggctaattttttttgtatttttagtagagatggggtttcaccgtgttagccaggatggtctcggtctcctgacctcggaatccgcccaccttggcctcccaaattgctggaattacaggcgtgagccactgcacccggactaatttttgtatttttttttcagtagagacagggtttccctatgttggccaggctgctctcgaactcctgaccgcaagtaatccatgtgatccgctcgccttggccacccaaagtgctgggatcccaggcgggagcccctgcaatgcattcattcctgctgtttaaagccactgtatttggggtcatttgtttctgtggctctggcaggctcatacactcggaactgcctgctcccacaccgtcatgcagagaaacctgacgcctctgctctggagaggacccggggtctctcagcccccaaaggcacattctaaggcctgcaggcagatgtttgagccctacctgcaaagcatggtgactctgggagtcctgagggaagaggggaagtggattttggtggtgaggcctgtgtgttaaaaatcctgagtgaatggccgggcgcggtggctcacgcctgtaatcccagcactgtgggaggctgaggcgggcggatcgcctgaggtcgggagtttgacaccagcctggccaacatggtgaaatcttgtctctattaaaaatacaaaaattagtgaggcgtgatagtggatgcctgtaatcccagctactggggaggctgaggcaggagaattgcttgaacccgggaggtggaggttgcagtgagccgagatcacatcattgcactccagcctgggcgacagagtgagactctgtctcaaataataataataattctgagtgaatagggcctccccaggaactaccaagagacccagaaggccagcccgccttcagcaaagcaagggctggggttccctggtccccactccctccgctttagaaacggctctcggccgggcgcggtggctcacgcctgtaatcccagcactttgggaggccaaggcaggtggatcacaaggtcaggagattgagaccctcctggctaacacggtgaaaccccgtctctactaaaaatacaaaaaattagctgagtgtcgtggcgggcgcctgtagtcccagctactcgggaggctgaggcaggagaatggcgtgaacccgggaggcagagtttgcagtgagccgagatggcaccactgcactccagcctgggcgacagagcgagactctgtctcaaaaagaaaaaaaaaaagaaatggctctcatttttttctgtatgacacaaggcagagacaaacaggaaacaaagagaagctgaaagcaaaaactgtaaagcacctgtcatcttcccgcccccaaacagacactgtttaatagtttgacatgttctttccgctgtttgtaacttgtgattttattattagttccatatttatttttataaagctggcataattagcgaagggctgaacatcttgtttgtaacctagatttattttttcttcctaaaagtttttttgttgttgttgagatggagtctctctctgtcacccaggctggagtgcaatggcgcgatctcggctc

SEQ ID NO: 1560525 - DNA, 4001 bp, Homo sapiens
ccctggagatctggggacgcgggaagggtgggactcctgggctgggaccacaagatgcctgcgccgaaccgacgagggggacacatacaggaccgagccaccaacagcactgagctgggggcaaaccagtgcttttttttttccccccgccctcccagcttggaaaaaaagacaacagaaattaataaagaaccaattttttttttacttaaatagattcaataaaaagaacaaacacacacaaacacaaacacgtcttaaaataaactctttagagactaagtgcgtgtttcttttccacagtacggtgcagagaggggagggcagggggcgggggtccccttcccaatgtccccgcgggcttgagtaccaggcggcggggccagctccgccgcgatcgccccctcttcccctccctgttaaatacacaaatatattatattcaatatgaatcgagtctgtttccagcagaaaaaaaacatacaaaaaaaagtggaagggggggcttgtaaacgtcgaggtggaaggactgggcgcagggtaggagggccggagtccagtgtggtttgcggcgcccctaggtcccagggtgggtgcccaccgcctgctccctggaccccagtgggaggcgtgtgcccagccgtccaagcgagggggtgtccgtaaaggggcaggggacgttcagaaggcgtgtcccttgaccccaagcagcagctgacagccgttgctgacgtgggtcatgaccttctgtttgagctgggccacctgctcccggaggaggccggcggtactcgacagccccgcgttctcggccttgagcgtcttcaccttgtcctccaggcgcgcgatgcgctccagcttccgcttccggcacttggtggccgccagccggttccgcagccgcttgcgctccactttgatgcgctcttggtcttccatgttgatgggggacaccggcggcgtggcgtcccggctgcgcgcctccggcacggtctgcggttcctccttgaaggtggaggcgccgcggcccaagcccagctgcgccgggtggccaccggcgaagggcggcgcgtgtgggaggtagctgatggtggtcgtcgggtacgagctcccggtcccgacggcagccccggcgcctcccgaggacgcagaggctggggagtagctgctgaggttggtgtaaacgggaggtggctccgggccggcgtagacgcccccgggcccagccgggggccccccggtagcgcccagggacacgttggggggtgtcacgtggttcatcttgtgcagatcgtccagggctttgacaaagccgtcggcgaagccctcctgctcctcggtgacgccgccccctgcgccccctgcacctccaccgctgccacccccgcgggggtaaaagtactgtcccgggggtgtaggcgtcgtcgtgatcacgccgttgctgttggggacaatcaggcgttccagctccgaagaggcgagcttgagagacgcgccggtgtccgagccctgaccagaaaagtagctgccgccaccgccgccctctgggccgggtccgcgagccccaggcgctttgagactccggtaggggtcggccaggttgaccgccaggctcggtttcaggagtttgtagtcgtgtagagagaggccaccaggggcccggccgtatcccgtagctgtgtatgagtcgtcgtggtagaagggctgttccattttagtgcacatccgggcggcccaggcggtctggggagggtccctgcggggccgctccgggcctcgctgcagcgagcggcgagctctccgctgcggtgaccggactgggtgcctggtcgcgcgttctcgggggctggcgcgggcgggtagcagccagccggcagctgtgcgcaaaagccctgtcaggcttcccgagcccccgtcgccctctctggcgcgatagctttcctggcgtcgtttcccccagctcccagctccctgctggctccgaggctggcctggccgctctcaaggtcccagccgctcagcctgagccacacgcctttataccgcgctagtcagccacggaagtgcgctccgattggccgtcgccggagccgggcccccgcgcccccctcctcgagcgtggggaaggggaggaggcggctcgcgtcactgtcaggaagcgcgtgtccttgtaaacagcggccacgggccgggtggctcggcggggctgcagggggaggggctcaaaggacctcggggtacgcatggaaggaggtgctggggggcccaggcacatgagtgaggggtttcagggaggaggatgatttccctggagtccactgggacaaataccaggacctggtacgcagcaagtggggtgagggtcccagtatgtgcgaagaaacccctgaggtacccagaatacgagaggggtaggaggactgacaatccattgggagaccccaaaaagcagaaatgagggttaagcactgtaaatcgggagggttaaggagacacctgacccaggaattgactgggggtcccgggctcagaaggatgcgggactggaattttcacaggacggaggaggggagagatcaaaaggggtgagtgggtggagctgcatgacccattaaattgcaagaaatgagtaggggtccaggagctcatgggagctgagtccagagtctgaggctctcccgtaagcgggaaggaggcattaggggaagtctagatatgcagaaagctagtaagcggcctggggtacactgaggcaggtaaaatatgccaggtagaagatggagacatgtctgccagaaattggggaccactggggtcatctgctagcccggatgaaggagagagttagaaggggccggacacatcttcggagcagagaagacaataagagggtactcagttgacatgtgaggagggggccttgagggtcccgcgcaccaggactgctggatcttccacgactgctgctccccctcgatggtaacctcttagtcatctgtattctctgtcccccatcctaaaaccctcccctattgaccctgggctttgcccaacaccgtgtcggctcctagagcctggacccagcccgacggctggggcgcggtcgcccaaccccactcccttccttagaaacaggctggggaaagagcgcagaggcaggaagtgtggcaacagccccgggggaaggagcccggccctgtctccgtcactcggatcctacgggaccgtgcgccccgccctgggtcccgccgcatcctgcgcctcggaagaggaacctgggcgtgcgagcccccgcggaggcccgggtgcttggagcccgcccagccgcggcagcctccagccaccatcctctcccctcaagcaatggttccgcccgcggtgcctgcaggggaccgcggaggcaggcggcttggggagtgttccattggcccgacggcgggggacgcagccgaggagcggggcctggtcgccatggcaacaggcgggagtccgcgggcaggactgagcgcgggccggcccccgaagtctctccccgccgcccatattagggcacaggaagaggtgggaccagcgctgtcctggggccccgagccagaagcggggaacccgactatctgccaggtcccagggcgcgcctgggcccccagactgctagtcccgaccagccccgaccgccgcccccggggcccccacggccgcctggcccggccccgccccaccccgccgctttggggctgcgtcctgccaggcccggcctggcccaacccagcccggcaggtccccgcctgcccgcgggcctgggtcggacttcgcccccggcccgacggggcgcggagagggcgggccgatgcctcgaggcgcccccggcgcctgggcgggctggaacggcggctgcctcctccctcgggtggggtgcccttcccttctgccaggagatctggagctccgtccccaacaccccccactcactcatgtgagtcaggggccccactctcgtttta

SEQ ID NO: 1560526 - DNA, 4001 bp, Homo sapiens
gacagagggaggagagaaaggcgggggtgtaggggggaagcgaaccaggccccgcccagcccgccaggccccggcgggggaagaaggaggcggagagccgagctggcgtaacgagactttactgaaaacagaaaaccgggcgaaccaaggattacaaacaggaatgtggactcgtagcaaaacaaaacaaaacagaacaaaaaagggaggggggaccggtcgaaagaaccgaaggggggagcgagatcgaggaaaggggcggagaatttttttttcttcttcccatttctttaaaaaaccaacacaagaaaacacacacacacacaaccaacgtttgttcccgagtagaaacataaatagggcagaatcgaacactctgttcttctctcttccaaagaaaaaaaaaaaaaagtaaaagtaaaggaaaggcagggtttgaggctgcgccccctcggagcccccttccgcggcgcggtgtacaaaggggcagccgagacgcgcgggtttgtgcaacacggggcggccgcgcgggggaaagaggcagcgcgagggcgggggggtcatgcgctcgcccccccgggagcagggggtccagcttgtcgagtcctgggcaccctcggggggggggaatccccgggggccgcgccctctctgagttcctgggcacactcggggagggggggtccccagggccgcaccctctccaagtccggggcgcccacgacacccccccgcgagcccgccccttggggagggtggccgcgcatgcgccccgcgcgcggactcagtacgcgggcacctggtgctggggcagcagctggcagccgctgttgacgtggctgaggactttctgcttgagctgcgccacctgctcgcgcagcaggctcgccgtggacgccagctccgtgttctgactcttgagggtcttcactttctcttccaggcgcgagatgcgctccagcttgcgcttgcggcacttggaggcggcgatgcggttgcgcagccgcttgcgctccgccttgatgcgctcctgcgtgtccatgtcgatgggcgacaacggcgggctctcgccgaagctcggcacgtcgggcaccgtctgtggctcgtccttgagcgcagccaggcgcggcggccccaacgcgcctgggggtggcggcggcgggaagggcacaggttcggcagcgaaggcgaccgtcgcggcgccccccgcgcccccggcgccgcccgcgtagctgctcaggttcgcgtagacaggcgcttcgggcgcggccgccgccggggccagctcgccggggggcgcggagcccgtggccgtgcccgagggccccccggcggcggcggcggcggcggcagcggccgcgcccgcgccgagctggttctgcttgtgtaaatcctccagggccttgacgaagccctcggcgaactcctgctcctcgctggccgccaccttggggtagaggaactgtgagctcgtcggcgtggtggtgaccagcccgttggactggatgatgaggcgctcgagctcgggggaggccagcttcagcagccccaggtcgggagaggcgagcaggccgtcggggggtgccgcgctgggggcgccgtcggcgcgcaggggggtaggaggcggcgcggccgcaggcttgagcgctgccgccacctgctcactcaggctcagcgtcagcgcgtccttcttcatcatgctgccggccgcggccgtcgggggcgccccggggaacaagcggcccggggacgcgaagctgccgccgctgccactggcgccgccgcccaggccgctcagcgcctcatcgccgtagaagggtgtttccatcctccgcctcccccgccgcgccggcccgggggggagtggccgcggcctcccggggggcccgcgcccccccgtccgctcggccctgcgcccgccccggccgcggccgcagcgcccggccctccactggcggcggctcctgcgccgcgccacttgtgcgccctcttatagcctcggctcggcgcgatgagctcaccgcccccgttcgccattgggtgcgggtgacgtcgctcatttgcatggaggggcggggccaagccgccgacgcccgcccggccgccgttgccccggcgacgcgcggtaaacgccacaacagcgcgctgccttgtgggttgacgtcatgggggcggccgcgcgcccgggccgggtcaccccgccccgggaccgctgtgtacgaccgatctccccggcgccgcctccgccaaggcacgtcccgggtggcgtgatgggcccgggccaccaggcgcccgcccgccccgaggccccgccccgtgtccgcgcgtggggccccggccgggcgggggcgggggcgggggcggtgccggcctccggggactggagggggatggggtcccgcatggctaaataactccttggcgcctcctgctctgctgtgccgccagggcctcccctagcgcgccttctggagaggctttgtgcggatacggggctggaggcctggtggggctgtgtccgggggctcgccgggggtgtggggaggtctgcgttcctcaccctccctccttccttccctccctccctccaccccgcgtgtgattgctcaggaagagacgggaggggagaggagggtcgccagaagttgctgaaagcgcttggatcctgatcattttcactgagtgcgttctagaaccaggagtcctacttcctgcctttacagatgggaaactgggctcagagaggtggagtgaccatcccccgagagttagctaggagtcacagcagggcccgggctgtgactaggcctgagctcttgtccacccttagaaccctagaacctgggagtccaggcccctgcgcagccccttccttccgccgcccacgttttaaccccaggtctgccagggctgtgatgtcctgggcgagggtgcccaactccaggggctgggctgatgaggcaggaatgccgggtataattattacatgcttgttaccactatcatggctgttagggcttaatgagccactattaagactggctgggaagggggtgtgagggaggagagatggacccaccccaccaatactcacaagggatccttaggacatctggatctgacctacagcctctgcatgcacccctccagctccccacctctgtctgaatggagcccacaccctcctttccctgacctccttcccctcactctctctgatccttggcctcccagttgcaggactaatcgtacctctgggcctttgcacgtgctatgctctctgcttggtactcccttcccccagtgcaaagatgtgtcttcaggaagtgccccaccctcagactttactcctttattgtagcctctgaatctgccagaatgatggagtggaccatagtccctgaaggtcagggacattgcctatgctgagcctgctgacagggcctcgcatagaatggatgctcagtattaaaggtgaatgcggggctgggtgtggtggctcatgcctgtaatcccagcactttgggaggccgaggcaggcagatcacttgaggtcagcagttcaagaccagactggccgaaatacaaaaatacaaaaaaaaaaaaaaatacgaaaattaaccgggtgtggtggtgtgcacctgtaatcccagctactcaggaggctgagacatgagaatcgcttgaacccgggaggcagaggttgcagtgagctgagattgtgccactgcactccagcctgggagacagagtgagactccagtctcaaaaaaaaataaaaaataaaggtgaatgcaacaaaaggttgcttgtgtgggtggtctctagcctcagtttgtctgcctggccagtgggcatgcgttactccttttctatcctccttactcacctggctctgcccccaactggggcatgaaggccataagggaggctgtcctcatcaccaagagaggtggcctgtcggccacacgcggtgactcctgcctgtaatcccagcactt

SEQ ID NO: 1560527 - DNA, 4001 bp, Homo sapiens
ggccaggtagggcacctgctgggcatgaaggcagggctggggctccaggggcacctgagcttgtccttgttctcccgtcctgtcttgctttgtctctctccaagtctctctgtgtctctccacgtctctctgtgtctctccacgtctctgtctctctgcgtctctctccacgtctctgtccttctgcgtctctctccgtgtctctctccctgtctttccacgtctctgtcttcgcttctctgtctttcaacacctggaacacatggtcaccaattgcaggaaattccgttttccatttgcctggaggctcacccctgagcaacagaaagttgattgaaaatattttctggccaccaaagagagatggagaagcagggagcaagcgggattggagcaggattggaatagccgagcggggtgggctgggggtgggggaagtgagggtgctgctgggtaaatagtatagtaacagtaatactaacatcaactcttttttttttttttttctgagacggagttttgctcttgtcgcccaggctggagtgcaatggcgcgatctcagctcacggcaacctctgcctcccaggttcaagcgattctcctgcctcagcctcctgagtagctgggattacaggcacctgccaccacgcctagctaattctgtatttttagtagagatggtgtttctccatgttggtcaggctggtctcgaactcctgacctcaggtgatccgcccgccttggcctcccaaagtgctgggattacaggcatgagccactgcacccagcctaacatcaactcttttaattgtcatgacaattctatgagatgggcacttatcgccccgtttcacagacaggggatgcagagggtacagaaaggtacagtggcttcctcggggtcactggggccatggggaagtggctgggcctgaacatgaacctaagcctggtggatccccccactgcccaccaagccaccaccctcagactccacatcagatatctctacccgtttcccagatacggagactgaggtctgagggtactcagtcatctcaccgccctcgatgaggaccagcacgtcccgagtaaggggaagagaaaggagacgagggggtgtggtgggggagatggatgtctgtggctgagacccttctctcgccatgggacccctggggaatggggaaggggtgacaggataagacagagatggagagactggagcctataagaggggacaggtagggagcgcagggaaggggcgcgggtctccccaacccaccacccaagaccggcctgcacatcgcggaggtcggtggtggtggtgggggggggtcttcccgccccaaactcggggtggggggaggcgagaaggaccccgccccgtgcagagagggggcggggcctgtgggatcccgggctaatggcaaacagctgccgctccccacgccggcccagccgccaagcccaggcccagcccggccggacgcccggccgccttcccgccgtctggggcatggccgcggaggagggcgaggggggacagtgcggggagagggcagagccggggaggaacagaggcagaaagtgggacagagacaggggagagcgggcagaggggagccaagacaggagaaacgggcagggcacgaggaatcgatggggggtactgggaggaatcgatgggggtatggggtcaaagacgaggagggggcagggacgcggggacagacactccaagtctggaaagtttgggcacagaaggtggagttggaggcagcggctcgttgagaccagcgaggtcgtgtcccagggttggaggcggggggtagggtagtaggtgtgtgtggagggggtgcacactcgatccccgaaccagacttgaacccctacccagccccgggtcccactcgccttgcgcgctccggccgctgccttccctgggtcccgccgcccgagcgtcttcgcgcgcgccgcagcctgggcgcccggccctcggaggtggctccgcccgcaccacgccccctccggctggtcccgcccccccagccggcaccgccccctccagccgcccgggcgccccggccgcggtggggggtggggatggagagacgctggttggagactggatctcacctggacagcaggtgtgtgtgcgcgccggggtgtccggcctcgtccttccttcctccctaagtccccgaggcagggtcctcccactgccggcctcccccccaccgcctgctgtccctgggccgctgcggggggcggaacggctcggcggcgggagggggtggagctggccggggcccagctcggggagggcgcgcggggcgggcgcggcagcgggaggtcacccctcccccaggcggcccagggctggaagcggcccagcgcagtcctggcacacggtggcgtgaccgccgcgcgagaagggaggctgcagagtcctgggcgccggcgccagccagacctgcattcccatcccagacccaccaaacttttgctgctctgtgcctcagtttattcatctgtaaaatggagatgatcatgttagctacctgataggagcgttgagaagattcactgaccattaggaaggggcctaaccatcaggaaggaggcccttcgggttaaaaactctcataaatggagtggcctacttttgcagagatctttctgggagcccttttagtacacagccagccactcagcaagggcttaataaatattattaagccggcgaggtggctcacacctgtaatctcagtgcttagggaggccaaggcaagaggactgcttgaactcaggagttcgagaccagcctgggcaacatagcaagaccctgtctatgcaaaaaaatttttaagtgaaaaaaaattaggccaggcgcagtggctcatgcctgtaatcgtagcactttgggaggccaaggtgggcggattatttgagccaaggagttggagaccagctttggcaatatggtaagacgccatctctacaaaaaacaaaatacaaaaaaccacctggggccgagaaatggctcatgcctgtaatcccagcactttgggagtccgaggtgggtggatcatctgaggtcaggagttcaagaccagcctggccaacatggtgaaaccccttctctactaaaaatacaaaaactatcctggcatggtggtgcacatctgtaatcccagctactcgggaggctgaggtatgagaataacttgaatctgggaggtggaggttgccgtgagccgagattgcaccactgcactgcagcctgggtgacagagtgaaactctgtctaaaaaaaaaaaaaagaaaaagaaaaaaaagccaggcacagtggcatgtgcctataatctctgctactcaggaggcttgagccccggagtttgaggctgcagtgagctatgactgtgacactgcattccagcctgggggactgagtgagagcgtctgttaaaaacaaacaaacaaaaaccaggtattgttattgcaggtaagcatgtgacattatttgtgtgttgccttccctactagaacatcagctccacaagggcaggaatttttgcctgttgtcaccacgatgtccctggcacccagtatgttcttggtgtccccattgatgatgcagggatgtgtggatatggggcagtggactgtgagcatgtgatgagcatgtgacccagcccctagtgaccgcaccacatggcacaggttgcttataaaaaccattttaaattaaaaaagggaggaagcatcagtgcacacagatggggacacaggggcagagggcccagccccaagtacagtgtggtcaccccacagcccagtgggcaccagggcagactcccctcgcagcacagacagctgaggcccgggtgctggttcctctaggtacagctttggtccttgtgggctcagaggtctgcctttcggaaacttgctctgttcaaggagttcctggaaaaagaatgagggtgggtcagcat

SEQ ID NO: 1560528 - DNA, 4001 bp, Homo sapiens
acacctggctaatttttgtatttttagtagagatgggtttcaccatgttggccaggctggtctccaactcctgacctcaagtgatctgcccgcctcggcctcccaaagtgctgggattacaggcatgcgccaccgcaccctgcctggaccctggcgttctgagagtccaggatgagccatgggaagaaagaggccccccccccccaagccattctcccctgcctgcctgcgaccgcttacctgctgctccatcgcagcttcgctctgtgatgctaatcttcttcaccatatggacgttgctggtagctgcagcgggcactgggcacattgtctccaccacctcctggctgcggaacacaggtgggctctcaggcctaccaggcattgccagggccctcagccctgtgccgtaaggctccaggctctgggcccgctgtgcgggggcgccagcggctgtgctggccaccacctccacctcccgtggcccttctaccacccggactgtatccacgcggaccgggctgtccggcggtggccaggcctggggctgggggtcagcctgccgggcctgagctgcctgcagctcctgcagcgccttcttgagctgggtctccagcacagcgaccttggcggcgagggcagcctccccatcaggcatgcccaagtcccgttctcgaacccaggtgcccacactccgggtctccagtgccactgggtcctctgggggatcggggaggtccaggcagagctcgctgcgaccccggcccgctgtggggtggcccaggaacttctggctcttaagttgtactgtgagctgccgcttttcctcctggagcaccgagagcttcacctggagcacagggatcagcttcacctgctcctccagctgccgcagcttccgcagggcacccgccatctgctcccgcacgtgggccaggtgcccggcactgggaggcaccggtgtggacagtcctgaactccgtggtgtcgggggtggcaaccccacgcccaccagggaggctgtcgagccggccgcactgggggtcagggagcccaggccggtgggtgtggccgcctggtcctcgagacggcgacgggcatccagcagcgtgcgctccacccgcggattgaagccaccgcgggtctccagagcaccatactgagggtagaagccacggccgcagtaggaataggctgagtggcggctgtccccactggcattggagcacagcgactcagtggacgtccaccaggagccagggccacggggcagcgagctcaggcgggggcggcgctgcactgccacgcgtcgcagcgtgtggcccttctcgatgtcatccacgtacttgaggaagtccaggtccaggcggtagccatagggggtctccacggagtagggtggatcggggtccttggcagggaaggcaggtggggaggctgggccaggggtccctggggatgggagaaacaccaggacctttgaatcctcttgtccccattctcagggtgaagactgatgcctggggagagttggggtttatttgccgaagagatgggagcccacctggtactcaaccgcgtctgctctcagaccctccagagcagggctatgcctccccttcagactcccggcgctaggctatgtcgcctctcaaatcccccaggacagggctctatccctcggcttagactaccccctttttccggtaagactctgcctcccccttcagaccctcccagggcaggactctgcctcctccctcagacctctaattgttgggctgtgtcccaccctcaaagtccccagggcaaggtccccagccccctcaggcctccagaactgaagctccccggggcagggccctcttccctgagtcccctgacctgggaagggagcaggcacgtgcaggacctgggccatcttcttttctacagatgctccttggaagtcacttgagggactgcgagtcagactgcctgcagcaccggctgaggcttacctggggaaagagaaccacggcgccgggagttaggagtctgtagggggaggggaggagatgaggccagccccctccacagctggttcacccagccccccaacccaggtctgggacccactcatagacgcacacccagcctggctgcggaagggccccccccgaccccctcccccccgcaggtctggaacaaagaaaccaaacctcactgcctgcttgcacatctgtccaggccctggacaggctccagctgttcccatagcccagcctccacatagccctggggctggggggccccaagcccaacaggccccacccttcctgcaccccctcccctcagcccaggcccggagctggccacacggaaggatgggggttgaggcgctaaggggttggggaagaagggaacctcgtcttcctgcaaggatctgaggagacagagacgcagggggacaaagagaggcaaagcatggcgaaggggacccccagtgaccccaaagctgagagctgggtcaggcctggactgggtcggggggaaggggtagggaaagttggggaggcagctaggagtgaagcctttcccctttatggaaacaattttctctaaaaataaacagtttcactgccgggctacacagaacttcctgcccgcctaggatgcgtccgggcccaggggcgcagtagggatagagggccgggtggaggcccaggaagtcctgggggtggaggggaggaagtaagagggggcgcctggaggctgcaaaagggagggacagtcagagcctctcactaaacccccctcagccttggaggccggccagggctcttttgtccccaatataacccatctgaacttggctggtcctttctgttatctgacctccagccatcatgctgcagaggccccagcccatcccaccatcagagtaaatcctttctggcctttgagtgctggggccggcaggtaccttgggaggatgggccaggtagggcacctgctgggcatgaaggcagggctggggctccaggggcacctgagcttgtccttgttctcccgtcctgtcttgctttgtctctctccaagtctctctgtgtctctccacgtctctctgtgtctctccacgtctctgtctctctgcgtctctctccacgtctctgtccttctgcgtctctctccgtgtctctctccctgtctttccacgtctctgtcttcgcttctctgtctttcaacacctggaacacatggtcaccaattgcaggaaattccgttttccatttgcctggaggctcacccctgagcaacagaaagttgattgaaaatattttctggccaccaaagagagatggagaagcagggagcaagcgggattggagcaggattggaatagccgagcggggtgggctgggggtgggggaagtgagggtgctgctgggtaaatagtatagtaacagtaatactaacatcaactcttttttttttttttttctgagacggagttttgctcttgtcgcccaggctggagtgcaatggcgcgatctcagctcacggcaacctctgcctcccaggttcaagcgattctcctgcctcagcctcctgagtagctgggattacaggcacctgccaccacgcctagctaattctgtatttttagtagagatggtgtttctccatgttggtcaggctggtctcgaactcctgacctcaggtgatccgcccgccttggcctcccaaagtgctgggattacaggcatgagccactgcacccagcctaacatcaactcttttaattgtcatgacaattctatgagatgggcacttatcgccccgtttcacagacaggggatgcagagggtacagaaaggtacagtggcttcctcggggtcactggggccatggggaagtggctgggcctgaacatgaacctaagcctggtggatccccccactgcccaccaagccaccaccctcagactccacatcagatatctctacccgtttcccaga

SEQ ID NO: 1560529 - DNA, 4001 bp, Homo sapiens
tctgtcacccaggctggagtcagtggctcgatcatagctcactgtggccttgaacccctgagctcaagtgatccgcctcagcctcacaaatagctgagactacaggaatggacctctacacctggctaattcaggctaatattttaaattttttggttttttgttttagatggagtcatgctctgtcgcccaggctggagtgcagtggcacaatctcagctcactgcaatctccgcctcccgggttcaagtgattctcctgcctcagcctcccaagcagctgggattacaggtgtgcaccaccatgcctggctaatttttgtatttttagtagagacggagtttcaccatgttggccaggctggtctcaaaccaggcgtgagccgtgcccggcctaattttattttttgtagatacaggtgtcttgctatattgcccaggctggcctccaactcctgggctcaagcaatcttcccagttcagcctcccagagtgctgggattacaagcatgagctactgcacctgaccttgacttattttttaaaatcctagctaaatccactgaggttggatttcctatgatcattgtcccttcccctattgtacagatggagaaactgagacacagaacagtttagtgtcctgcctgggtcctgtcataaacaggcagaggcaggttttaaacccaggcaggtcttccagagtccttgctttggccactacacttgaatgctttcttttatttttatttttgagacggagtctctgtcacccaggctggagtgcagtggcaggatctcggctcactgcaacctctgagcccagggttcaagcgactctcctgcctcagcatcctgagtagctgggattacaggcacttgccaccacagctggctaatttttgaatttttagtagagacgggtttcatcatgttggtcagtctggtctcaaactcctgacctcaagagatcagccctacttgacctcccaaagtgctgggataacaggcatgaaccaccaaggagcctcagggggcttgtccctcccagcctacacctgtgtcagactctgattgggggcggaggtgcccaccacctctgcggcttcaggggctggggcctcactaagtggggcgtttagctgccttccctctcctccgctccctgccctgactgtcacagctagatccggattctgtgcctgagaccccctcattaggccgtcagagccgacgccacacgccccctctcccgccccagggactattttgggacgcagagctgtgatcaccaaaccggagtggtgggggccacggcaggccagtgaggatcccagtcctggggagagggcgccttccaggaggccctgagtactggcagcccctgatgtctgctgggactctcagactcttgaggtgggtgggtgggggaccggtggcggcaggaaggtgggtgttaaagtcatcatcacccgtccacccccaggtcgtcctagccgcacagagacagagcagtttcctacaggaagcgccgccgggcggttccatccgctacccattgtctgcgggtccgggggccgtgcgtccctccccaaaacaccatttccgtgacacgctcccacacccagcccagcgcgaggggctggctggggtccccaggccgtcccgggaaagggtcccagggccggttgtggcattagggagcgaacgagccccgcagtgagctcccgaagggcgagaggggggcaagcccacgcctccagagccccccactctgctcgctacccacctgggacttccaatgtgggaggggtcccggccagaggacacgacgcccgccccgtcgcagcgggcagagccctcagtggggctggaaacgcagcgcagcgccgggtcccggtgcgtccccgaatccacccacccaggggtcccccatccgtgtccccgcaagctggcaatttacctgaagccgcagccccagccgcgcccgcacccgagcccgccccctcgaagtccggggactgattatcaaggccttcgccctaactgacggccacgccagccaaccagcacccgaggctctccaagccgcccagtgggacggtggggtgggacaggcaggcggggcctggaatgtaggggtggtgactgagggcgggccctggagtgacggtcgccgagcgctggctggcggcatttctgcaccagcagaggtcaagtctctgcccagcgccgggccaaggagcttggatttgatccacaggcacgagggagccatgggagaactatgagtagaagagtaacccggtgggatttctataactggcacttatttcgcagtgcctgggtgaagtatcaggtcccggatcttccccaccgcagggcctctgcacatgctgttccacctacctgaaatgctttcccttgcacctgtacacgtaggtactttttgaggctcccctactgttttttgttttgttttgtttttgttttttgagacggagtcccaggctggagtgcagtgacactcactgcaacctccgcctcctgggttcaagcaattctcctgcctcagcctcccgagtagctgggattacagacacacaccaccacgtccagctaatatttgtatttttagtagagatggggtttcaccatgttggccgggctggtctggaactcctgacctcaagtgatccgcccgcctcagcctcccaaagtgttgggattacaggcgtgagccaccgcgcccggccttccctactttctgaggttcagcttttgtgttgctgccccctaaattcctgacatagcccctccccagttagtatttttctcatcactctattgtattaacctaatagctacttttactatctggaaaaaaaaaaaaaagcagactctgttattggcaggcgcagtgactcacgcctgtaaatccagtatttagggaggcatagatgggaggatagcttgagccaggagttgagaccagcctgggcaacatagcaagacctagttctcaaaacaaaagaaaacaacaaaacaaaaagacaaaaacgaaacactcagttatttatttggtttattttttaatttaatttaatttttttttagacagagtctcgctctgtcccaggctggagtgcagtggtgcgatcttggctcactgcaacctctgcctcctggggttcaagcgattctcctgcctcagccttctaagtagctgggattacaggcgcacaccaccacgcccagctaatttttgtatttttagtagagacagggtttcaccatgttgcccaggctggtctcgaactcctgacctcaggtgatccgcccacctcagcctcccaaagtgctgggattacaggcgtgagccaccatgcctggctggttatttattggtttacctgcttgccatctcactaaagtgtcggcaccaaggccaggtggggtggctcatgcctgtaatcctagcacctcctgaggctgaggtgggaggatcttttgagcccagcagctcaagaccagcctgggcaacagagtgagactctgtctctaaattaagtgtcagcaccatgggaacaggaaactggttttgataactgctttatccagcgaccctagtacacagtagatgcttaataaatgtttgctgaaataatgttttctttttcttttttgagtcagggtctcattctgttgcccagggtagagtgctgtggcacaatatctcagctcactacaaactccgcctcccaggttaaagagatcctcctgcctcagcctcccaagtagctgggattacaagtgtgtgctacgcctagctaattttttttatttttagtagagacgggcttttactactttgcccaggctggtcttcaactccttggctcaagcaatccacctgccttggcctcacaaagtgctgggatcacaggcataagccacagcacctggccagaatatagtaatattttaaaatgtattttaaca

SEQ ID NO: 1560530 - DNA, 4001 bp, Homo sapiens
catcatttaaatacccagctcctctttacacattggtcagtagccgctgcgccaaggccctccgtgacctggttatcccagacttcctcccaggatcccagggatcatccctgggccgctgactttctggttgcctgacctggtgggtggctggagacgtggtccctgccccttcatgcgtgggaactcatgtttgagtagggtgcaacctcttctctctcaaagtcccgcctccagtgttgattttctagatggggagcatccctgccctggccccaccaccttgtgcctagcttttccttgccctccacagtcccagcccagagtataatgcggctgggcgcggtggctcacgtctgtaatcccagcactttgggaagccgaggcgggcggatcacgaggtcaggaaatagagaccatcctggccaacacggtgaaaccccatctctactaaaaatacaaaaattagccgggcgtggtggcctgcacctgtaatcccagctacttgggaggctaaggcaggagaatcgcttgaacccgggaggcagaccttgcagtgagccgagatagcgccattgcactccagcctgggcgacagagcaagactctgtctcacaggaaataaaaaaaaaaagaccttctctgcaagccgagccctaggccccctcctctggcccctcaacctggctttctttccatagattcctcctactgtcgcccctcgggctccagcaccctcagctggagttattcagggcctggctttcaccacccagccgcacagactccggagttttcaggctctccttggcccccctcagctgtgatttttaaggttcctgtcctcctaccccttgcatcaagggccctgccctcttcacgccgggtttctcactgacctcaaccccaccttctgatggggcaggtcctccgacccggatcctcaggccccgcctcccgcccaccctgtcttcggctggcccacccctcgcagcccctggccccgccttatgattggccaggtcccctctggaccccgcccatctcctcccaaaccccgcccgtctccacccacgccccgcctctcaccgggccggctgcggctgcagcagcaagccccgtgccgtcgcggtcgtcgcggaagtcaggcagcgtctcgaggcagaagacgacgatggagacgaggatgaccagcacggagactacggcgagcacgcgcgcggcctgagagctctcgggaaactcgaaaagcagccacagctggcgggcgaaggcgcggcggggcagggggcgctcgggcggcaccgggcagccctcgtcctcgcgcaggcgtgccagggccgccgcgcccagcccgtagaaggccacctcttccaggaagacgtcgagcggcacgtgcgccggccgccgcagccgcccaccggactggtagtagtagagcacggcgtcgaagctgggccggtgccggtcgaagaaatactcgcggcgcgcgtcgtcgtagaagcggccgcggcgcgctgggtcccctagcagagtgtccgggaagcggcccagcgtgcgcgcccgcgtctcgaagcgcagcccggccacgttgagcaccagccgctcgcagcagccgcacggcggcgggcaccgcggctccatggcgcgcgcagccccggcgacccgcgaaccgacgtgtggccccgacgcccggccccggtgcggccccgcctcggccgcctcggccgccgccgccgccgccccagcccggtgtccggtgtccggtgtccgcgcgtaaaaatagcccggcagggcggctagggcgcgagggagggggcactgtgaccccggcggggcggagggcgacagggcgaccgcgcgccctctgccgggacgcccgccctgccctgccccgccgccgccgccgcccgcgcctgctctgcgcctttcccgtcccggggtcccctttctctccgtccttctgccgccgggatcctgtcctgcgtctctccaagtttccgtgtgcgtgtgtttcgtcagaatcaggcttcagttgcagtcgcctcttttcttttctctttcttctttctttctgtctttttttttttttttttttttgagacacagtttccctctgtcgcccgggctggagtgcagtggcgcgatctcggctcactgcaacaacctccacctcccgggatcaagcgattctcgtgcctcagcctccctagtagctggaattacaggcgccaccaagcccagctaattttttttcttttttcttttttagttgagaaggggtttcaccatgttggccaggcaggtctggtactcccgacctcaagtgatctgccctccttggcctcccgaattgctggggttacaagcgtgagccacggcgcccggcctggagtcgccctgtttgcacctttgtctctcactctcttgtgtgtctgtgtccggctgtcccctctgggtctctgtctcttttgggatgtatctctgagtatctctatgggtcatttatttctgagattcgtcgttctgggggcctctgtatgggtccctctgccagcctctacgtctcggtctccgcctttattttgactcttggtctgtctccgtttatctcttgtctctcttggtctctttgtctctcctctctaggtctctttttgctcattatctcttagccctccatgtctctgtctcagggttcctcggccgctcccctttgggtctccccttggggtctctagaggacttagggtctccggagtcatatctcttgatctctccctgaccatcactccatgtgggtgctgccacagtcccggtggctgtcccatcctagggtcactctggcagctgcaaaccactgagcatgtgcacacacgccccattctctccccagagttcgctccagagtctccacctggattcttcgcaagactttctgagacctagcaggacctgagctgcggctatgactctggcaaaaggagtctggtcttgccggaacgggcgggggttgggggtgtgggccggggagatgccacagggtcattttcaggaactgaagggcgcagagacaagacggtggccttctagccactggtgtccggtgacactgcataaaaatagctccatcagatgggcttgggggaagtggaggggtttgatcactgagactcccaggaaagaagtcctggtcgccctctgctgggggtgtggagagaggtaggtactaagggttcgaacgccctgctaatcctggcactctttctcttcctgtcttccttccttccattccttctctcttcttttcttctttctttctttctttttttttttttcttgagaggagtttccctcttgttgtccaggctagagtgtggggacgtgatctcagctcactgcaacctccgcctgccagtttcaagcgattctcctgcctcagtctcctgagtagctgggactccaggcacccgtcaccacacccacctaatttttgtatttttagtagagacagggtttcaccatgttggccaggctggtctcgaactcctgacctcgtgaccgcctgccttggcctcccaaagttctgggattacagacgtgagccactgcacccggccttttctttctttttctttttcttgagacggagtcttgcagtcgcccaggctagagtgcagtgttgcgatcttggctcactgcaacctccgcctcctgaattcaagcaattctcctgccttagcctctggagtagctgggattacaggcgcccaccacacgcggctaattgtttgtgggcggcaagccacccaggtgccgaggcaagagaccgagggcacgagctgttccagtataataaaatatataaaataagaatagttatagtagatatagatcatagatatgattatatatgaatatcattaatcattagtttgtagcaattactctttattccaatattataataatcctcgctctacaatcataacctaggaaaa

SEQ ID NO: 1560531 - DNA, 4001 bp, Homo sapiens
gtgaacacagagggggcctggaggttccaacggagaagatgccccaagactcagtattgcagtgagggggaggtgaaaatgtccaggcaagaacaagtggaggtttagaggggtccagaaggctgtgaggttggggtgggggagttttctgagactctgagagcagaagatactgcaggaagggagtggaaaaaataatcagaagattcaaacttggagagagaggtcttctgggagacgggccacggggtgaatcggggaggtgctgggagagactgagagttgaatagggggccccagagagtctggagaaggcagggaaagtgggggtcagggctcacagggcctaggagaatttgagggctgagaagggatgtcttctgaggggctggggaaggtccaagaaaccaagggctggacggtgaccaagagtagtgagaagagatttgatggggcccaggagacatgagggttggggagggtctcagaggagcccaggaaaggtggggaccgggttgttcagagaagcacgggagattcacggtctggaggaagtgtctaagcgtctagggtggccttggcgggggagggggaactttggaggggtctggaagagcccgaaggttggagatccgtctttggaggatctgggggatggctgcgagaggggggtgtgttcggaggagcccaggagactcaggattggggaagaggcttctaggagactgagaagcctagagggacccggagggttggagctggggcgctcctgggagactgggggcgcctggagaggcgggggtggggtggatgggggccccgagagcgcgctcaccctggcagcccgcgacgagtaggggtcctcgaagagcgcccacacgcggggctgccagcggcgccaccatgtgccgcccgcgccgcccgcgccccctggcggccccccggcgccgccgcccgcgtcctggaagcagaggcgcttgagctcgccgcccgctccgtccaggccgccgccgcccgcgcccgcctcgtcgtccaggcctccgtcgtgggcgcctgcggcgttggcggcgttggcggcgcccgcggggtcgggcgcctcgaaggagtcgagcgcctcctcagcgtcgcgatgctgccggtaggtcatccagcagcaggcctccacgtcggtctcgtcgatgccccagaagccgagctcctcctcaaacaggggcccgcacacgtcggctgggcagtgcagcttgccggtgcggtagtagttgagcacgtacgcgaagactcccgggtgccggtcaaagaagaactcgtcggcgcccgggtcgtagtcgaagcgtgccgccgcctcgggctccgtcaggccggccagccgcgtccccggcagggtgcgcagcgtcgagcggtacgtctcatggcgcacgccgcccacgttgatcacgatcttgccgctgtcgccaccgccgccgccgtgccgccccatggccgccgccggcagcccggggcatggctcggcgcgccggtccccgggcccgcggggtgccggggggcccgccggggacgcggcggggccgggctgcgcaggctgctgctgctgcggcggcagcggtggcggcggcggggactcgggcggctgcggcggtggcgccggctgctgcttgctggccccctggcgcccgcggaaggacgagacgcagactgagctcagcattggacggggggcggggcgggaggggcggggacgcaggggcggggacacggggggagagaccgacgggattgggtgggaggaggagcgaggtagcgggggcgtggcttaggggagaggaaccaaactgattggcctgggggaggtggggcggggctgtggctgggaggagtggggcgggcactctaacgcgacccagctggacgagtcggggccgccaatgagacggagcgattggctctttctaagagagcagggaggaggggcggggcggggcgtcaagggaggcgggaccggttactactaattgtgttcggcagcactggtagccaggggaaggcggggctagatacgatagagagagaccttactgaactgaaaaaagtgcgggcggggtagagggaggaggggacacatccaagctatttaaagacgcccgactggcctggaggggcggggccaccatgagagaggccgtcctgattgggctgagaaaggggcggagagaaacaaaacagatcgcacgccctcacctaaaacaccgctaggcaggacctggtggggaggagcattgcttggaagagacagggccgcagaaagtagaaacggtccagatgagactgcatggggcgggaactagagatggaggactttcccgcgcaagggggacaggctggactgaaagaggacacgggaagaacaaagacttagactcggtgagaaggtgttgaaacttgagagagtcctggaaacccgagagggtctggataggcctaagggagggagcggggctgaggctccaaggcgggcctggttagtcggggctgggcccggagaatgagtgtccggatggatgagtggtactgaggaaggtgagtggggtcgacaaatagaaaacgtcttgaggcagggcgcagtggctcacgcctgtaacgccagcactttgcgaggctgaggtgggtggatcatttgaggtcaggagttcgagaccagcccggccaaaatggtgaagccccgcctctactaaaaatacaaaaattagtcgggcgtggttgtgggtgcctgtagtcccagctagtcgggaggttgaggcaggagaatcgcttgaacctgggaagtagaggttgcaatgagtcgagatcgcaccactccactccagcctgggcgacagagcgagactctgtgtcaaaaaataaataaataaaagaaaaagaaaacgtcttgaatgggcggtaggaaagagagactaaggaaggagcggggcttgagggtcttgaaagcaaccagggtaggcgagggcagggcagggctaagggagggtagaggaacgggagaggtggatcccaggggaacaatgagactacaaagagtacaaagctactgggctggatggaggggagggacctggaacggggagtcttcgggatcagaagacctgggagagggcactgcctaaaggtcacagggtctcaaagggcgaggcgagaacttctaacgaacgctacaccgcggcggactgcagattggaggaccgagggtagatgaggactggtgaggagggggcacgcaaggaggcagagaggacgggagaggggagaggccaaagcgccaggaagcaccgtcaagactgaggcaatataggcaggaccgataaaaaatggggtgggctaggagtctcagaggtcgggttctggggaagaatggagtgaggggcggggccagaaaaaggggaccgcctcggagcgggccgtccccgccccctgggcggtcgtaggctccgagaggcagagcgcaggctcagggggctggggcggggccagcggctgcggctggggctgcggagggaggaggcggcgcctgcgggagcgaagggggcgggtcagggggctgcgggcgccctcgggcagcacagtttctggcccgccgcttcctgctgcaggtgcggcggctgattcgtatcgcctcccaaccccatcccacccccgctcccgtttctgggtttcttggcgtctctttttctcccttcttgagtatttgtgccgccgtctctgttcccacccctctgagtctccgacccctcgtttgtaaatctgccctcctgggtctctgattctgtccccctccttctgagtctttgctcctcttctctctaggcctcagtctctcctccctggtgtctcagtccccgcccccccaccccagctcccccgagtctctttctcttggtttctgtaccattttatcaggggtgtgcctctctgtctggggctctgtaccgcactccctgggtcttgtgtcc

SEQ ID NO: 1560532 - DNA, 4001 bp, Homo sapiens
agactccatttaaaaaaaaaaaattaattgtgatggctgcacaattgtgaatacactaaaagccattgaattgtaccctgtagtgagtgtatgatatgatatgtgaattagatttcaatgaagctattgtaaaataaatgaaatgggcctcatgcccgaccctctgatctttggcaactctttctgagtctcggtttcctccattgtaaggtggggaaattgggacttcttaaaagaccaggaagggccttcttaccatatggatgagggcccagtcctggcttagttgctcacccaccatgtcccctgggatctctggcttctttttccagagactcagtttgctcaaccatttactaggtgtgtgatggatgacaggtcaaatcctttcctgagcctcagctctcatctgtgaaaggcaggaggcctgggggctgggcatggtggctcacacctgtaatcccagcactctgggaggccaaggtgggaggactgttggaacccgggagtctgaaaccagcttagggaacatggcgagaccctatcttaaaaacaaaaagtatccagccatggtgatgcagctactgtggagactgaggtgggggatcacttgagcccagagttcaaggctgcagtgagctatgatgctctaccactgcactgcagcctgggcaacagagcaagaccctatctcttaaagaaaaaaaaaaaaaaaagagggcaggtgcggtggctcacacctgtaatcctagcactttgggagtccaactcaggaggaatgcgtgaggccaggggtttgagaaccagcctggggaagacagcaaaaccctgtctctaaaaaataaataaataattaaaaataaaaaataaaggaagaaaagaaatggagggaatcgcagcagcctgtcagggtggaccaaaggaaagggctgggcatggacccgcacccctcattgccttcagggttcactgcaacgttaccaaacgcttggccctgtggtggggaacttcccaggaactggctggatcaggacaaaccattccaggggttaaataatttgtgctggaacctggggatcctcaggggcttcttggcagggcctggcacactccatttggaaagaagaccatgagacaatgtcaagtttggcaccaactgggtctcccaaagccctgcacctgcttcccacaaccacgcaggcagcctggccattcgcgagggttcattaggcccacttgacagaggcaaggctgaggtgaggggaccagcctggctgtgtccagtgcccacagtgtaccccaaccttgactctatctcacccctgacaaccctgcatgttagagactgttctcccaaaaaggggaaataggctcgttgcccaagggggcggcctggaggtcaacatcaggatgcagcatctacacctgcagccctccccagcctggggatccccactcagcactgactccaccctcaggaaccacccccgtgggctgggggggcaggtgggcactgacactgacctgtgctccccaggccccagcctgggcctctcacccccacttgcccatctctcaccaaagccctttgatgaagggacctggcttttcacagaaaagccaactggggctgaggttagtcccttgtcgcaggtctctcagccagtggggagaggagtggcaaaagctagcctcccacccaggcctcctgggagccacggcccgagtgacaaaccacagtcttctcaagagcactctggtttcaaacacacctggtatgtacgaggcctcgtgatgagctcccgacatgcccacagcccccactggactctcagaccccactgctcaccttggccgctcaggatgccgggaggtgaagatcatcaccccctttcacagttggggaacaggctcagggaacgccatgagctggccaggcccccgcagtgccagggggaatgctggttgggtcctaagcctttctttccttcccagagttctgccctcgaaatcctccagtcccacctcagccccgtgaggcagacccgttgtctacttcccaaagccaacgggaaccttcaccagggggccatctgcggccaacatggcccagctcccaggctggctgcgactcaggctcagggcacccccctcccctagcaaaagcagggcgggagggaaagggatcctccacctgacctgcgagagcagcttaatgtttccatataaaggagatacagggcttaaggtgcttcaacttcgtgtcaaagtcactgtctaatctgaggccaagaagccccgcccccaggccccaccctcaccctcccaaatcaacactctcactcttccgaaaccaggggtgttccccaccactccccacctactggtgggggctggacagcaggttggaaagcagagactacagaaagacaaagagatgcagagataggcaggaggaggggtgttgagagggtgccccaagaaaaagtacagggaccaagcaggacagggaccctgagagagagggggacagagacccagagagggcagcaggaaagggacattgatccagagagaaagggacagagaccttgagagaggacagagacccagagagaggggaacagagaccttgagaggatagagactcagagacagagggggacagagacccagagagagggggggacagagacctagatggagggggacagagaagatagaggcggacagggcaattgggaaaacgaaaaggagaaaagaaatgttttaagaaatggcgacatggggagatgaaattgtgaagacagagagaggcagagagagatgggagagacagagatgggggagagagacagagacagagacagacagactgagagggtttctctgaaaggatggaagccagtgagaaaatgcataaaatggggatggggtgagagttggaggcactgaacctgggggtggattctcctggcgctgagcctgtcactgatgggaagacaaggccttcttgaaggggacaagctgaggacagggatgctggggcaggggtggatgggggcgacgcagcagagcaggaggggatggctcagcggtgccttgcatggaggcacgtacctgttggggcggcccacccccatgccctccgctgggggctcctcggctagggctgaggggaagcctctgtgggtgctgaggggctgtagtctgtccttggtcccaggggccgtgtgacgggcacccgacctcggagtccacagatggatcagaggctggatggaggggggccgggggtggggctagctcagagccgcagagggggagccagggaggccagccaggcagagcggctgggccacagcccaggcaggctggacaggagacagcggcggaggagcgagacagcgactagggggcagggagactggcagtgggggacgggagactctgaaagagggggacacagagaagaaagaaagaaacgtgataaaggggagatggacggagggagaaatggggggtccagagttccctgagatgaagccttcataagctggtgggggtcagggatgaggcccctttcactaagccagagtgagttccagatggaaggacacttagagaaggcagaacgcggcggcacccagtgggcggaaggttgggttgcactggactcccagtggcctcccccagcctagcggcctgggggcagctggtgccaaattcctccccacccccaaactccccccacaccccgtttcctcatagggctgtggccaaaggaccagagtctcaaatacacctcaggcctcttcctggtcctttattgctgctcaggagccctgaccttcctcccgacacagcaccagcctctaaagtcagggaggaggggagagggtcgcatgtagcccccacacggagaaatcctggccaaacccagctggcaggaagacaacgggcagaagcaaattgtgttggaggaacccacacctccaatt

SEQ ID NO: 1560533 - DNA, 4001 bp, Homo sapiens
ccaggatctgggaagaggtaggaggcgtgcacatgacccagggaagctcagaagcaggtcaggccgccctggcagcatgggcagacccaggggaggtcagctaacgagaagtcacccagctctgctgccaggggaccaaaagcaaaagctgccccctattgttggccgggagggcgagttaggagtctgggctaaccctgcaccagcctcctctcctcaacaaatccccaacaaagaaacaaagaggaagtctgggagctgagaaggggctgggggagcagcagagcctggcaacaaagagatttcccaagtctggcttctcagggtttcccaaaactcggggtccctccacggtgggtccttttgacacatccctagctggggctgctgaattgggagtcccaggtccagagggaacaggtggtgtccctattgggaggaaaatcctgcattgagagtgaccccatataggggagatgtcaagatggggtggggtacctagggaagggttttgtgtctggggtcagagttgcctgctggggagtatggggccaggagacagatgacagtctggagcagaggcccaggtccagagggccaggagtcccagatggcggtgccaggtccttgctgaggaatctctgttgggagggaggtctttagtgaggacaccctgagaggtctggagatttagggtcctcgctaaggcgccagggtcaggaggaggttgagatggggtttctccaggggggtttcccagaaggacatatctggagggtcaggagacatggcaagggtggcaggcccagactagagataaagtcaggggtcctggcatggttgagttctgggtccagagggggcaaggatctcccttggagggtggcgtgtcctgggtccttgctggaggtctctgaggacagtcctaggcttagagggggctggacagacccgggtcaccaagaggattaagaccggggaatgcagtcccagtgcagtggctcaagcctgtaatgccagcaatttgggagggcgaggcgggctgatcacctgaagtcaggagtttgggaccagcctggccaacatggtgaaactccgtctccactgaaaatacaaaaattagccaggcatggtggtatgtgcctgtaatcccagctactcggcaggctgaagcaggagaatagcttgaaaccgggaggcggaggctgccgtgatccgagatcgtgccactgcactccagcctgggcgacagagtaagccctgtctcaaaaaaagaaaaagaaaagaaaaaaaaaaaagaccgaggaacggggtcccagctggtctctgcaaaggtactctgaggggagctgggtgtttcctacttaggaggaagggctcggacttgggctccccgagcagagcagatatcatgagcctgggtcccgggtcctcactggggtcttttcgggggatccgaagcccagaggggattgggataagggtattcgtgagggccccggggtccccaggggttaaggatgaagtggggatcccgggtcctcgccgccttgcggtgaggcgcttacgtacccacggtggtgatcagcgtgctggcgaagaagagagcagaggcgaagtcccaggcggggtccgaggcgttggcggaccccgaagcgttagcaagcacgacccgccccagccgtccggccgccagcactcgctccacgaaggcgtccagggcgggggcagccacacacgggctgcgctgaagcagctgcgcccgcagcgtctccagctcggctcggagcctggcttcgtgcggcccctccagccgcgccaccaacagcgcgcccagcaccaggtacgcggcgtacgcggccaaggcgcccgccagaagcgcgcccctccgcatggcacccaccgggaccccgcgagccctgggtggccccgctgacgtggcccccgcctccggaccgtctggcacctagttccagttccgggagtgctacaggcgcggcagcagatgccccaagaggaagaggaaaaaggggaggtggggggcggcgacggaggaatgccccgcctccgggaaactgaggcacgcccaaccgccaggtgttcgttcggagagggtggagcccagtgctcccagacccagcagaccaacgggatggaaagggtggaggtagtcctctcttcccctcattccttccttctcgtcctcctggaaggctggttctctatgttagaagaatctgaactttcctctctgctcgcaggccgaggagtcgccccccatcgcgcacagcagctaaggttgtgcactgcatcagggcgcgcggctgacggagcaaggggcaaactgaaatccaattctcgctccattcgccaagttgtgagcctcggagtgggaacagcggacaccacagagtcaggtgtcccctgtgcccgtgtggacagagtggggatcctcagctactcaccaaagctttgttcaatgcccactttctgctgacccctcgctggatgatcctggagactcagtaatgatgagaccatcctgcgccatgcattcatggggctcccagtctaactgggagactgacacaagagtgacccacgcctgttgtcccagctactcgggaggctgaggtcggaggattgcttgagcccaggagttcgaggctgcagtgagctatgcctgggagagagtgagaccctatctctaaaaaaaagaaaaaagacagcccagagtggtcagggctgtgatgagggaagcaagggtacaatgatcaagcctggaatcagggagccctagagggccctgggagtccagaggaagcaaccacccctgcctagggaggtcaagagagcttcctgaggaaggggctagctgagctgaagcatgaaggatgaatggaaacaagccaggcagaatcacaaatacacgcctctatttaagaggaaatttttctttctgcgcccccccgtaagtctctccacttctgcctccagccagaactcagcgccttcctgacagccttttggagggcagcccagagtcctaaccccatccgactggcagaggagtggggcttggggctcagctcagacatgtcccagctggttctattaaagagctggcagatcaccgggcagagcccaacttggggttgacaatccagaagcagaggcacctgataatagaatcagtaacacaataggtgccagtgatcgaaggcttacattctgccaggccctgtggacacctgaacttgcactgaattctcaaccccgtcccaatataattcccactaaacagatgagaaaatttaggcttaaaaatgaagtagtcatttgagaccagctcgggcaacatggcaaaaccccatctcgacaaaaaatacaaaaattagccaagtgtggtggcatgcgtctgtagtcccagctactcgggaggctgaggcaggaggatcgtttgagctcaggaattagagactgcaatgagttatggtcgcaccactgcactccagtatgggtgatagagtagaccctgcctcaaaaaaataaaaagtagtagtcacacaactggtaaggggtgaacatgaggccagcaggaagccaatgaactaatgaacttgctttttttttttttttttttttttttttgagacaagagtctcgctctgtctcccaggctggagtgcaatggcacaatctcggctcgctgcaacctctgcctcctgggttcaagcaattctcctgcctcagcctcctaagtagctggaattatagatgcccgccacaacacccagctaatttttgtattttaagtagagacagggtttcgccatgttggcaaggatggtctcaaactgacctcaggtgatctgcccgccttggcctcccaaagtgctgggattacaggcgtgatccgctgcacttggcagtacttgctttattaattaaatatatatacataaggctgggtgcggtgtttcatgcctgtaatctcagtg

SEQ ID NO: 1560534 - DNA, 4001 bp, Homo sapiens
tgctgcgtcggagtaaaaattatctcctccgtggctccagaagctttgacttccccatctataagccccctccccccagggatttcctttgatgaggtcttgggcagcctgaggaggctgggagcgggggcacacgggggacaagaggaggtgagatctgggagccccggaagagagcgaggccggggcttcttggctcagtcctgtctgggtctctagccagaggagaaacttggagaaagtaaggaatccccccagttctggggccctggcaacccacgctcagggttaaacggcggcgggggcagaggatcccaaagctgacctccccagctgggtcccgggattcgtggatctgaccagaaacctgctctgccccagcccagctgggtgaccttgggcgagtggtaaccctctctgggcctcagcccctcctcctgtccgggagaggggaggggggaagggagggagcttagggaaaagaacaggaacccggagcccagcgcacagtaggctggcaggtggggggttccctcctactgcgcagcctggccagcacagggaatccccgccacaacgcaaggagaaagggagaaacctgaggggacagagagggaggagggggcaacgggaaccagcggtgctttccccccaccactgaggagggtgcaggcgtggaggatccccatgtccccaccttcacctcgcggagggagggggatgtctgcgcttccccagacctggaagcaggaaccccctcctcacagggcatgggggtggggtcaggagctgactcccgggatcggtgttggaggcgggggttgaagaagggatgtccccctcctcccgcagctcccctttgaattcccggagtcgggcaagctttgaccaatccgcccaccaaagagaaggggaccgccgccgggaccgaacgctccccgccgtgccccccactgccactcaccggccggagtcggccgccgcagccggagtccctgcgccctgcccgagcgcgaagacaagtgcacggccgggcaagggcgtgtgagccgggagggtgtgcgcgcgccgccgcagagccgaccccctccccgccgacctgggccccgccccgccgcccggggagggggcgcggaccccgcaggccgagggaggcagtccgtcgcggccacagccggggccctcccccccgcaaggcgtctcctctaaagcagggatggaatccccctccaggtctctcgccaaagcccactctcccccctccacccaggggcgtgacagcaaatcttagaagacggtcaaagagatgggaggaccctctgccgcctctggcccaaggtgctcatcttacagacggggaaactgaggcccggagagcggaagcccctggccagggcccagtgtcccagcagcacggaacagggctgctcccctcactctggggggccgctctctcagctccgggaaagaagagagtcagggagagaggaaggcagacaattaaagcctccccaccacgccactggggaggatcgggggacccagaggcttcgggcagctggcgacgttgaccgggctggaaggtcccagctaggaagggggagcctgggtggccagaaccaaaccacagaaaacttctctatttcattgttgggctggtgacaccctccccccaacctgcgcgattaggaacctcttgagcctgactggcccgggcttgggtggcagagttgtgaaggtcactctgccaccttagaacaatgtggctcgcggggtctggctcggtaggggatgggagggagaagtccaggggcaagccctttccgtgacctcggccctgccaagcccctttctgagcctcagtttcccttcagcgaacggacaagtgcccacctccggggtccctccagctctccgagtccgtagggccgccggatatgtcttgctgttctccttcagctgccccctccaacagaaagcgtggctccagctcagaccaccgtgttcctcctcgaagtcccctgctccgccccgtctctgaacccccacccaccttcagccttggtggggaccttcagccaccttcaggcaggggacagggaggggggttcctcttggaagcagggaggcttctacaaacctccattctggtttttgttttttgttttttttcctctcttttcttccattcattctaaaaatagccctcccccctccccagccccccggcggggagcctctctggaaaggtaacgagcttcccgggcggggtctggaggccgggattccgtggcgcgggcggggctcggggacgccgatactgagaggaggggaaactgggagcgcaccccccacccccattgtgtgtgagatgcgctcagagggagccgccggtgtgaccgtgaccgtgtggagggaaaaagaacaaaggggaggaggccttcgggtctgcactgtggaggcagagagccggtgggttcgcaggagccgaggacaaggggtgccacccaacaccctccccgggggggacttcccgcccctgttggggaaggctgcgacccatgctttagtcagacacagtgaaggagagtcaggctgcagaagtgacaaggacacccatgatcaggggattcccccacgccccgtggaccccacaatcgcccagtggagcccgaaaatcctccccactcccgcggctcctcctgtccccgccacagtccttctccctgacgcagccacagacttcagtcctcacccgtgtgacaggtcacgtccctgtcccgcatgaccgccctccccccacctcccttctcttcttgaaccaagaggagcaccctgactcctcacaggccgacgcggtctgccccccacaacgcccaccctttgttccaatccctccgcggtctccctggaccgcccaccacattctggacacgcccagcttctccccctaaccggttcagcctcagagcctttgcatctgcggtttcttgggccgggatcgcccttccctggctctcctcaccccctgttcccacagggctcttcagggctccatccaaggtcgcctcttccctagagtcgccccttctctgggcacgtcgccctggtttactgttctcactgccctcaagccctggtgtgaacttgcttgctctttcatcttctcctctctccgcccctgggaatgaggggccaggtgcaacttggtcctagctgatgggaggagagggccgctcccgacccagcaccaccccaggagctacctagctccaaataaagggacagcaccaccctttgcccagctagccgccctagaaatgcctccaagacacggcacagcagatccacagccgtcttctgcaggggggtcacctaggccagcgaaactaaaaacacaggagccgacgtgtccccaacccgggaccgcttagcccgtttccggaataatatgcccctggggaaaatgatccgcagggaccgagctcctggccggttgagcagaagccaggccggaggcgcaaatgttccaccgttccgatggcgaataagtaaaagaagcgaacgtggcaagttggggaagtgttgggggagacgctgggggcagcccagggccagggacccctggggggctgacctttcccccctttgattgtgttttgataacaaaacaaagtgttttgttatcttacactttttgaaaccaaagggaaggataaaagggaaattgctttgttggaggggacaaaggcccagagagggtatatgtccccatgggatgaggacgcagttgtccgtgtcgagaaatgcaacactccctcacctgcacttgcctccctaaaatcaccctcaaatgttttttttcatgagcacctactacgtgcctgtgtgcttttgtgcccagagagtgagggaggctgcccgaaagcagagccctggaggttcctggagaaggagaaggtgcgggtgtctgggacccgcggggcgatgtggccttggca

SEQ ID NO: 1560535 - DNA, 4001 bp, Homo sapiens
cactgtgttcccacctcggcttctgggtgcggtgcttcggcgtgggagcggcgggcaggccccggccatgcttcctgttggcatggacttcggcggccccaccccctcagtgcccgccgcctgccagaggaagctgcatgcctgaccctccatgtggctcctggtcacttcagagctgcccaccaccccctccagatccaagtcggaacatcagaccctcaggaatctacccaatcttcatatcagtgtccgcatctggccctaccagcccagttccacaacccttctgccagagaggtctccagcccctcctttcctgttgagcaagtctgttctcccctcaagccacttattccaacccttgtccttgatctgccccatcactggcctgaccagggctggaatgtgacgggagcctgctgagacctgccctgaccccactttcccctttcttccctactcaccactcatcttcggagtcagcccctcttccccaaaagcaatcaaaacccccttctccttaagactcaggaatccaggacccagccccctcctctcctggtacctaggagtccaggccactgtaagcctacctctccactatttccctgactaatcagcatgcagatttggggagaaattgagcttgttaacagtggagactgggttggggttggtggggggaggcaggtcgggggagaggtttgtttcccatttcccatccccacccccaaggcagttttttctgtcctttgcatctaaggcactgggtaaacattagaggttagacaaggaccaaagagctgccgcctactggaagaactttgtctttcctccactctcccttcaccaaacctggggctacctctccccttattggctcttggggggcttgagtgtctgatcagccaccctctggcctccaggggtcctggacctctggccgtctaatggcaacatcttcaaagactgaaacactgaaacaaatattcccttccttttgcagagaaggaccccagcaactgtctcctgggagcacccaggagtcccagccaaagcccctcctccctcagacccaagagtctaggcccccaacctctcctccctcagatccaggagtcctgacccccagcccctcctccctcagacccaggagtccagaccccagcccctcctccctcagacccaggagtcctgacccccagcccctcctccctcagacccaggagtccaggccctcagtccctcctccctcagacccaggagtccaagtccccagtccctcctccctcagacccaggagtcctgaccctcagcccctcctccctcagacccaggagtcctgacccccagccccccctccctcagacccaagagtcctgacccccagcccctcctccctcagacctaggagtcccagctcccagccaccatgccccactcaccgagcaccccccgaaccacagcatctctgcatgcagcaccatgagtccaatgccagttcctgccagcaccagtgcccagccggccagagacttctcctgctccagcaagcgctttcggcgtctcaaggcccccaggccaagcaccagatccccgcccatggcccccggggtcttggggctcagccagcttcctgcccagggtcccccacctcgcagcacgcacagggcagccactgtggcttgcaggtcgtcagcctgctctgctggctctgggacttttgctctgaggcacagcagagccctgtgccctctggggagtggtgacggccaggcagggcggggaggggcaggggaggccccagggtagggggaggctccccagctcccccttttgagaataaggaggggctagggtgtgtcttggggcagagcaagaaagagacgtccatccacgtggataaagacacacacagacacacgatgggctttgtcacacacaatggtctgtactttgtgacacacacctctactcaccacacccagacaccgaaggacactccacagcccaagacggagactaacacaccagggcacacaacacaacctacacagagtgactcacaactcccagcaagctctgaaacccacagccacacccagacaccacacacatggtgtgacacacaccagcacttagcaagcaggcagtatcccgtggcacacacagccacccaaacaccgtccacacacaggcacaaatattacactcaaagttgtcacaactttctctgacacaaagagccacacccaaacaccacaaataggacgatgcacaactgtggccacacaaacacaacatacaccaggtgttacacaaacacacaatatatattaaagtagtgacgccctgatgccacacaccacacaccgacacaaacactgtgcagtcccagtttcctaaacactacacacccttggaacgaaacccaatacgtgtagacacacaacatttagggacatacctatagtagcccccaatcacccagagctagagaattgcacatacattgtggcgcctgttgactcgaacacaagtgctcgcagtgatgattcaaaacacgcactgattcagcatgctctgatgtgtggtgcgattcaaatgtatggtcagaggacaagctgagtggatgcatgcagagacctacaaggtacagcgacacacggagaaacccaagaagcacatgcctgaagcaagatgattctggtatattctggccacacaggacaacatccaggatgatgccctgggggaaggggatggggttggaccttcatagaccccagtgcccaaatgcaacatacggctgggtgcagtggctcatgcctgtaatcccagcagtttgggaggttgaggtgggaggattgctggagcccaggggtttgagaccagcctgggcaacatagcaagatcctatctctaaaacaagcaaaaacaaaaaaacaaacgcaacatacaccatcacctctgagccatgagccacacccaaacatgacatacaatacctccacacaacccaacacgttatattccaacatgcgtggccacacaacaacatacgcggagtaatacaccagcacacagtaacgcaaaacacataaacacaatgttttccaacacacccaaccttccacaaacgaccacatgtcccataaaacaccagatgtcaccactcactgatactactgacactgaggtctaccgccacccacacaacaccagcatcgggggaggggggtgtatcctctgacacaacataacacacagctacacaaacacaagacacttggggtggttggcactcagggtgggtgctgggggctgagaaggaagaggcccccaacagggacatggaccctgacgtgagatacagcaaatgccagtgtggaatgtgcacggtgactctcagagcaacacacaacataggacatctccatgtgtcgcagcacgagccactcatggatctgtacaccatacgctccgacacagatcaaaccctcctgtggagacacacaggcatgcactgacctggtgacgcacatcacctcccagcatcatgcactgaactggtgacactgcccttggcctcatgcacacccctctgcaaggaacctgcggacacaaccctccccctccttgtgtcctaggtcgtgtgggaccctggacccaccagccccagggaagcgagacacgcacagacatgtctgactgcacaccaaggcagcccacacaaacacacccagagacaccaaaccatacacatggacacgcccagtggcaaaaacacaacccttgcgggggctccgcccctcggcacacacaattacccactcggcgagacttggcgggagagggctggagacacacccgggcgcgcccagacaccacacatgcgtccacttggggaaagtgcagccgccgggcactcctgagcctgcagcctgggcacccctgcccactggccgcccggctcgctgcgtctctctcctccctctccg

SEQ ID NO: 1560536 - DNA, 4001 bp, Homo sapiens
acagaagccgctccactctgttcttagccccttttccctcccaagaacaacctgatgttcatggcaagccagaaacttaccgttggaagccccaggctttacgccttgccgtgaatctccaaggtttctcccaacaagcgcatccgtgcgggaccacgaccctctttccgagaccactgcttaagtcagaagcacaaaagtgggtgcagtgagagatacaagttcattccaccagcaccagcatcaaacccagcacccagccccagtgcgccctggcccgcctgttgcaggggcctcagcgatagcggtcgggagggcccacaggtttccaaactggcccggtagtgacccgcttctccagctgcggcgggagacccgggtccctgcccgcccgccgccgagccccgcccgcccgagcagagagaagtgagcagaatgccacgctcatttacacacaaaatgattttgtgtcccattgcgctcgcagttgttcggctctctgggggtgattaaactggctgagctgcggcagcttgagacgatttcactaaatcgcttcttctgaagtcgcttctttgctaagctgttattttaaccataaaaggtaaacagaaggcgcctctcgagctcccctcggctccgcactcagggcgctggcccggggcgaaagtcctgggggcctgcacaattgtcccaggggtggccccggagaggcaggcgggccacctggtgcgcgccagcctccccaccccccccctcccgcctccgccgcggagccagccggccggtgtgaacttaggggcgacgggagagggcttgggccaaggctggaggcgccgcggggcggggtggccgcggcacccgaagcgcggggctgggctgggaggggttgccgcggaggcggggcggggacaaagttaaatcaagaggcagacacttggagaccacagatgggaagctcgcctaattaaggacgtaaaagcgcttttgttctcaaagtttattgttgccgggattaaaaaaaaattaattgaaactaatgctgttattcactcgtgcagttaaattccttcatgcacatttgagatacggagcgaaaacttgaagcttatctttctgcagtcgcgggtgggggccgccggaagacagaaaggcgctgcagaggcgggggtccgcccccgggtgtgtttgcgagtgtgtgccgggtgcgcgcgtccaggtcagggggtgcgggcgggcagcggggaaccggatctgcaggcggcgatccctcccatcgcggcccctctcccagccccaaaccctgcgcgcccgggaccaccaccagcgcgacagcccctcctgccaggtttcggactcgtggggtgggcgtcagaggacgcacatctgtcccactggagactttctctgattttgggcgccaagccgggacttgtgcatcccgaagccccagttgcgtgagcccgtttctgaccccggaaactcgccagctctgcagggcgctcggcccagaacaggggccagagtgcggggacctccacaagcgcgcgcgcgcgcgcgcgcacacacacacacacacacacacacacacacacacaccgcgcggcaggaagctccgagaccgcccgcgtggggagggtccacccgcggccaggaccagcccacgtgggcaaccccactcttgcaccaggcctttgtgctgggcacccccgcgccgccagcccccgccgcccagcagagggacaaagcggccgcccccgcccaggtccagaccctggccgggcgactttctcggtatcgcagccacttcggggcagggttgcgcggctctgagcggtggccgcccgcgctgagcttacctcggagccggcagatcgggctcgggcgcagcccccgccccacgcagctgccggtctcgggcgccgggcgcagcttcgccgcctatgctcgctgcgcgggtcgctccggtctcgtcctggagttactttctctctcgcccccaaccctccccccacccacccctcccgccccggcccccgcttcacgcggcccctcgcggcgcggcgcgccggggcctcccctccccaccctcccctcgcctcctcccctcttcgcggccgccgcctccgccgccgccgcctcctcctcgcgccgctctccggctgccctcccgccgctcccacctcctctcctccctcctctctctccggcggcctccctcgattgctggagagaaaaccagccccccactccagcccctagccagcgcctcgccgcggcccagcccggacgtaaagggcagcgatccggccccaaattacccagcgcgaacgggcgcgcgcggcgactcctggctcggggctcggctgcgccgcggggcagaggattagagtcgcaattagctccgcgcgcccgcgcctggcgacaaaaacgcgccgtttcccctcctttcgccgggcgatccccacccgcctctcccgaagcccgcgccttcccgccggggccgcggccaggaccctcccgggagcggtgcgcccaggccccagcgccctccgcggcccagccccccgccccccgccggccggccacgcggcgcccgggcctcctccgggctcggggagggggcgggggagaggctgattttaatcattgtcatttcatctgatgtaatatttccccgggcgctttcagctgggcataaattttcggctcccaaataagtaacacagggcacgtttctcacatttcttgactcctcggttacaaagaggagagcagccgccgccgcggcgcccggggctgggggcgggacttgggaagaaactgggctgccagtcggtcggggctggagcggagccgggggccaggccgcccctcccccgctccctggccgccctcccagggtctctgccccgctgcccctctcccgtgacgtctgcggacacgcggtcggccgccgcgggggagggacgcgctggggcaccgggccgaccgctcgcggctagacgcgccatttcctttacgcgcgcggcgcgatggagacggcggcagccaagactccccgcggccgaggtccgcgccccggacgcccctccccagtctccgcttcggccgccccttcctccttttctcccactcccactcctcctccccttcctcttcctcctgtttcctttgcgccccgcccgtgcctcctcctcctcctcggcgaccatttcccggctcctaggaaacggagcgcgcgactggccggcactgcgcccccgcctggctccagggacgcccgggccggagaccggctgggaccgcggggcgggtgcgcacgggccggaacggcgcctgggtcccgaccgccggctccggccgggcctggacgccccctagcggccgcactcccggggtggggggcgctcggggtcggcctggagctggggtgagggggactcggggtgccagtgggaggaaggtgaagtggggggggctttctccctctactagaggacctcgcgcgcgtggagagagcgtccagacagcgcttccgtaacttctttacgcgggaatcagccgaaactttcctcctaagggaaggttttatttatttatttattttcgagttcgaactacaggaaaaagggggaaattttctcattaaagttacatccctgcagttagttcaattatttgatatatgcagaagatgttgtaaatttatagatttaaatagcttacaaagatgccgcaggccccatcagttaatttccttaatttatggattttgagctgctcctggaacagaaagaagccctggaagtaggtcagggatctgtgcaggggttgggaggggctcccgcgaggcccaagggctgcccactctgctccctacgccccggtacctccgggcttccagctcccagcttcggctcagcagcgcgctctctgcgcgttcggcacgctggccaggcccggcccggcccgagaggtcagcccagctttgtggccga

SEQ ID NO: 1560537 - DNA, 4001 bp, Homo sapiens
tccagaggggtgaagtcatgattgaccaggaacgccagaatggctgtgggaacgaccaggaactccactctgaacgtgtcatggttcccatcgtaagtagctttgaacttgctataaatcaaccagaccgtggtgaaggagcaggctatgtagaccacctgaggagggggatgatgagaaggggcctcaactcacaggcctgtgccccagtaggctcagagcccggagtccaggcccctccctcagacgcaggagtccagacccccaacccctcctccctcagacccaggagtccaagcccccagcccctcctccctcagacccaggagtccaggcccccaacccctcctccctcagatccaggagtccaagcccccagcccctcctccctcagacccaggagtccaggcccccaacccctcctccctcagaccctggagtccaggcccccagcccctcctccctcagacccaggagtccagggccccattccctcctccctcagatccaggagtccaggcccagcccctcctccctcagacccaagagtccaggcccagcccctcctccctcagacccaggagtccaggccccagtcccttcctccctcagacccaaaagtccaggcccccggcccctcctccctcagacccaggagtccagacccccaacccctcctccctcagacccaggagtccaggcctcagtcccttcttccctcagacccaagagtccaggcccccggcccctcctccctcagacccaggagtccaggcccccagcccctcctccctcagacctaggagtctgggacccacacccggctcctctgcctcagtgggggccagagaggtggggtggagcctctaccttcatacacgtgttgtagagtgagatgtagttggtgaagaggtccagatatcgggcagtgaacaccacagcaaacaggacctggctcttccctgaaattcctgtggtccagagacagagaaagagagagagagagagacagagagagagagagagacagacagacagacagacagacagaaggagagaggaagctgggggtgggctgcatgggcaataaactaaggcagggcgcccgggaccagcctggaggcagctctggagtgcagctgtccccggaggcctccccagcccgccccgcctgagcagggccctttcccacggaccacagccagggggcagcccaggcccccgaagctactccagcccgaggctccgtcccagactaggcctcatggctacccctggcccctcagggtcctcccgcagtctggacctgaggtgaggcctagggaggaccttccctgacctcaggccccggatccggtcacctccctcccgttcccttcctggccgccacggtccacgtcaccaactcacagccacctccccgcctgccatggttccctgttcccggtccatgaaccctcgggctgcccagattggggctgggggtggctgaattgggggcctaaagccattcacatgaaactgtatgcacccccgccagtctggggaagggagctgatcccctggagacccagaacctagaagagagatccccagcaagcagtgggggtggaacctgtgcccctagtgcccccaaacccttcctgagtcctgcgacgtcccccaacccccgcccgcaatctctctccttcgccagccctggtgggcctctcaccggcgcacgagcgggacttccagattttgagcagtagcaagatgatggcgaggaggtgggagaggtctcccaggaatcggaagagattcatggctggggaaccctggcagggctgagcgggagggaggcaggctggcgggggggtgccccccgaggctgctggtctgaacgggtagctgggctggggggacggaagagggaccctaggtgcgctccgctccggggaggggactttgggagggggagcaaaggctggagctggcggcggagctggagccgggaagagggaggagagcgagagggggaggagtccgggaggagaggctccgcccccgagggcggggcctggatccccggcgccccctatcgcccacctcctgctttgccgtggcggcgctaaacgcacccccaaagctgccccataggaacttgggagggtcgcagggttcggaaagtgccaaatccagcaccggttcgcccaggcagtctgtgtctctggaagagacgcagtccagtacaccagcctcagcccttgcagggatgtagagactgccctctgagcttgaaaaatcctgcagggacccggaggctcagctgctagcttttgcagctttcaggcactctaactccaatcccccagaagacaagaaagataccccacctacttcctcccctagacccaggactcaaggccccagcccgttcgtcaaacccagaagtctgggtccccagcccctcctccctcagacccaggagtccagacccccagcctctcctccctcagacccagaagtccagacccccagcccctcctccctcagatccaggagtccaggcccagctcctcctcgctcagacccaggagtccaggcccccagcctcctccctcagacccaggagtccaggcccccagcctcctccctcagacccaggactccaggcccccagaccctcctcccccagatccaggagtccaggcccccagcccttcctccctcagacccaggagtccagacccccagcacctcctccctcagacccaggagtccagatccccagcccctcctccctcagacccaggggtccagggccccagcccctcctccctcagacccaggggtccagggccccagcccctcctccctcagacccaggggtccagggccccagcccctcctccctcagacccaggagttcagggccccagcccttttccctcctaggacgctgttccttggaacttagggtcccacccccaccatcttatggatcaaacatcctaaccttaagaatctagatctacagtttctccctttacgacccacagatttaggccctgattctcttctttttcaggaatgtgcacctcaccctgttctcccagaccttgaggatgaaggaaacaggagcctcacccaggaggctcaaggccaaaactctgacccaaactacctcaggagcccctggccctggcttcccccctgctccagagtttctgccctgcccacacacacacaccctcttccaccctcagaggccccggtgtcctgccccacgctctaccccagagccccacgggtggctttataaaagtgccgggcccagccctctagcaggaggggaatgctgggcatctgggtgtgggacccccggggaacagcctgtggtctggactcctgcatctatgaggggacagacgtggcttcccttccggatgatggggtacccacagatgatggaggccagggtccctcaataaaagaaggggtgcaggcgtgttgatttcttcagagggctggaaggacggggtgcccaagggtgacatccacgagtcttgggtccctgagggtggcttgtacgggggagagtcgggatgactgagtccttaaaagagactccgacttggaggcggtccccaaattcctgggtcccagtagagaaggggactcctgggtctgagggaggaggggctggggggtgggactcctgggaccagggtcgagacctggttttcaggcctggccttctggggcaataaaagccacagcttgggtcttagtgtggcgaacactgaagtcagggaaaggcctcctgtttccagagcctcaaggcagggcgggggcagagggcagcaacccccagccctggagtctagctctgaagctggtgtctccataccgggttctgagtccctgcctgcctgtccccagcctgacttcttcctccctttttattttcagcccctcactcccttgtcccaggaggaaggcagaggctggtagctagg

SEQ ID NO: 1560538 - DNA, 4001 bp, Homo sapiens
atttcaggtctcagcaactaaacacacacgtgcacacgcaggcacccgcagctcctgacacagtagacgcttccaccaaaacagcctgtacacagacacccgtctgtgcggcagaatctccgttacccccttttcctccccagcggtgacctcctctaggccaggacagtctgacccgtcctggtgtcgccggctcaaggagggggagcgcccggacctgccaggtgtccaatcagacacacggagacgaggctggcaagtcccagaaatcctcggctcagacagaagttgactctaccacggctttacgctccgaccttcagggtttcaaaacataaactgcaaagcggagagaggatgcccactgcttcagcaggggctgcaggagaaggctgaccccgtgtgttgacaaaccctcctggtggctcataaggaagctattattggagaattaggggagtcattagctcccataacggcagtgataaaagcccataggagtcgtctaatgagcctgctttaggactggtgctgtttttaggagcattctccagcccggggacattctgataaatggccattgaggcagaggactggggcagggcaccgatcccttgaattcagtccagtatccagagatcccaagacagtgcaggcacccggtgggacccaaaggaacttgctgaatacacgccccagccagaaacacatggaaaaagacgctcttcacatatgacaggatcactaggctccacggagctgaaccaccttctcactagtttcacaactcggggaacacttcctcacagggtgctggtaaattattaaaacagaagcatcctcccccaagcaaacagatgggatgcacccaaaagcagtccatgcctccactgcccccaggggcggaaaacatgccccttaaaaccttccaccgtgcccaggtggacagagtcccccgtcctgcctgattgtcatggccaccactgagcgcagacctgggccctggcagaccccaggtcaagcagatttcagagcgagtccgtccccagctcccagggggatgtccacgggggacacagaaaaggggtctcggcggaagcaactcctcaattcatttctctagagcaggggcttcgttcgagatggcgatcaggctggaagggggagggacggagagactcgtggaggctgccgttgcatagcaagatgatttttttctaaaatccagattgcatatgcttatggcggggtgggggtttcgggtacgtacaggggggcaagtttggaagctaccaaggcatagcaggttgaccggaggtgggggcagtgcaggagcaatgataggcatttagggggcatccctgggtgtccagctggggggcttccccttagcccccctggcgcccaaagggccagaaacgcaggcgggggttacccaggggctggggtctttttcctttttcttgctttctttcaaaaataataataataataggccgaggcttgtcccgggtgataaaagggcccggccggggccacccacgctgtcatcttttgtgcggggcgccggggccgtctgtgcccagcccccgcgcgcccccggcccgggaaggggcccccgctcccgcccctgggcgcgccccgccattgtccggccccgccgcccccgcccgaaaaccagcgggcgcccccgggccgggcggttaacgccccaaccgccccgccggcccggacaaagcgcgaggcccggcccgagcaggccgcgcccgaggcctgggcctcgagtcccgggcgcgcccgcagccccgagccgcgacgcgggggcggccatggcggcggggtccgcgctcggacacggccgggcggcctccccgtgggctcacctgaggcggcgtgcgcggcccggtccgggagcagcggcgcgctctcccccgccctcggcgtcgcacccccaggccccgctcgggccgggccccgctcggttgctggcgaccgagccctccgcaagcgctcgcgggggggcttataaggccgcgcgccagctccgccccgactgccattggctgccggatccacgcccgagcgcccattggccggagctgacagctccgcccctcccctccgccgggcccatcaacaccgcacggcccgcccaccgcgcgccgcgattgggcggggacaaacgccggcctcgcctcttcattggcagaccggcggggacacgccggcgcccacccacgtgcccgctgaccggctctgttctcattggagggggcgcacgccagccaaggctgccgcgaccaacccgacggcagctgggccttggattgacaagggagcctcagggcccgcccgacgaccgcacagagaggagccagtattggcttgaggggccagcccgaggcgcggacaggctggggcaggtgccaatcactgcccgcaagctccgggccccgccctggttatcaggcggcggctgagtacgtgagacccagcacagcatcagcaccggccgggaacgtgcaggctggaggttcgaaacccgtggccggaatgtgggcttagcgttccccaatttgcaaagtgccaagcaaggagacatagcgatccgttttgcaaaggaggagaaccgagaacatagggtaaagcagcaagagcctccaccccgccaccgtaggtctattcccatcacaatcaacaaacctttgccaaggggcaaggccttcggaatagttagggtccctctccccgagttccctaaaatgtatgggagagaatgagctttggtgctttctgacctggattcaaagctaagccgggccccatgcctcactgtggttgacctccagcaaagtaacctcgctgagtctgtttccaactgtgcaatggatatgatggtagtggccacaccccgtctacccgcctcttgagaatgttgcaaggattaagtgggatgaggcacggagaaagatttgaccctgtgacttcacaaaatgagcattcattgtgtactggaccacgcaggggtgtgaggcatgcccccatttggagtggcaggagtgtaaattgggcaatttgacattttctaataacattctaagtgcatccaccacccgataacccagccagcagttcttcctggaggtgatgtacccagaaaaaaggtctggagcttacacaattcaagaatgccggcggcagggctgtctgcaactgtttccaatgttttgcactaactatccatcagtgggggattagagaagtaacttaatagcaatcagtactctggaatacttactatgtagcaattgaaaaggaggccaggcccggtgctgtggctcgggcgactcacacctgtaatcccagcactttgggaggtcgagtcgggtggaacacctgaggtccagagttcgagaccagcctggccaacatggcaaaaacctgtctctattaacaaatacaaaattagccaggcatggtggcgcatgcctgtaatcccagctactccagaggctgaggcggaggttgcagtgagtcgagatcactgcacttcagcctgggcaacagggtgagactctgtctcaaaaaaggaaagaaaagaaaaaagagaaggccgatctgtttgcaaacatgaaatatctcccaaccgctgagctagggacagtggtccagaatcctgtactcaataaaataaatatggaaacacacacagaaaccggtatcatgaggttaagagcacacaagcttgtcaatgcacagaaaaaggtactcctaaactgaagaaacgaacttaatccttggggagagaaggaaagctgcacactggtaaaaagagaagtcaaaggagaatttaagaagctctgggtgttttaaattcttatgggaccatattcatatattccacatggagttgagatttaatttcaggtcatgcctggaatcgcagcactttgggaggctgagatgggcagatcacttgagcccacgagtttgagaacagg

SEQ ID NO: 1560539 - DNA, 4001 bp, Homo sapiens
agtagctgggactacaggcgtccgccaccacacccggctagtttttgtatttttagcagagactgggtttcgccatgttggccaggctggtctcaaactcctgacctcaagtgagccgcccgccttggcatcccgaagtgctgggattacaggcgtaagccaccatgcctgacccggggtgcagttttttaaaatctggcagaccaagcctctttgagaaggtgaggttggagctgagacaaggatgaaaattattataaagtgggaggctggggagtagttttccaggcagaggaaacagtaagtgcagtggctcagaggctgagacagtcaatctggagaattgggaaggagtgcagtgagagctaaggacttaaggaagggtttcatggaaacccctggatcctggagggccaggagatgagttatgtgttttgtgttttgtttttcgagacagagtctcgctctgttgcccaggctggagtacagtggtgcgatcttggctcactgcaacctctgcctcccgagttcaagatattctcgaccgggcgtggtggctcacgcctgtaatcccagcactttgggaggccgaggcaggcggatcacaaggtcagaagatcgagaccatcctggctaacatggtgaaaccccatctctactaaaaatacaaaaaaattagccgggtgtggcggcgggcgcctgtagtcccagctacatgggaggctgaggcgggagaaaggcgtgaacccaggaagcagagcttgcagtgagccgagatcgcaccactgcattccagcctgggtgacagaacaagactccatctcaaataaaacaaaaaaaagatattctcatacttcggcctcctgagtagctgggattacaggcaccagccaccacgatgggctaattttttgtatttttagtagagatgggatttcaccatgttggccagggtggtctcaacctcctggcctcaagtgatccccctcctcgacctcccaaaatgctgggattacaggcataggctgctgtgcccagacgtgagttacgtttcaaaaggagtgggggatctccaagtggctccccacaagtggatctgcaagttctcactcccctctttctgggactcaactcaaagtctcctcttccctgttttattgtcatcactgcgcttgtcaggaactgaaatgacctcctttgcttgtctgttgatcgactgtctctcgtccccggccccagcgcctcaaatggcagggagacctatgtaggtcggcgtcgggccaaccctctcctgtgcctctcgcctggggcctggcactgcgcaggggtcaataaacgggtggttggctaactgccctgccaccgtgcctgccagagcggcctcctccaccctccctgggtgccactcggcccccactctggtgccaaggccctgggtttgcctcttggtctttggccaatcggtcaacaatgccccttgggcaccgggcacttcccccaccctacaaagcggcaagtgggcgactgcgcatgcccctcctgagcctccaccaggcccagtgaggcgaggaagtgaccccaccgcggcctctcggctgccaaccccagaacgcagatcgagcccctcaacgcctcggagcccccgggcctccttctgcgcagcgcctcctggttctctcgctcggtttccgccgctcccgggccaccccaagagttgcgccgtccaacaaaaatatccacccaggtcgcgccctcctggccctccgagtcctggcggggaactcggaggcgccctgggccgtggcgcccgttttcctggtctccgggcacggccgcaggggcgctcgcggcccgcgatgcccgcagcccgggcacatcccgcctcactcaccccgccatggccgcgctccggctccgcctccaccgcccgagccccggcgcctccatcgctgcgcgtgggggaggcgcggagcgcgcgcaggtcaccatgactaagcagagccgggcgcccgccgtgtcacaataaaagtccccgggccctggcctcaggcggtagggaccgctgaggggccgctccccacccccgcccacgcctgctgtcgcccagctgcgcggccaccacggcgcccagcatggcggcggggcgggggcacgcgaccctgagcgcgcttagccgcgtggtccgagtcgcggggagtctgaaccccgagttccaggcctgcgcgccccggcccgcaccaggggtggggtggacacccctccccgtcgctgctgcccaagcgctcacctcagcccccaggtcgcctccgtagggggtccctcggggtggggatggccggggcgcgcaggggctccgggcacagtgatgccacccgcgcactgcgcttccgggaagccgggggaccgcgacccagtccaggagattcctgccttaccttggctgtaggggacccgcgggcgcctccgccgtcggggggcctcggctccagggctgcgtggcctgcggggtcttggttgtcggttggggagcggcctcgggacgcccgaaaaggaggcggggagagggcggaaagggcgcggcgggaaaggagcggcgattctcccgcccttcccgcaggtgcccggcgcccgtcggcgaggagtggggcatcgggcgggggcgcacagccaggccccccttctcactgtcccttccatctcccgatttcgttgctggatgtctcctcgcggggctgcgcgccaccatctgctattctccttttaacaacgcacagcgccggcctcgtggtccggcggccgcaggatctagggaaaattatctacctcgctaggttttcttttcttttcttttctttctttctttctttttttttttcctttagagacaaggtctcgctctgatctgcacgcccaggctggagtgcagtggcgcaatcgcggctcactgcagccttgagctcctggcctcaagcgatcctcccacctcagcctcctgagtagctgggaccacagacaggcgccaccacacccggctaatttttagtttttgtttgtttgtttgtttttctgtagagatggggtctcgcaatgttgcccaggctggtcttgaacacctgggtttaagagatcctgactccattggcctcccaaagttctgggattataggtgtgaggcgctgtgcccaggcctcaggttttccttgtcttttttttttttttttttttttaattgagacagagtctctcactgtcacctgggctggagtgcagtagctcgatcttggctcactgcaacctccgcctcccgggttcaaaaaattctgcctcagcctcccgagtagctgggattacaggcgcccgccatcatacccagctaattttttgtatttttagtacagatggggtttcaccatgttggccaggatggtctcaaacccctgacctcatgatccgcccgcctcggcctcccaaagtgttgggattacaggcgtgagccaccgcgcccggccttccttgtctttatttttgatttacttcctatcaagaggcgtgtggcacccgtctttggggggttcaaaccctggatctgcctcttaccagctcagtgcccgtgggcgcttacttagttctctatggttcagtttcctctctataaaaagtaataatataatagcacctacctaccagattatcattaagactaaatgcggggccgggcgcggtgactcacacctgtaatcccagcattttgggaggccgaggcaggcggatcacgaggtcgggagatcgagaccatcctggctaacatgataaaaccccgtctctactaaaaatacaaaaaattagccgggcgtggtggcgggcgcctgtagtcccaggtacacaggaggctgaggcaggagaatggcgtgaacccgggaggcggagcgtgcagtgagccaagatcaccgcactgcactccagcctgcgccacagagcgaggctctgactcaaaaaaataa

SEQ ID NO: 1560540 - DNA, 4001 bp, Homo sapiens
cagcactttgggaggccgaggcaggcggatcacaaggtcagaagatcgagaccatcctggctaacatggtgaaaccccatctctactaaaaatacaaaaaaattagccgggtgtggcggcgggcgcctgtagtcccagctacatgggaggctgaggcgggagaaaggcgtgaacccaggaagcagagcttgcagtgagccgagatcgcaccactgcattccagcctgggtgacagaacaagactccatctcaaataaaacaaaaaaaagatattctcatacttcggcctcctgagtagctgggattacaggcaccagccaccacgatgggctaattttttgtatttttagtagagatgggatttcaccatgttggccagggtggtctcaacctcctggcctcaagtgatccccctcctcgacctcccaaaatgctgggattacaggcataggctgctgtgcccagacgtgagttacgtttcaaaaggagtgggggatctccaagtggctccccacaagtggatctgcaagttctcactcccctctttctgggactcaactcaaagtctcctcttccctgttttattgtcatcactgcgcttgtcaggaactgaaatgacctcctttgcttgtctgttgatcgactgtctctcgtccccggccccagcgcctcaaatggcagggagacctatgtaggtcggcgtcgggccaaccctctcctgtgcctctcgcctggggcctggcactgcgcaggggtcaataaacgggtggttggctaactgccctgccaccgtgcctgccagagcggcctcctccaccctccctgggtgccactcggcccccactctggtgccaaggccctgggtttgcctcttggtctttggccaatcggtcaacaatgccccttgggcaccgggcacttcccccaccctacaaagcggcaagtgggcgactgcgcatgcccctcctgagcctccaccaggcccagtgaggcgaggaagtgaccccaccgcggcctctcggctgccaaccccagaacgcagatcgagcccctcaacgcctcggagcccccgggcctccttctgcgcagcgcctcctggttctctcgctcggtttccgccgctcccgggccaccccaagagttgcgccgtccaacaaaaatatccacccaggtcgcgccctcctggccctccgagtcctggcggggaactcggaggcgccctgggccgtggcgcccgttttcctggtctccgggcacggccgcaggggcgctcgcggcccgcgatgcccgcagcccgggcacatcccgcctcactcaccccgccatggccgcgctccggctccgcctccaccgcccgagccccggcgcctccatcgctgcgcgtgggggaggcgcggagcgcgcgcaggtcaccatgactaagcagagccgggcgcccgccgtgtcacaataaaagtccccgggccctggcctcaggcggtagggaccgctgaggggccgctccccacccccgcccacgcctgctgtcgcccagctgcgcggccaccacggcgcccagcatggcggcggggcgggggcacgcgaccctgagcgcgcttagccgcgtggtccgagtcgcggggagtctgaaccccgagttccaggcctgcgcgccccggcccgcaccaggggtggggtggacacccctccccgtcgctgctgcccaagcgctcacctcagcccccaggtcgcctccgtagggggtccctcggggtggggatggccggggcgcgcaggggctccgggcacagtgatgccacccgcgcactgcgcttccgggaagccgggggaccgcgacccagtccaggagattcctgccttaccttggctgtaggggacccgcgggcgcctccgccgtcggggggcctcggctccagggctgcgtggcctgcggggtcttggttgtcggttggggagcggcctcgggacgcccgaaaaggaggcggggagagggcggaaagggcgcggcgggaaaggagcggcgattctcccgcccttcccgcaggtgcccggcgcccgtcggcgaggagtggggcatcgggcgggggcgcacagccaggccccccttctcactgtcccttccatctcccgatttcgttgctggatgtctcctcgcggggctgcgcgccaccatctgctattctccttttaacaacgcacagcgccggcctcgtggtccggcggccgcaggatctagggaaaattatctacctcgctaggttttcttttcttttcttttctttctttctttctttttttttttcctttagagacaaggtctcgctctgatctgcacgcccaggctggagtgcagtggcgcaatcgcggctcactgcagccttgagctcctggcctcaagcgatcctcccacctcagcctcctgagtagctgggaccacagacaggcgccaccacacccggctaatttttagtttttgtttgtttgtttgtttttctgtagagatggggtctcgcaatgttgcccaggctggtcttgaacacctgggtttaagagatcctgactccattggcctcccaaagttctgggattataggtgtgaggcgctgtgcccaggcctcaggttttccttgtcttttttttttttttttttttttaattgagacagagtctctcactgtcacctgggctggagtgcagtagctcgatcttggctcactgcaacctccgcctcccgggttcaaaaaattctgcctcagcctcccgagtagctgggattacaggcgcccgccatcatacccagctaattttttgtatttttagtacagatggggtttcaccatgttggccaggatggtctcaaacccctgacctcatgatccgcccgcctcggcctcccaaagtgttgggattacaggcgtgagccaccgcgcccggccttccttgtctttatttttgatttacttcctatcaagaggcgtgtggcacccgtctttggggggttcaaaccctggatctgcctcttaccagctcagtgcccgtgggcgcttacttagttctctatggttcagtttcctctctataaaaagtaataatataatagcacctacctaccagattatcattaagactaaatgcggggccgggcgcggtgactcacacctgtaatcccagcattttgggaggccgaggcaggcggatcacgaggtcgggagatcgagaccatcctggctaacatgataaaaccccgtctctactaaaaatacaaaaaattagccgggcgtggtggcgggcgcctgtagtcccaggtacacaggaggctgaggcaggagaatggcgtgaacccgggaggcggagcgtgcagtgagccaagatcaccgcactgcactccagcctgcgccacagagcgaggctctgactcaaaaaaataaataagtaaataaaaaataaaaatattaaatgcgaatgctggctcccaagagacagaaaccattgctatttttcatgactggggatactgatttgtcatgcacaccgtttatcatgtaacgttaacttttaaataaatgtatgtaagtttattttaaagaattcatctaggctgggtgcggtggctcacatctgtaatcccagcactttgggagccgaggtgggtggatcacgagatcaggagttcaagaccagcctggccaacatggtgaaacccccatctctactaaaaatacaaaaattaaccgggcgtggtggcgggcgcctgtaatccccagctactcgggaggctgaggcagagaattgcttgaacccgggaggcagaggttgcagtgagcagagatcgcgccaccacactccagcctgtgcaacagagtgagactctgtctcaaaaaaaaaaaaaaaaaaagaaaaaaaaagaattcatctaaatttcatccaaattataattatttttaaaagatagagaggccaggcgcagtggctcatgcttgtaatcctagcactttggtagg

SEQ ID NO: 1560541 - DNA, 4001 bp, Homo sapiens
agctcagaaaaccagaaagtgtgtttttttttagccccgttttcctgggatgctgaagagttcaattttcccctatctcccccactctcaaaatccttttatcaatttattgaataaatttgagcaaagcgatcacttcaagggatatgaaatcctcatttgaccaaaacagaagactctctggatggctgggcactgtgacttatgcctgtaatcccagcattttgggaggccgaggcgggcagatcacttgaactcaggagttcgagacagactggctgacatggtcaaactccatctctactaaaaatacaaaaattagctgggtgtggtggtgcacacttataatcccagctactcgggaggctgaggcaggaggagcacttcaactggagaggtggaggctgtggtgtgctgagatcgtgccactgcacccctgcctgggtgatattgagactgtttccaaaaaacaaacaaacaaacaaaaaaccaagactctatgggacacaagttacatctcagacacgtgaagagcaactttaaagaaacctcaacccagcaaacttaggatcagagtctggggtttagaaacccaaaccatgttaagaatctccctttccaccagtctccatttttctacgctgccctagagccaaaactcatgggatgcccacagggggcctgtccccaccaactgacagcaccagcttcctcccttcaagctgtcccagaatcagacggttccatgggcaataagaccaaatgcacgctagaacccacccaactccaagggtgagagagacgacagagggccagaacacaggcgttcacttaacgggacctcccaccttgggaggagccagtctctagccccggaggcattgggacagcccaggagccggtcggcggcaaagtcctcccattctaccgacccccacccctccaggccatggggaggctgcaaatggagctggagaggtcagtcctagcagcatgtgacacttccttgtcattacgcctcaatacacgggggtgggagaccctcccttctttcccccaaagagacagaccacgctttcaagccaccaaagcatccaagagccagtccccatgctcgtcttccccatttcgcccaagtgctcagccctagacaggtccccatccactttcccgactgaagaggaaggactgtccctcccacccccacaatgtccctttctcctagagaggggacagaaatgggactgggttgggggcaaacactgccctttgccctgatatggaggggagagtaaaggccctccgcccgggaaggtggacccctgcctccaggcatgtcctaaggccggggggctaaggggggggtcccaaaagtgcgtctccgagctccggggcgcctgcacacccaggcgccgctcctggtgacccccagtgcgcccctactccctgcaggggggtcacccgttgggatcccactcgaggcgcagcgggagggccaggcccccgcctaccgcccacgtgaccccgcgacggccccggcccccctccgcgaccctgcgcgcgcgcgcgcacgtgacccccgccccctcccccgcctgcgcgcgcgcgcgagcgcgcccctcaggccctcggcctcctcacctggcgggcccgctgcacggcgtcggcgaaagcgtccttgcggattcccgggccgcctccgccgggtggctgagaggggcccccggccgaccccccgcccgggccgccgccgccgggaccgccgccgccccggtcccccgcgcctggcgggcccggcggagggcctcccccggcgcctccggctcccccgcccccgccggcgggcggcggcggcccgggcgggggtcctcccgtgctgtagtccgacatggcgcggcggggccgggcctggcgcggaggctgaagctgaggaggcggcggcggcggcggcggctcaacgcgggaacaaggcctcgctccacacggccgcggagcactctgggaacccagccgctgggaggacgacgaggggggagagagtcgcccctcccgccgccgacgtgacggacgactccggcgggccaatgggaggcagccgccgcaccccggacaccaatcgcgagctctgtaggaggtggccaatcggagtgcaatgaggggcagtgggcgggaggctcagagtgactgacagctctcagaggcaatagctgcgagctgcccgtgctgggcgggcaaatgaaggagatctgagaaggcaggaggcccaatgaaacgcgagtgccagattcgcggggcggcttcagaattagattgacggttctgaagagtcacgtggactgtaaggccgggcctagtggaagactcctatggaccggctgggtgggcgttaggtttgatagtcgtggacacaagccaatgaatgcacgtgagaggtggtgcttgtaaagatgggcagccaattaatccaattcctgacgagttctgggtgatgaggttggctttggactttaattgcttcccttgttaaccagaatccttttctatccctgacttctaagccaatggctgagcgacatgggtgggtgttcggtgactgacactggtctggacaaatgggaatgaaggaaatcaaagcgcccacttttggtgggagccagtggaagcgccgctgcattggggcggagtcggccaccagacagcgaggggattagcgggaactgtagtgaatggcagccgacgtgggcggtggcaatcggctgcccgaactcaggcctgatgtctgggttagctcaccggcagcctggttgggtaggcccggcacgtggcccgcttgaagccttagagatcgagcgcttccggaggtggggaggccggaaagcaggaaactcgggatcccccgggccttcttctctctcgaccccccatctagagcgtccagttctcttgcaggactcaaggaaccagccccactcacgagtccagaaccgttccaacaaccgggatcgagggatcacagcctcgatcacacccctcacttcacacccctcactcccttcgcctaaggccctgggatccaagcctcaagctcctatcctaggtcctcacttcctctcctggacacaaattcccattcaggacccagaggcccaaggtccccagctcccctactgggtccagggatctcatgcacccagttccactcctaggcccaagtatccagacacgttcagcaaaaaccatctctttattccttgttgtgtgacatgttcaccatttcgccctggagccaggacgacccacaaggggccagactggagtccacgtttcttgtctcaggctgcaccctggggagggagtcccaggagttttctgacccagcactgcccccctccacccaccaccaaccccagcttcaggaatcttctgacccagagccccacccccacccccagcctgcttttgccaccaaaaactgccccagggcctgaaccttgaggcctcgagggctctttggggccaggggtcatcaggtcctcctgtcccatttctgcctaggctgtgtcgtccagctcacagcctatatgcccagggttttcttcatggcttcgtacaccacatagctgatgccacctgctggtaagaccttcagtagcgtgggggtcatgcctcggtacagccctagccagccctgctgggccaggatccgctggaggactccgcgcatggtgggatttgagccctccacggtatctgcagggacacaggcaagatcaggactaggccagagatgaccgggcctcctaggagtctggaatgttgcggacaggtgctgaagccacgggtaggggccccaggggtcagtaggaaaacagtttgaagagtcttagaggaaattggtcagtttgaggaggagtgggggagtttctgagtagtagttatcaggattaattttaggaaattttcttgaggggtgggagtggggatagggtctctctctgttg

SEQ ID NO: 1560542 - DNA, 4001 bp, Homo sapiens
acgcaaacatgaatttctttttttttttttttgagatggagtctcactctgttgcccaggctggagcgcagtggcacgacctcggctcactgcaaccttcgcctcctgggctcaagcgattctcctgcctcagcctcccaagtagctgggactacaggagcgcgccaccatgcttggctaatgtgtttttttgtatttttttagttgaatccgggtttcaccacgttggccaggctggtctagaactcctgacctcaagtgatccgcccgcctcggcctcccaaagtgctgggattacaggcatgagccatcgcgccaggctggaatttttttttatgacaaagagacagaaaaattgtccaaatatgtcaaaggaaaacaaatactatgtattcttaaaaattgaacgttacggccggacacggtggctcacgcctataatcccagcactttggaacgccgagccaggcggatcacctgaggtcaggagttcgagaccaacctggtcaactgggcgaaaccctgtctctactaaaaatacaaaaattagccgggcgtggtgggtgcctgtaatctcagctactcgggagactaaagcaggagaatcgctcgaacccgggaggctaaggttgcagttaatctagatcccgccactgcactccagcctgggtgacagagggagactgtctcaaaaaaaaacaaataaagttacctttgaccccatttgtaaatttattctaagataacaatcagaccaggtgtaatatctcacacttgtaatcccaacactttggaaggcgaaggcgtgagggtcgcttgaggccagaagttttgagaccagcctgggcaacagtctcttattaaaaaaaaaaaaaaaagaccatatcaaacaaatccttccggcagaattgtttatcttgtgacaaattggaaactatctcaatgctcatcggtggttaaatcacatactgtaaagtccataaaaataacaatacctatctgtatttattgattatcaccaaaatgttagcagtggttgtcactgaatggtagactggcagatgactgtcattttctaccttaagactttttgtgtcgtcttgagtgttttgccaggaaaggagaattaactgcttttataatggggatgagggaccagaacaaggtattttcaaactggaggcccccaaagctgagtctctggaaaatttctaaaaagtctaaacaaaattcttatcatgccaaccaggcacgcttctttcctcgcaccgcgcggcgcagaaagacacacccctgactctgcgctcgtccctcgggctcgggtcctccacgctcagccccggccctcccggtccccgcggaccctcccctcgggcccaatgcgccagctggctccgcagggccggaaaagcgcgttcctcggcagcctggcgccgccgggaaggtgcgcgcagcccgcccggcagccccgggatggcgtgagggccgcctccccggctagccccagcggacccctgccgccagcaggccgccctccctccgcgggcttccgggagcgggtcctggcgccagcgcgacctcccgggccccggcgaaccgagggagcgtcccctttccccgcctgacgggcgccgacccgcccctgcggtgccgcggccgccgagtctccgacgcgcccccaggtcccgggttcgcgccaggaggcccctccgggcttccgtcggccggccagcgcccgcaaagcccggcgtcctccacagcgggcgggcaaggggcgggagcccacggccccgcgccctgcggccccgagcggagcggcgccccgcgggcccgtctcgccgtctgccctggctgcggcccgcggccccgctgcccaccgcccaccgcccgaccccgcccgccagcccccgcctgcgcccgccgcgcccgctcctcacctgcgacgcgccccggcccccagcgcaccgccttggaccggctgtgtacaccggaagttacgtctccggtccggccccgcccccgcctcgggcggacgcggggaggttgcggatcccgcgcctagagcggactctcctctcgcattagaggggagggggcgccccggagcctcctctcctgggaccctgggcccccaagcgggacggccggggcggaggttgaggactggcggccagagccggaggtccacccagatcccccaccatggcttggcccccgggcgggaggggtcgggctgcgtcctcctggatttattactgaaattgactgaaatcgattactggcgtatggagtgtttcctagatgccaggccccgacgggcactgcaggaacgggtagtgctctctccctcataagtttattccttagtggtaaatacacaataccattgtcacatatccgggtgataatatagtaccaatggtgacaagtggtaggaggggaaagagtaagagggagggagagagtaccctgacctagtaaaggagagtgatccggaattcccccagggaaagagcaggagctgaggtcctaaggggtagaagggagaaaaaaaaaaaaaaaaacgagaagggaggagaacacattacgcagaagcagcagcaagggtcttccagttctgtgggttttgtttgtttgagacggagtcttgctctatcgcccaggctggagtgcagtgacgtgatcttggctcgctgcaacctccacctcccgggttcaagtgattctcctgcctcagcctcccggatagctgcgattacaagcgtgcgccaccacgcccggctaatttttgtgttattagtagagacgggatttccccatgttggccacgctggtctcaaactcctgacctcaggtgttccgcccacctcggcctcccaaagtgcttgagccacggagcatggcccagttttgtgttccaataataaatcagagtggtgagaagttaggtcttacttgacagtgttgcaaaactaatgagttttaagcaagaggtgatttgtccatacttgagagtgtaaaggggttactctagatgcagtgtggagaaggaaggactacggaggggaggcaagagtggatataaatgtgtacacccatgttcatattagtcagaaggtggaagcaacccaatgtccatccacgggtgaatgggttcacaaaatgtggtataaacataacaatagaatattactcagcgttgaaggaggccgggcgccgtggcttacgcctgtaatcccagcactttgggaggccaaggcgcgtggatcacctgaggtcaggagttcgagaccagcctgaccaacatgatgaaaccccgtctctactaaaaatacaaaatcagccaggcgtggtggcgcatgcctataatcccagctacgatgcaaatagatgagctttgaagatattatgccaaaagaaaccagtcacaaagacaaatatcctatgattccacttacataaggtacctagagtagtcaaaaacatagagacgggccaggcatggtggctcatgcctgtaatcccagcactatgggaggctgaggcaggaggatcacctgaggtcaggagctccagaccagcctggccaacatggtgaaatcccatctgtactaaaaatacaaaaagttagccaggcgtggtggtggaggcctataatcccagctacttggaaggtcgaagcaggagaacaacttgaacctgggaggcagaggttgcagtgagctgagattacgccactgtattccagccttggcgatgaagcgagaatctatctcaaaaaaaaaaaaaaaagaggccgggtgcagtggttcacgcctgtaatcccaacactttgggaggccgaggtgggcggatcatgaggtcaggagatcgagaccatcctggctaacatggtgaaatcccatctgtactaaaaatacaaaaagttagccaggcgtggtggtggaggcctataatcccagctacttggaaggccgaagcaggagaacaacttgaacctg

SEQ ID NO: 1560543 - DNA, 4001 bp, Homo sapiens
gttctggatccagggctcgggcaggcttcacctggtgtcttcacacctctatccctaatgcctcaccagcgccctctattgagaaatcttagcattgtgctcactttttttttttttttgagacggagtctcgttctgtctcccaggctggagtgcactggcaccatctcggctcactgcaagctctgcctcccgggttcacgccattctcctgcctcagcctcctgagtagctgggactacaggcgcctgccaccacgcccagttaatattttgtatttttagtagagacggggtttcactatgctagccaggatggtctccatctcctgacctcgtgattcgcccacctcggcctcccaaagtgctgggattacaggcgtgagccaccgcgcctggccgagcattgtgctcactttaaacaagacataacgaaagaaattcctttgtttatcacatattgaaagggtccattcggagacaagaggcaatgcatggataattgacacacatatatttattatttttatttttttgagatggacggaatcttgctctgttgcccaggctgaagtgcagtggcacgatcttggctcactgcaacctccgcctcccaggttcaaagtgattctcctgtctcagcctcccgagtagctgggattacaggcacttgccaccacacttggctaacttttgtatttttagtagagttggggtttcgccatgttggccagactggtctcgaacccctgacctcaagtgatccgcccgcctcggcctcccaaagtgctgggattacaggcatgagtcaccatgcccggcctaattattattattattctctttgagacggaatttcacttttgttgcccaggctggagtgcaatggcgccatcttggctcactgcaacctctgcctccaggttcaagcgattctcctgcctcagcctcccaaatagctaggattacaggcatgcgccaccacacctaatttcgtatttttagtggaaatggggtttctccatgttggtcaggctggtcttgaactcctgatcacaggtgatctgcccgccttggcttcccaaagtgctggcgttacaggcgtgagccaccttgcccggcctaatttttgaatttttagtagagatggggtttgaccatatgggtcaggctggtctcgaactcctgaggcaggaaaatcacttgaacccgggagacagcagctctgggagctgaatgggcccattccaggggctgaggtttcatcaaccaaacggtgcagctctttagaggaactcaaccagaaggggtgagaaacgggattgtgggggatgagaagaaggaacaggggccccctggacacagaagccaagcgactggctcggtaattttgagtaaacccctctgagcctcaatttccctatctgtcacaagacataagatcaccatcctcaggttgccaaagagacacaacaggctcagctgggcgcagtggctcctgcccgtaatccaagcactttgggggaccaaggtgggaggatcgctgcagcccaagagtttgaaaacagcctgggcaacatgtctctatttatttaaaaaaataataataaagagacataacaggctctccatgatgtcccccatcacaggtgaacaaatccaccatcaaggctttagaggtccctagagcccctgctgtgaggggccaaggagctgacccatcatttgcagtcacccagaaggcccagaagggctctaaaggcactgggggccagaggagaacgacagggtcccccacgaaccctcgcaaacaagtcctccaccagccccactcacccgcccctgaagccaccagccccactcacccgcccccaaagccaccagccccactcacctgcccctgaagctaaacctagcagtctgaacggccagtcttggagccctggtgccgcagcagctttgtgactcaaagccaagttctggccaatccctggcagctcttagggggtggggattctagaaggcacagccagaggttggggaacaggatgcagggcagggccaaaggtcatggtggttgctacctacaccggctcatcctgagtacaaagggttctcagcacagagggaaccccaaatctccccctccatgtacctagaggcagtttcagtctttcatcccacgggcattttctgagcacctactatatgctggaatttgccccatgtctggggatacaaacaactcaaagaatttgaggctgtaaaatggctagatgggaagggaccaaaaagggggtgcaacgggccagtcagggttctcactgatgtcttgggtgtggctctgagactgcgggctccttggggtggggccggacttgatctcttgggatccccactgggcccggcaaaagtgggtactgaccctgagccgcagcgctataaggggaagtcaggctgctgtcctggatcacctcctggggctgggctggggcccagcatgagtcaccgctggctgggccaaggctgacacgcaccttggactcagtgcagctggctccagccaaagccagcctggcccagaagcctctgcctggcttccttggggagccgctgggggttgccgggacaagaaccagcaggggtgcctgacctccctctgcagcgatcaccccctccaaaaccttccctatactgtgggtgtgactttggacaaaatcagggacatggcagatggcagttgggtggggtttatatcctttgtctgttttttgagattgagtctcgctctgttgcccaggctggagtgcagtgctacgatctcagctcactgcaacctccacctccccgggttcaagcgattctcgtgcctcagcctcctgagtagctgggactacaggtgcatgctatgacgcccagctgatttatgtagttttagtagagataggatttcaccatgttggccaggctggtctcaaactcctgaccacaagtgatccgcctgctgcggcctcccaaagtgctgggattacaggcatgagccactgcacccagctcatcctttggatgtttcatcagaacaggtcccttctgtgctgtcaacgagctaaacacaaactgggagttctcagggcaattggagaccgtaggagcccagtaaggtgctggcctagcctgagggttactagggacaggcttccgaggactgtgcagctgaggctgggaggtggcgctcagctgcatgactgggggaagagtagctggcacagaactacagctgcagccgtgcaaagaccctgaggccaggaaggcaggatattgggaatttgggtggagaggctcctgaaaggagacactggccagcccagggactggtgcagtcaggactttttccaaaaaggtttcaagtaaggagtcagatctgtgatttagaaaaagcccttcacatcacagctcatgcctgcttgactcccccatcagactggagggctggcctcaactaggtgtcaataaatgctggggacgctgggcgcgatggttcatgcctataatcccagcactttgggaggccaaggcgggcagatcgattgagcccaggagtttgagaccagcctgaccaatatggcaaaacctcgtctctactaataatacaaaaattagtcaggcatgatggcaaatgcctgtaatcccagctactttggtggctgaggcaggagagtcacttgaacccaggaggtggaggctacagtgagccaagattgcaccactgcactccagcctgaatgagagaccctgactcaaaaaaaaaaaaaaaaaaaaaaaaaaaaaagaggccgagtacagtggctcaatacctgtagtcccagcattttgggagaccgaggttggaggatcacttgaacacaggagttcaaaaccagcctgggcaacatagatcccatctctacaaaaaaattatttaaaaattagtagggcggctgggcgtggtggctcacgcctgta

SEQ ID NO: 1560544 - DNA, 4001 bp, Homo sapiens
aatccccctttaccccaaatacagtcggggcctggatgattggaccctgatggacgcccccaccagaagctctgggattcaggaggtgggacagtgagaagcccagacagaaagcctctgacctgtgaccatgatcaccacagggttgctgggtgccgaccacccagtgggggagtgtgggtgtgaactgcaacatctgtaggtccctgcatgtgctggggtcacagggcccatgagaaagctgttccggaatattctgttgtagagctcagggacaggcatcccgtcttctttggacagactgaattcattaaacccaagacgagagcgacactgaagagtcacatgttgtccttcagacaccacagtgccgggccaggcagagaggaagggcttgtcctgaccacctgggggagaaggaggcaccaccttagagaggaggatgtggagccgcccctccctccctgtgctcagaagattctcccatttccacgtttctaaggctcctaccacacctgggtgcccagggctacaggaaggacccatcccgcatagacatggcgtctccctacagcaagtgtcagctgagaactttgagcaggtgctgaagaagcgactcttactagattttaacactgcaaaattacttacataaaagaacacaaggtagacacaggatggagggcatgatcagctaatgcatgaaccataataaacaactgagcccctattagaagatctggaatgtcagggtcatgactgtggttcccccacctcttaggtagaatgacagcagccacattgcagcccctaccgtcatggaaacgctggagggtgtgagttatgctcttgtcctcagaggcctgttgttccttgcactgcttctctcccttcctctgccggtgacaccacttcctccctgcacaccactcctttgagcacttcagtctccccctgggtccccacagactcagccaagggaaagaaaggccggggagggctaggacagaactgtggcgaagcttcccctggcttccttttcctagttcatgagagattcccacatggcttcccatggtcagcccatcagtcaaccccctgtgtcgcctgcctcccgtttcaggagcatcatcttatgtggggagatgacaacctaaggtttgggggaaggactcacccacatgtggccagggcccctccagcaagaagaaccctggaaagaaagatcatgatggatgatccatctgtacatcacctccaggcccatatctccactccaggcccatatctccacctctaggcccatatctccactccaggcctatatctccacctccgtcctatatctctactccaggcccatatctccactccaggcctatatctccacctccgtcctatatctctactccaggcccatatctacactccaggcccatatctccacctccaggcctgtatctccacctccaggcccgtgtctccattccaggcccatatctgcactccaagccaacatctccactccaggcccgtatctctactccaggcccatatctacagttccaggcccatatctccacctccaggcccatatctccactctaggcccatatctccacctccaggcccgtatctcaattccaggtccatatctgcactccaagccaatatctccactccaggcccatatctacagttccaggcccatatctctactccaggcccatatctctacttcaggcccatatctacagttccaggcccatatctccactccaggcccatatctccaccccaggcccatatctccactccaggcctatatctccactccaggcccatatctccactccaggcccagatctccactccaggcccagatctccaccccagcgctccctccctcgattcccttccaggactcaccaacacacgccatgctgacgaccatgagcgacatggtgctgccggtgcagacaggcggctgcgccccagctcagttcagcagcacacaggatgttgtgaggggctcatgcagtttacatgctgaccacatcatgggaggatgacgtatgcaggctatttctaccttgcatgaggcccagtggctgtttggtcaagagcggaacatggcttcctggaaattgttccaactagaattgacaccttgcatccttcactataaccaactcaaaacacgtctcagatccaatctctcatacaggagatgactgaatgcttggcttacattaaagacttttgatgtatttttgttgtttttatctgagattcaaactcttcttcatgtgctattttccccaggctgttctttgacttcagagttcaagcaatcctcctgccccagcatttctagcagctggcagtatgtcacaatctgccacacccaagtcacaacttttagaactttttttttttttgagacgcaatctcacttcgtcacccagtttggaatgcagtggtgagacctcggctcattgcagcctccacctcccaggttcacgcaattctcgtgcctcagcctcctaagtagctggatttacaggcacccaccatcacgcccacctaatttttgtacttttagtagagaggaggtttctccatgttggccaggctggtcttgaactcctaacctcaagtgatctgtctacttcagcctcccaaagtgctgagattacaggtgtgagccaccatgcctggccgggacattctatatgtgtgcgtatgtgtgcgtttatatacatatggttatacacacacacacacacacacaccctaagcactcacatatatagttgtttcaaattttaaaaaatataaattttgtatttttctttctttttctcacatttgtgtttctatgacaccatatacatattgaattttatagttctattttattcttttggattgcagtttaatagtccatacataactttatcaacatgtaattatccactctttttatcatggacatttgtgttgtttccggattttctcttttataactcgggccttgataatcgtgtttctgtgtgatcccttgcatacatatgctgaattaattagacatatttacctaggaatgaaattattggttttgggtgcaagttggtgttgagcttaaccaggaagtgccaaaatatttccatcatgaccaaatgtggcctggaaagttttttggggtcaattttcctgtttcttctaaggaacaaaattgatgtcactgatttttctgtcctgtttgtcatttatgaatatacgtacatatgcacgtatatatttgcttgccattttatgtttttcctcgacgttactttggaattaatttgctgatgtgtagtatttctgcaagcgaaagttacctatttactcagctcttccttcttttctaacacagacatttgaggcttattttcctttaacactgttctatctgtatccccagtcatttgccgagatgtgttttcatttttaattgatacaaaatattttccacctttctttgaaatgtttttcttccactcattgtttattgctatgtgtgtttattaattttaaaatatttgataatttccccagcatttccttgttgtacatttataatttaattcaactgtttcatctatcatattacctatgattcagcatttaaaaatttattttggtgaatgttccaggggtgctagacaagtttgtggattaggaagatttgaggtggatgttttctaaatgtcagttaagaaaaaaatcattcaaatgtttttctttatttaaaaaaaatagagacggggtctcactatggtgcccaggctggtctcaaactcctggcctcaagtgatcctcccattttggcctcccaaagtgctaggattattgaaattattaaatgtttcatatcaacacccaaccttatgcacccgccgcctacacaaatgtttttcaagtctttcatatgcttaataattttctgtgtactt

SEQ ID NO: 1560545 - DNA, 4001 bp, Homo sapiens
gtccctgcgtgtgctggggtcacagggcccatgaaaaggctgttccagaatattatgttgtagagctcagggacaggcaccccatcttccttttacagactgaagttgttaaacccaagataagaatgacactgaagaatcacatgtcctggaggcaccacagggcttggccaggcagacagcaagggcttgtcctgaccaccgtggggagaaggaggcaccgccttagagaggaggatgtggagccgcccctccctccctgtgctctgaagattctcctcgctttccaagtttctatggctgctatcacaccttggtgcccagggctaaaggaaggacccatcccgcaaacacaaggtgtctccctacaacaaaagtgtcagctgagaactttgagcaagtgctgagtaagagactcctactagattttaatactgtaagattactcacataaaacaacacagggtagacatggggtggagggcatgtcctttgagaatggaatatcagccgatgcctgaacgaaaataaacaactgagtccccatcagaggattggaatgtcagggccatggctgtggttttcccacctcttctggtagaatgacagcagccacactgcagcccctaccgtcatggaaacgctgaagtgtgtgagtaacacctttgtcctcagaggatctgctgttcctaccacttccccaccacacaccccagctttgagcaccgtagtctaaccctggtccccacagaacttgactctgccaagggaatgaaaggccagggaggcaaggtcagaaatgtgggcccagcaccccagggtcccttcttcctagtttatgagagactccctgacaggacttccctcccatttcaggaaaatcctcttatgtggggagatgacacccgaaggttgggagaaggactcaccctcatgtggccaggccccctgcagcaagaagaaccctggaaagaaagatcatgatggatgacccatctgcaggcaaaccagggcacccttgctgcccccactgggctgtgagtcttggtagccaggcccttcctgggctgaaggtaaactcaccctcagtgcctacctgcacccaagaacagggctgtcggctgtgcagagacccagcctccaggtccatatccccacctcaagcccatatctccactccaggcccatatctccactccaggccgatatttccaccctaagcccatatcgccaatccaggcccatatctccaatccaggctcagatctccaccctgggcccatatctccaatccaggcccttatctccactccaggtccatatctcctctccagtcccatatctccactccaggcccatatatcctctccagtcccatatctccacacccaggcccgtatctccatcctaggcacatatctcctctccaggcccagatatcgacctctaggcccatatctccactcctggcccatatctccactccaggcccagatatcgacctctaggcccatatctccactcctggcccatatctccactccaggcccatgtctccacttcaggcccatatctctactgcaggcccataactccacctccaggcccatgactccactccaggcccatatctccacctccaggcccatatctcccctccaggttcctatctcccctccaggttcctatctccactccaggcccagatctccactacagtcccatcactccacctccaggcctatatctcgacctctgggcccagatctccacttctaggcccatcactccatctctaggcccatatatccactccaggcccagatctccactccaggcccataactccacctccaggcctatatctccacctctgggcccagatctccatcccctcactccctccctctattgctttccaggactcaccaacacacgccatgctgacgaccaagagcgacatggtgctgccggagcagacaggcagccgcgaccgagctcagctcagcagcgcacaggatgttatttggcgccctgcccatgcagtttacatgttgaccacatcatgggagggtgacgtacgcaggctctttctaccttgcatgaggcccagtgggtgctcgctcaagagcggaacacggcttcctggaaattgttctcgctagaatttgacacctagtgtccttcactatgaccaactcaaaacacgtctgagatccaacctcccgaacacgagatgcctaaaatctgtgctaacatgaaagacttttcatgtatttctattgtttttatctgagattcaaactcttcttcctgtgtaatatgcaaaatatctaataggtattattaatgttttcagagtcattgtcactaataaaccattagaatttttcatgcttgtatttctagtattacagcagaaccagttaaaatgatttaaattcccagggaaggattatgcaattatttacaatcttagaattgtactttatcagtaaaaaccccacctgtaaattctggagttttgtagtttaatctaaaatttgtctcatgacccaagattccagagtcccaactctggagtttgttttccgtctgtctctctccctccctcattttaaattttacagaaatatccagtaacataatgctatagaaaatcaagtttccccagcacgttgggaagccgaggtgggcggatcaactgagataaggagtttgagagcagcctggccaatatagtgaaaccgtgtctctgctaaaaatccaaaaattagccgtgcctggtggcaggcacctgtaacgccagctactcaagaggctgaggcatgagaatcgcttgaacctgggaggcagaagttgcagtgagctgagattgtgtcactgcagtccagcctgggcgacagagcaagactccgcctcaagaaaaaaaagcaaatagcctataataacaaattagagagctctggctactaaatttaaagggttctataaggctacataaagtgcagcatcatcaagagtgtggacacagagagccccttagcagaaacagtgtctaaagtacatccgtgtacacacagtccctttagagttgacaaaggctgccgtgtggtttaaggtggcatagaatgtcttctcaataaataatattaaaccaatgggttatacctaggaaaaaataaatctaactcacactataaaaacacttcttagtttttatctagttgtacattttttatgatttatatttaaatttgagaaataaaagtcatatacggtcatccttcactattcgtgggtgattggtttcgagatctccactcagataccaaaatctgtagatgctcaagcctcttatatgaaatggcacagagtttgcaaataacctatgcacatcctcctgtatacatgaaatcatctctagattacttataattcctgatgcagcctacacacagcttcatttgtgtccattcaacacagttctgctttttgtaactctgtggatactttctctgaatatttttgatttatactcggttcaataaagaactgtaaaccccacagatatggaggagtgactgtatatttatagtgtgaaagatgatgtgttgatatgtgtccctgtgtagatgagactaacaaggcctatgattctacaaatgtttcatcttggaatgactctgccagatttccaggtctgcagagagtaagaatatcacttgttcatgtgattcacgatccttggaacctcctatgtgctacatctttggatggaaataggagtcccagagacaaatgaggctccaccctgcttccagaaactcagagtccgggggtgagaacccagtggagaacagatggggttatgtggacatggtaatgataatggaagtcttaggcaagaaaagagtcccattaccgaaaccatgagggcagacatgtttatttgaaggagggaaaactacattgaaattattttaaaaaatatataagtt

SEQ ID NO: 1560546 - DNA, 4001 bp, Homo sapiens
tgaccacccactgggggagtgtgtgtgtgaaccccgacatctgtatgtccctgtgtgtgcgggggtcacagggcccatgaaaaggctgttccagaatattctgttgtagagctcagggacaggcaccccaccttccttttacagactgaagttgttaaacccaagataagagtgacaccgaagaatgacatgtcctagaggcaccacaaggctgggccaggcagacagcaagggcttgtcctgaccaccttggggagaaggaggcgccgccttagagaggaggatgtggaactgcccttccctccctgtgctcagaagattctcctcgctttccacgtttctatggctactatcacaccttggtgcccagggctgaaggaaggacccatcccgcaaagacatggtgtctccctacaacaaaagcctcagctgagaactttgagcaagtgctgagtaaagagactcctactagattttaatactgtaagattactcacataaaacaacacagggtagacatgaggtggagggcatgtcctttgtgaatggatatcagcggatgcctgaacgaaaataaacaactgagcccccatcagaggatttggaatgtcagggccatggctgtggtttcccacctcttctggtagaatgacagcagccacactgcagcccctaccatcatggaaacgctgaagtgtgtgagtaacacctttgtcctcagaggatctgctgttcctaccacttcccaaccacacaccccagctttgagcaccccagtctaaccctggtccccacagaacttgactctgccaaggggttgagaggccagggaggcgaggtcagaaatgtgggctgagcaccccagggtcctctcttcctagtttatgagagactccccgacaggacttccctcctgtttcaggaaaatcctcttatgtggggagatgacacccgaaggtttggagaaggactcaccctcatgtggccaggccccctgcagcaagaagaaccctggaaagaaagatcatgatggaccatccatctgcaggcaaaccaggcctcccttgctgcccccactgggctgtgagtcttggcagccaggcccttcctgggctgaagttaaactcaccctcagtgcctacctgcacccaagaacagggctgtcggctgtgcagagacccagtttccaggcccatatccccaccccaagcccatatctccactccaggctgatatttccaccctaggcccatatcgccaatccaggctcagatctccaccctaggcccctatctccaatccagtcccatatctccgccccaggcccagatctccaccctaagcccatatctccactccaggcccatatcacctctccagtcccatatctccacacccaggcccatatctccttcctaggcccatatctccactccaggcccagatatccacctctaggcccataactccactcctggcccatatctccactccaggcccatatctctactgcaggcccgtatctccacctccagacccatatctccactccaggcccatatctccacctccaggcccatatctccacctccaggcccatatctccactccaggcccatatctccactccaggcccatatctccactccaggcccctatctctactgcaggcccatatctccatctccaggcccatatctccatctccaggcccatgtctccactacaagcccatatctctactgcaggcccatatctcaacctccaggcccatatctccactccaggcccagatctccactccaggcccagatctccacttctaggcccatcactccatctctaggcccataactccacttccaggcctatatctccaactctgggccccgatctccatccccgcactccctccctcgatgcccttccaggactcaccaacacacaccatgctgacgaccatgagcgacatggtgctgtctgtgcagacaggcggccgcgccccagctcagctcagcagcgcacaggatgttatttggcgccctgcccatgcagtttacatgttgaccacatcatgggagggtgacgtacgcaggctctttctaccttgcatgaggcccagtgggtgctcgctcaagagcggaacatggcttcctggaaattgttctcactagaattgacaccttgcgtccttcactacgaccagactcaaaagacgtctcagatccaacctctcatacacgagatgattgaattctgtgcttacattaaagatttttgatgtatttttgtttttatctgagattcaaactcttcttcatatgtaatgtgcaaaatgtctaacaggtattattaacattatcagagtaattgtgacaagaagccattctaattttcctgcttgagtttctactactaaaccagaggcatcagaatagcttgaacctgggagacggaggttgcagtgagctgagctcaagccactgaactccagcttgggtgacagaggaagagtctgtctcaagaaaaaaaaaaaaagcaaactaaataacctataataacaaatcagaggactcaggttaccaaattttaaggggttctataagtttatataaaatgcagcatcctcatgagaggggatacagagaaccactggacagaaaactgtgtctaaaatacatctgtggatacacagtccctttatagttgacaaaggctgccatgtagtttaaggtggaatagaatattttctcaacaaataacacaggaccatagggttacacgtaggaaaaaataaatctaaacttatcctcacactataaaaacacttcttattttttatcttgttgttgtaaattttttatgctttatttttaagattgacaaataaaaattatataccatggtccttcactatacctgggtgattggttccaggatccccattcagataccaaaatctgcagatgctcaagccccttgcatgaaatggcatagtgaagctgggcaccgtggctcacgcctgtaatcccagcactttgggaggctgagctgggtagatcacaaggtcaggagttcaagaccagctggtccaacattctgaaaccccatctctactaaaaatatacacacaaaaaaatttatctgtgcatggtggcacgtgcctgtaatcctaggggaggctactggggaggctgagggaagagaatcgcttgaacctggaaggcggaggttgcagtgagttgagatcacgccactgcactccagcctgggtgagagagtgagactgtctcaaaaaaaaaaaaaaaatagcatagcaattgcatagaacccatgcacatcctcctgtatacatgaaatcatctcttgattacttataattcctgacacagcctacacgccactcaatttgtgtcgattcaacatagttttttgctttttgaaacttcggggattttttttctcaaaatatttttgatttattgctgattcaataaacatgtgtaaaccccagagatatggaggagtgactgtctatttatagtagtatgaaagatgatgtgttgatacgtgtccctgtggagatgagactaacaaggcctatgactctacaaatgtttcatcgtggaatgactctgccagctttccagatctgcagagagtaagaatatcacttgttcatctgattcaccatccttggaacctcctatgtgctgcatctttggatggaaattggagtctcagagacaattcaggctccaccatgcttccagaagctcagagtccagggctgagaacccagcggagaacagatggggttatgtggacgtggtaatgataacaccggaagccttaggcaagaaaagagtcccattgaagaaaccatgagggcagacatgtttacttgaagaatagaaaactacattgaaattataaaaaaaatttataagttttactgctgacagaaggctgaaagatactctgaggaaaggtggaatagc

SEQ ID NO: 1560547 - DNA, 4001 bp, Homo sapiens
cactgggggagtgtgtgtgtgaaccccgacatctgtatgtccctgtgtgtgcgggggtcacagggcccatgaaaaggctgttccagaatattctgttgtagagctcagggacaggcaccccaccttccttttacagactgaagttgttaaacccaagataagagtgacaccgaagaatgacatgtcctagaggcaccacaaggctgggccaggcagacagcaagggcttgtcctgaccaccttggggagaaggaggcgccgccttagagaggaggatgtggaactgcccttccctccctgtgctcagaagattctcctcgctttccacgtttctatggctactatcacaccttggtgcccagggctgaaggaaggacccatcccgcaaagacatggtgtctccctacaacaaaagcctcagctgagaactttgagcaagtgctgagtaaagagactcctactagattttaatactgtaagattactcacataaaacaacacagggtagacatgaggtggagggcatgtcctttgtgaatggatatcagcggatgcctgaacgaaaataaacaactgagcccccatcagaggatttggaatgtcagggccatggctgtggtttcccacctcttctggtagaatgacagcagccacactgcagcccctaccatcatggaaacgctgaagtgtgtgagtaacacctttgtcctcagaggatctgctgttcctaccacttcccaaccacacaccccagctttgagcaccccagtctaaccctggtccccacagaacttgactctgccaaggggttgagaggccagggaggcgaggtcagaaatgtgggctgagcaccccagggtcctctcttcctagtttatgagagactccccgacaggacttccctcctgtttcaggaaaatcctcttatgtggggagatgacacccgaaggtttggagaaggactcaccctcatgtggccaggccccctgcagcaagaagaaccctggaaagaaagatcatgatggaccatccatctgcaggcaaaccaggcctcccttgctgcccccactgggctgtgagtcttggcagccaggcccttcctgggctgaagttaaactcaccctcagtgcctacctgcacccaagaacagggctgtcggctgtgcagagacccagtttccaggcccatatccccaccccaagcccatatctccactccaggctgatatttccaccctaggcccatatcgccaatccaggctcagatctccaccctaggcccctatctccaatccagtcccatatctccgccccaggcccagatctccaccctaagcccatatctccactccaggcccatatcacctctccagtcccatatctccacacccaggcccatatctccttcctaggcccatatctccactccaggcccagatatccacctctaggcccataactccactcctggcccatatctccactccaggcccatatctctactgcaggcccgtatctccacctccagacccatatctccactccaggcccatatctccacctccaggcccatatctccacctccaggcccatatctccactccaggcccatatctccactccaggcccatatctccactccaggcccctatctctactgcaggcccatatctccatctccaggcccatatctccatctccaggcccatgtctccactacaagcccatatctctactgcaggcccatatctcaacctccaggcccatatctccactccaggcccagatctccactccaggcccagatctccacttctaggcccatcactccatctctaggcccataactccacttccaggcctatatctccaactctgggccccgatctccatccccgcactccctccctcgatgcccttccaggactcaccaacacacaccatgctgacgaccatgagcgacatggtgctgtctgtgcagacaggcggccgcgccccagctcagctcagcagcgcacaggatgttatttggcgccctgcccatgcagtttacatgttgaccacatcatgggagggtgacgtacgcaggctctttctaccttgcatgaggcccagtgggtgctcgctcaagagcggaacatggcttcctggaaattgttctcactagaattgacaccttgcgtccttcactacgaccagactcaaaagacgtctcagatccaacctctcatacacgagatgattgaattctgtgcttacattaaagatttttgatgtatttttgtttttatctgagattcaaactcttcttcatatgtaatgtgcaaaatgtctaacaggtattattaacattatcagagtaattgtgacaagaagccattctaattttcctgcttgagtttctactactaaaccagaggcatcagaatagcttgaacctgggagacggaggttgcagtgagctgagctcaagccactgaactccagcttgggtgacagaggaagagtctgtctcaagaaaaaaaaaaaaagcaaactaaataacctataataacaaatcagaggactcaggttaccaaattttaaggggttctataagtttatataaaatgcagcatcctcatgagaggggatacagagaaccactggacagaaaactgtgtctaaaatacatctgtggatacacagtccctttatagttgacaaaggctgccatgtagtttaaggtggaatagaatattttctcaacaaataacacaggaccatagggttacacgtaggaaaaaataaatctaaacttatcctcacactataaaaacacttcttattttttatcttgttgttgtaaattttttatgctttatttttaagattgacaaataaaaattatataccatggtccttcactatacctgggtgattggttccaggatccccattcagataccaaaatctgcagatgctcaagccccttgcatgaaatggcatagtgaagctgggcaccgtggctcacgcctgtaatcccagcactttgggaggctgagctgggtagatcacaaggtcaggagttcaagaccagctggtccaacattctgaaaccccatctctactaaaaatatacacacaaaaaaatttatctgtgcatggtggcacgtgcctgtaatcctaggggaggctactggggaggctgagggaagagaatcgcttgaacctggaaggcggaggttgcagtgagttgagatcacgccactgcactccagcctgggtgagagagtgagactgtctcaaaaaaaaaaaaaaaatagcatagcaattgcatagaacccatgcacatcctcctgtatacatgaaatcatctcttgattacttataattcctgacacagcctacacgccactcaatttgtgtcgattcaacatagttttttgctttttgaaacttcggggattttttttctcaaaatatttttgatttattgctgattcaataaacatgtgtaaaccccagagatatggaggagtgactgtctatttatagtagtatgaaagatgatgtgttgatacgtgtccctgtggagatgagactaacaaggcctatgactctacaaatgtttcatcgtggaatgactctgccagctttccagatctgcagagagtaagaatatcacttgttcatctgattcaccatccttggaacctcctatgtgctgcatctttggatggaaattggagtctcagagacaattcaggctccaccatgcttccagaagctcagagtccagggctgagaacccagcggagaacagatggggttatgtggacgtggtaatgataacaccggaagccttaggcaagaaaagagtcccattgaagaaaccatgagggcagacatgtttacttgaagaatagaaaactacattgaaattataaaaaaaatttataagttttactgctgacagaaggctgaaagatactctgaggaaaggtggaatagcacgtatct

SEQ ID NO: 1560548 - DNA, 4001 bp, Homo sapiens
cttttacagactgaagttgttaaacccaagataagaatgacaccgaagaatcacatgtcctggaggcaccacagagctgggccaggcagacagcaagggcttgtcctgaccaccttggggagaaggaggcaccgccttagagaggaggatgtggagccacccctccctccctgtgctctgaagattctcctcgctttccaagtttctatggctgctatcacaccttggtgcccagggctaaaggaaggacccatcccgcaaacacaaggtgtctccctacaacaaaagtgtcagctgagaactttgagcaagtgctgagtaagagactcctactagattttaatactgtaagattactcacataaaacaacacagggtagacatggggtggagggcatgtctttgagaatggaatatcagcagatgcctgaatgaaaataagcaactgagcccccatcagaggatttggaatgtcagggccatggctgtggtttcccacctcttctggtggagtgacagcagccacactgcagcccctaccgtcatggaaacgctgaagtgtgagtaacacctttgtcctcagaggatctgctgttcctaccacttccccaccacgcaccccagctttgagcaccccagtctaaccctggtccccacagaacttgactctgccaagggaatgaaaggccagggaggcgaggtcggaactgtgggccgagcaccccagggtcccctcttcctagtttatgagaggctccctgacaggacttccctcctgtttcaggaaaatcctcttatgtggggagatgacaccctaaggtttggagaaggactcaccctcatgtggccaggccccctgcagcaagaagaaccctggaaagaaagatcatgatggacgatccatctgcaggcaaaccagccctcccttgctgccctcactgggctgtgagtcttggtaggcaggcccttcctggactgaagttaaactcaccctcagtgcctacctgcacccaagaacagggctgtcggctgtgcagagacccagcctccaagcccagatccccaccacaagcccatatccccaccacaagcccatatctccactccaggccaatatttccaccctaggcctgtatctccactccaggcccatatctccactccaggccgatatttccatcataggcccatatcgccaatccaggcccatatcgccaatccaggccaagatctccactgtaagcccatatctccaatccaggcccatatctccactccaggctcagatctccaacctaggcccatatctccaatccaggcccatatctccacaccaggcccatatctctactgaaggccagtaactccacctccaggcccatatctccactccaggcccagatctccaccccaagcccatatctccaccccaggcccatatctctactgaaggcccgtaactccacctccaggcccatatctccaccccaggcccagatctccaccccaagcccatatctccactctaggcccatatctcctctccagtcccatatctccacaaccaggcccatatctccatcctaggcccatatttccactctaggcccagatatccacctctaggcccatatctccactcctggcccaaatctccactccaggcccatatctctactataggcctataactccacctccaggcccatatctccactccaggctcctatctcccctccaggttcctatcggcactccaggcccagatctccacttctaggcccatcactccatctctaggcccatatatccactccaggcccagatctccactccaggcccacaactccacctccaggcctatatctccacctctgggcccagatctccaaccccacactcccttcctctattcccttccaggactcaccaacacacgccatgctgacgaccgtgagcgacatggtgctgccggtgcagacaggcggccgtgccccagctcagctcagcagcgcacaggatgttatttggcgccctgcccatgcagtttacatgttgaccacatcatgggagggtgacgtacgcaggctcattctaccttgcatgaggcccagtgggtgctcgctcaagagcggaacacggcttcctggaaattgttctcactagaatttacacctagcgtccttcactatgaccaactcaaaacacgtctcagatccaacctcctgaacacgagatgcctaaaatctgtgctaacgtgaaagacttttcatgtatttttattgtttttatctgagattcaaactcttcttcatgtgtaatatgcaaaatatttaataggtattattaaggttttcagagtcattgtgactaataaaccattagaatttttcatgcttgtatttctagtattacagcagaaccagttaaaatgatttaaattcccagggaaggattatgcaattatttacaatgttagaattgtactttatcagcaaaaaccacacctgtaaattctggagttttgtagtttaatctaaaatttgtctcatgacccaagattccagagtcccaactctggagtttgatctctctctgtctctctgcctccctcattttaaattttacagaaatatccagtaacataatgctatagaaaatcaagtttccccagcacgtcgggaagccgaggtgggcggatcaactgagatgaggggattgagagcagcctggccaacatagtgaaaccgtgtctctgctaaaaatccaaaaattagccatgcctggtggcaggcacctgtaacgccagctactcaagaggctgaggcacgagaatcgcttgaacctgggaggcggaggttgcagtgagctgagattgtgtcactgcagtccagcctgggcgacagagcaagactccgcctcaagaaaaaaaaaagcaaatagcctataataacaaattagagggctctggctactaaatttaaagggttctataaggctacataaagtgtagcatcatcaagtgtgtggacacagacagccccttagcagaaactgtctaaaatacatccatgtacacacagtccctttagagttgacaaaggctgccgtgtggtttaaggtggcatagaatgtcttctcaataaataatattaaaccaatgggttacacctagtaaaaaataaatctaactcacactataaaaacacttcttagtttttatctagttgtacattttttgatttatatttaaatttgagaaataaaagtcatatacggtcatccttcactattcgtgggtgattggtttcgagatctccactcagataccaaaatctgtagatgctcaagcctcttatatgaaatggcacagcgcttgcaaataacatatgcacatcctcctgtatacatgaaatcatctcttgattacttataattcctgatacagcctacacacagcttcatttgtgtccattcaacatagttatgagttttggaactctgtggatattttctctgaatatttttgatttatactttgttcaataaagacctgtaaaccccacagatacggaggagtgaccgtatatttatagtatgaaagatgatgtgttgatatgtgtccccatggagatgagactaacaaggcctatgactctacaaatgtttcatcgtggaatgactctgccagctttccaggtctgcagagagtaacaatgtcacttgttcatgtgattcccgatccttggaacctcctatgtgctgcatctttggatggaaattggagtcccagagacaaatgaggctccacactgcttccagaagctcagagtccagaggtgagaacccggtggagaacagatgggattatatggacatggtactgataacaccggaagccttaggcaagaaaagagtcccattacctaaaccatgagggcagacatgtttatttgaaggagggaaaactacattgaaattattttaaaaaatatataagt

SEQ ID NO: 1560549 - DNA, 4001 bp, Homo sapiens
ggagacagaaatcagaccctgttcttcctgggctacaatcaaggcatctgcagggctgcattccctctggagactcgggagaatcagttccattgatttctccagccccttcgtggctcgtggtcttcctccaccttcaaagcccacagtggctggtggagtatcccacgatgctgctctaatccccattctcctcttccttctccactcatatggacccttgtgattacactgagcccagtgggagagtccaggccatctccccatctcaaggtcaactcatcaacaacctgagctccatcttccccttcagtcccctgccctataacatagtcacaggctccaaggattacaatgtggccatcgatggggacagttattctttccaacacagcacccattcccctgtattcaatccccctttaccccaaatatagttggggcctggatgatcggactctggtggacacccccaccagaagctctgggactcaggaggtgggacaaggagaagcccagacaggagccctctgacctgtgaccatgatcaccagggggttgctgggtgccgaccactcagtgggggagtgcgggtgaaaacctcgacatctgtaggtccctgcgtgtgctggggtcacagggctaatgaggaaactgttccagaatattctgttgtagagctcagggacagggaccccatctttcttgtacagcgtgaagatgttaaacccacgacgatagtgacaccgaagagtcacgtgtcctccttgaggcaccacagcgctgggccaggcagagcagaagggcttgtcctgaccaccttggggagaaggagatgccgcctcagagaggagtatgttgagctgcccctccctccctgtgctcagaagattctccccatttcttctttctaaggctcctaccacacctgggtgcctggggctacaggaaggacccatcccgcatagacgtggcgtctccctacaacaaaagtgtcagttgagaactgagcaggtgctgagtaagggactcttactagattttaatactgcaagattagttacaccaaagaacacaaagtagacatggggtggagggtatgacctttgtgaatggaatattagctaatgcctgaaccacaataaacaactgagctccatcagaggatttggaatggcagggtcgtggctgtggttcccccacctcttctggcagaatgacagcagccacactgcagcccctaccgtcatggaaacgctggagggtgtgagttaccctcttgtcctcagaggacctgctgttcctaacactgctacccttccctcctctgtcggtgacaccacatccccccacacaccccagctttgagcacctcagtatcccgcctgggccacacagagctcaactcagccatggggaagaaaggctggggagggctaagacaaaacagagggctgagcataccaggatctcctcttactagttcatgagagactcccaggatctcctcttactagttcatgagagactcccaggatctcctcttactagttcatgagagactccccccaggccttcccatggtcagcccatcagcccaccctctgtgctgcctccctcccatttctggaaaattcacttgtattggggtgaagatggcaacccatcatttggggaaggactcacccacgtgtgcccacacactctggtccaagaagaaccctgcaaagaaagatcatgatgaactattcatctcggcagcaacctaccctttcctcctgagccactgggcgccacgctggactgaaaattaactcatcctcaccactcacttgcttcagaacatggctctctgctggggagacacccaatctgcaggcccatagtgtaaccctggtgctccttcccttccaggactcaccaagacatgccaggatgatgaccgtgggtgacatggacatggtgcagcttctgctgccaggacgcagtgactcggctcgactgaccggtgcagaggatgtggtgaggggcccggatcgtgcagttgacacattgaccacaacatgtgaaggggacataggtaggcttcttctacgtcatatgaggttcaagtggtgaatcagtcaagggaggaatgagggtttctgaaaactgcagactagacttgtcacttcacatcatgcgcaacggccaggctcaaaacacatctcagactcacttacccctgcacgggacgattgaattctgcactcacatgaggaaatttgatgtatttttttttgtttctacctgagattcaaactctccttgatatgtaatatgcaaaatacctaataggttttattaacactatagagcaatcgtattaaataaatcatcataattttccatggttgtatttttcctgttaagccagaaacagataaaatgatttaaatcccagtagaaaagactatatagttatttcgcatcatagaattccaccttattagcaaaaacacaatatgtcaattgaaggtctggtcgtgttatctagaatttgtcttatgacacaagagtccaaattcacagttccctgtctccctttttgtctctctgtaacgtgtgctttttttctccctgtgttgtttgtgtgtctttctttctctctctcatttgaggaaaaaatatcagactgataacatcctccaacttgatactggaatattgcaataactgaaggttgaaatctacacatttaatgtgctgtcattcttacaaatgtctcttatttacacctatctttctggagtttgtaagaactttttcactatgcattttaaatttgtaaaactcataatttttaaaaagggatgggtctcactgtttgcccagggtggcctttactcattctataaggctggcatcaccctgatactaaagacagaaaagaacattaaacaaaagaaaactacatgccaatattcctgatgaacatagaggcaaaaatccacaaaaaatactaagaactgaatcccgcagcatatcaaaaagtgaatccaccatgatcaagtcaactttattcttagggtgcaaggttggttgaacatacacaatcaatacatgtgattcatcacctaaacaaaactaaaaacaaaaaccacatgatcttctcaacacacatgtagaacatactttttactaagcatttcttcatgttaaaagccctcaacaagctaagcattgaagaaacataactcaatataataagagccgcctgtgacaaacccacaaccaacatcatactgaatgagtaaaagctggaagaagttcccttcataagtgaaacaagacaagaatgcccactctcaccatcctattcaacatagtacttgaagtcctagacagagccatcaggaaagagaaagaattataaggcatccaagtaagaagagagtagcagagagaggtagtcaaattacctctgtttgaagatgagataatttctatacctagaaaccccatagtctctgcccaaaggctcctacatctgagaaacaaacttcagcacagtttaagggcagaaagtcaatgtacaggctgggtgtggtgtctcagcctgaaatctagcactttgggagggcgaagcgggtggatcacctgaggtctggagttcgagaccagcctggccaacatggcgaaaccctgtctctactagaaacacaaatatagccggacggggtggtacgcaactgtagtcccagctgcttgggaggctgagtcaggagaaccgcttgaacctgggaggcagaggttgcagtgagcggagatcacgccattgcacctcagcttgggcaacaacagtgaaactgcatctcaaaaaaaaaaccaaaacaaatttaattaatgaggaaaagggtatttgtggtgtccatcatgatgttttcatataggtacacattgtggaatggatgaaacaacctctttatcatatttattttttcacatacttgtatgttttg

SEQ ID NO: 1560550 - DNA, 4001 bp, Homo sapiens
ctcagtgccaggcaccccatcttccttttacagactgaagttgttaaacccaagataagaatgacaccgaagaatcacatgtcctggaggcaccacagagctgggccaggcagacagcaagggcttgtcctgaccaccttggggagaaggaggcaccgccttagagaggaggatgtggagccacccctccctccctgtgctctgaagattctcctcgctttccaagtttctatggctgctatcacaccttggtgcccagggctaaaggaaggacccatcccgcaaacacaaggtgtctccctacaacaaaagtgtcagctgagaactttgagcaagtgctgagtaagagactcctactagattttaatactgtaagattactcacataaaacaacacagggtagacatggggtggagggcatgtctttgagaatggaatatcagcagatgcctgaatgaaaataagcaactgagcccccatcagaggatttggaatgtcagggccatggctgtggtttcccacctcttctggtggagtgacagcagccacactgcagcccctaccgtcatggaaacgctgaagtgtgagtaacacctttgtcctcagaggatctgctgttcctaccacttccccaccacgcaccccagctttgagcaccccagtctaaccctggtccccacagaacttgactctgccaagggaatgaaaggccagggaggcgaggtcggaactgtgggccgagcaccccagggtcccctcttcctagtttatgagaggctccctgacaggacttccctcctgtttcaggaaaatcctcttatgtggggagatgacaccctaaggtttggagaaggactcaccctcatgtggccaggccccctgcagcaagaagaaccctggaaagaaagatcatgatggacgatccatctgcaggcaaaccagccctcccttgctgccctcactgggctgtgagtcttggtaggcaggcccttcctggactgaagttaaactcaccctcagtgcctacctgcacccaagaacagggctgtcggctgtgcagagacccagcctccaagcccagatccccaccacaagcccatatccccaccacaagcccatatctccactccaggccaatatttccaccctaggcctgtatctccactccaggcccatatctccactccaggccgatatttccatcataggcccatatcgccaatccaggcccatatcgccaatccaggccaagatctccactgtaagcccatatctccaatccaggcccatatctccactccaggctcagatctccaacctaggcccatatctccaatccaggcccatatctccacaccaggcccatatctctactgaaggccagtaactccacctccaggcccatatctccactccaggcccagatctccaccccaagcccatatctccaccccaggcccatatctctactgaaggcccgtaactccacctccaggcccatatctccaccccaggcccagatctccaccccaagcccatatctccactctaggcccatatctcctctccagtcccatatctccacaaccaggcccatatctccatcctaggcccatatttccactctaggcccagatatccacctctaggcccatatctccactcctggcccaaatctccactccaggcccatatctctactataggcctataactccacctccaggcccatatctccactccaggctcctatctcccctccaggttcctatcggcactccaggcccagatctccacttctaggcccatcactccatctctaggcccatatatccactccaggcccagatctccactccaggcccacaactccacctccaggcctatatctccacctctgggcccagatctccaaccccacactcccttcctctattcccttccaggactcaccaacacacgccatgctgacgaccgtgagcgacatggtgctgccggtgcagacaggcggccgtgccccagctcagctcagcagcgcacaggatgttatttggcgccctgcccatgcagtttacatgttgaccacatcatgggagggtgacgtacgcaggctcattctaccttgcatgaggcccagtgggtgctcgctcaagagcggaacacggcttcctggaaattgttctcactagaatttacacctagcgtccttcactatgaccaactcaaaacacgtctcagatccaacctcctgaacacgagatgcctaaaatctgtgctaacgtgaaagacttttcatgtatttttattgtttttatctgagattcaaactcttcttcatgtgtaatatgcaaaatatttaataggtattattaaggttttcagagtcattgtgactaataaaccattagaatttttcatgcttgtatttctagtattacagcagaaccagttaaaatgatttaaattcccagggaaggattatgcaattatttacaatgttagaattgtactttatcagcaaaaaccacacctgtaaattctggagttttgtagtttaatctaaaatttgtctcatgacccaagattccagagtcccaactctggagtttgatctctctctgtctctctgcctccctcattttaaattttacagaaatatccagtaacataatgctatagaaaatcaagtttccccagcacgtcgggaagccgaggtgggcggatcaactgagatgaggggattgagagcagcctggccaacatagtgaaaccgtgtctctgctaaaaatccaaaaattagccatgcctggtggcaggcacctgtaacgccagctactcaagaggctgaggcacgagaatcgcttgaacctgggaggcggaggttgcagtgagctgagattgtgtcactgcagtccagcctgggcgacagagcaagactccgcctcaagaaaaaaaaaagcaaatagcctataataacaaattagagggctctggctactaaatttaaagggttctataaggctacataaagtgtagcatcatcaagtgtgtggacacagacagccccttagcagaaactgtctaaaatacatccatgtacacacagtccctttagagttgacaaaggctgccgtgtggtttaaggtggcatagaatgtcttctcaataaataatattaaaccaatgggttacacctagtaaaaaataaatctaactcacactataaaaacacttcttagtttttatctagttgtacattttttgatttatatttaaatttgagaaataaaagtcatatacggtcatccttcactattcgtgggtgattggtttcgagatctccactcagataccaaaatctgtagatgctcaagcctcttatatgaaatggcacagcgcttgcaaataacatatgcacatcctcctgtatacatgaaatcatctcttgattacttataattcctgatacagcctacacacagcttcatttgtgtccattcaacatagttatgagttttggaactctgtggatattttctctgaatatttttgatttatactttgttcaataaagacctgtaaaccccacagatacggaggagtgaccgtatatttatagtatgaaagatgatgtgttgatatgtgtccccatggagatgagactaacaaggcctatgactctacaaatgtttcatcgtggaatgactctgccagctttccaggtctgcagagagtaacaatgtcacttgttcatgtgattcccgatccttggaacctcctatgtgctgcatctttggatggaaattggagtcccagagacaaatgaggctccacactgcttccagaagctcagagtccagaggtgagaacccggtggagaacagatgggattatatggacatggtactgataacaccggaagccttaggcaagaaaagagtcccattacctaaaccatgagggcagacatgtttatttgaaggagggaaaactacattga

SEQ ID NO: 1560551 - DNA, 4001 bp, Homo sapiens
cccactgggggagtgtgtgtgtgaaccccgacatctgtatgtccctgtgtgtgcgggggtcacagggcccatgaaaaggctgttccagaatattctgttgtagagctcagggacaggcaccccaccttccttttacagactgaagttgttaaacccaagataagagtgacaccgaagaatgacatgtcctagaggcaccacaaggctgggccaggcagacagcaagggcttgtcctgaccaccttggggagaaggaggcgccgccttagagaggaggatgtggaactgcccttccctccctgtgctcagaagattctcctcgctttccacgtttctatggctactatcacaccttggtgcccagggctgaaggaaggacccatcccgcaaagacatggtgtctccctacaacaaaagcctcagctgagaactttgagcaagtgctgagtaaagagactcctactagattttaatactgtaagattactcacataaaacaacacagggtagacatgaggtggagggcatgtcctttgtgaatggatatcagcggatgcctgaacgaaaataaacaactgagcccccatcagaggatttggaatgtcagggccatggctgtggtttcccacctcttctggtagaatgacagcagccacactgcagcccctaccatcatggaaacgctgaagtgtgtgagtaacacctttgtcctcagaggatctgctgttcctaccacttcccaaccacacaccccagctttgagcaccccagtctaaccctggtccccacagaacttgactctgccaaggggttgagaggccagggaggcgaggtcagaaatgtgggctgagcaccccagggtcctctcttcctagtttatgagagactccccgacaggacttccctcctgtttcaggaaaatcctcttatgtggggagatgacacccgaaggtttggagaaggactcaccctcatgtggccaggccccctgcagcaagaagaaccctggaaagaaagatcatgatggaccatccatctgcaggcaaaccaggcctcccttgctgcccccactgggctgtgagtcttggcagccaggcccttcctgggctgaagttaaactcaccctcagtgcctacctgcacccaagaacagggctgtcggctgtgcagagacccagtttccaggcccatatccccaccccaagcccatatctccactccaggctgatatttccaccctaggcccatatcgccaatccaggctcagatctccaccctaggcccctatctccaatccagtcccatatctccgccccaggcccagatctccaccctaagcccatatctccactccaggcccatatcacctctccagtcccatatctccacacccaggcccatatctccttcctaggcccatatctccactccaggcccagatatccacctctaggcccataactccactcctggcccatatctccactccaggcccatatctctactgcaggcccgtatctccacctccagacccatatctccactccaggcccatatctccacctccaggcccatatctccacctccaggcccatatctccactccaggcccatatctccactccaggcccatatctccactccaggcccctatctctactgcaggcccatatctccatctccaggcccatatctccatctccaggcccatgtctccactacaagcccatatctctactgcaggcccatatctcaacctccaggcccatatctccactccaggcccagatctccactccaggcccagatctccacttctaggcccatcactccatctctaggcccataactccacttccaggcctatatctccaactctgggccccgatctccatccccgcactccctccctcgatgcccttccaggactcaccaacacacaccatgctgacgaccatgagcgacatggtgctgtctgtgcagacaggcggccgcgccccagctcagctcagcagcgcacaggatgttatttggcgccctgcccatgcagtttacatgttgaccacatcatgggagggtgacgtacgcaggctctttctaccttgcatgaggcccagtgggtgctcgctcaagagcggaacatggcttcctggaaattgttctcactagaattgacaccttgcgtccttcactacgaccagactcaaaagacgtctcagatccaacctctcatacacgagatgattgaattctgtgcttacattaaagatttttgatgtatttttgtttttatctgagattcaaactcttcttcatatgtaatgtgcaaaatgtctaacaggtattattaacattatcagagtaattgtgacaagaagccattctaattttcctgcttgagtttctactactaaaccagaggcatcagaatagcttgaacctgggagacggaggttgcagtgagctgagctcaagccactgaactccagcttgggtgacagaggaagagtctgtctcaagaaaaaaaaaaaaagcaaactaaataacctataataacaaatcagaggactcaggttaccaaattttaaggggttctataagtttatataaaatgcagcatcctcatgagaggggatacagagaaccactggacagaaaactgtgtctaaaatacatctgtggatacacagtccctttatagttgacaaaggctgccatgtagtttaaggtggaatagaatattttctcaacaaataacacaggaccatagggttacacgtaggaaaaaataaatctaaacttatcctcacactataaaaacacttcttattttttatcttgttgttgtaaattttttatgctttatttttaagattgacaaataaaaattatataccatggtccttcactatacctgggtgattggttccaggatccccattcagataccaaaatctgcagatgctcaagccccttgcatgaaatggcatagtgaagctgggcaccgtggctcacgcctgtaatcccagcactttgggaggctgagctgggtagatcacaaggtcaggagttcaagaccagctggtccaacattctgaaaccccatctctactaaaaatatacacacaaaaaaatttatctgtgcatggtggcacgtgcctgtaatcctaggggaggctactggggaggctgagggaagagaatcgcttgaacctggaaggcggaggttgcagtgagttgagatcacgccactgcactccagcctgggtgagagagtgagactgtctcaaaaaaaaaaaaaaaatagcatagcaattgcatagaacccatgcacatcctcctgtatacatgaaatcatctcttgattacttataattcctgacacagcctacacgccactcaatttgtgtcgattcaacatagttttttgctttttgaaacttcggggattttttttctcaaaatatttttgatttattgctgattcaataaacatgtgtaaaccccagagatatggaggagtgactgtctatttatagtagtatgaaagatgatgtgttgatacgtgtccctgtggagatgagactaacaaggcctatgactctacaaatgtttcatcgtggaatgactctgccagctttccagatctgcagagagtaagaatatcacttgttcatctgattcaccatccttggaacctcctatgtgctgcatctttggatggaaattggagtctcagagacaattcaggctccaccatgcttccagaagctcagagtccagggctgagaacccagcggagaacagatggggttatgtggacgtggtaatgataacaccggaagccttaggcaagaaaagagtcccattgaagaaaccatgagggcagacatgtttacttgaagaatagaaaactacattgaaattataaaaaaaatttataagttttactgctgacagaaggctgaaagatactctgaggaaaggtggaatagcacgtat

SEQ ID NO: 1560552 - DNA, 4001 bp, Homo sapiens
caccacagcaactatttctctgtactgaatccccctttaccccaaatacagtcggggcctggatgattggaccctgatggacgcccccaccagaagctctgggattcaggaggtgggacagtgagaagcccagacagaaagcctctgacctgtgaccatgatcaccacagggttgctgggtgccgaccacccagtgggggagtgtgggtgtgaactgcaacatctgtaggtccctgcatgtgctggggtcacagggcccatgagaaagctgttccggaatattctgttgtagagctcagggacaggcatcccgtcttctttggacagactgaattcattaaacccaagacgagagcgacactgaagagtcacatgttgtccttcagacaccacagtgccgggccaggcagagaggaagggcttgtcctgaccacctgggggagaaggaggcaccaccttagagaggaggatgtggagccgcccctccctccctgtgctcagaagattctcccatttccacgtttctaaggctcctaccacacctgggtgcccagggctacaggaaggacccatcccgcatagacatggcgtctccctacagcaagtgtcagctgagaactttgagcaggtgctgaagaagcgactcttactagattttaacactgcaaaattacttacataaaagaacacaaggtagacacaggatggagggcatgatcagctaatgcatgaaccataataaacaactgagcccctattagaagatctggaatgtcagggtcatgactgtggttcccccacctcttaggtagaatgacagcagccacattgcagcccctaccgtcatggaaacgctggagggtgtgagttatgctcttgtcctcagaggcctgttgttccttgcactgcttctctcccttcctctgccggtgacaccacttcctccctgcacaccactcctttgagcacttcagtctccccctgggtccccacagactcagccaagggaaagaaaggccggggagggctaggacagaactgtggcgaagcttcccctggcttccttttcctagttcatgagagattcccacatggcttcccatggtcagcccatcagtcaaccccctgtgtcgcctgcctcccgtttcaggagcatcatcttatgtggggagatgacaacctaaggtttgggggaaggactcacccacatgtggccagggcccctccagcaagaagaaccctggaaagaaagatcatgatggatgatccatctgtacatcacctccaggcccatatctccactccaggcccatatctccacctctaggcccatatctccactccaggcctatatctccacctccgtcctatatctctactccaggcccatatctccactccaggcctatatctccacctccgtcctatatctctactccaggcccatatctacactccaggcccatatctccacctccaggcctgtatctccacctccaggcccgtgtctccattccaggcccatatctgcactccaagccaacatctccactccaggcccgtatctctactccaggcccatatctacagttccaggcccatatctccacctccaggcccatatctccactctaggcccatatctccacctccaggcccgtatctcaattccaggtccatatctgcactccaagccaatatctccactccaggcccatatctacagttccaggcccatatctctactccaggcccatatctctacttcaggcccatatctacagttccaggcccatatctccactccaggcccatatctccaccccaggcccatatctccactccaggcctatatctccactccaggcccatatctccactccaggcccagatctccactccaggcccagatctccaccccagcgctccctccctcgattcccttccaggactcaccaacacacgccatgctgacgaccatgagcgacatggtgctgccggtgcagacaggcggctgcgccccagctcagttcagcagcacacaggatgttgtgaggggctcatgcagtttacatgctgaccacatcatgggaggatgacgtatgcaggctatttctaccttgcatgaggcccagtggctgtttggtcaagagcggaacatggcttcctggaaattgttccaactagaattgacaccttgcatccttcactataaccaactcaaaacacgtctcagatccaatctctcatacaggagatgactgaatgcttggcttacattaaagacttttgatgtatttttgttgtttttatctgagattcaaactcttcttcatgtgctattttccccaggctgttctttgacttcagagttcaagcaatcctcctgccccagcatttctagcagctggcagtatgtcacaatctgccacacccaagtcacaacttttagaactttttttttttttgagacgcaatctcacttcgtcacccagtttggaatgcagtggtgagacctcggctcattgcagcctccacctcccaggttcacgcaattctcgtgcctcagcctcctaagtagctggatttacaggcacccaccatcacgcccacctaatttttgtacttttagtagagaggaggtttctccatgttggccaggctggtcttgaactcctaacctcaagtgatctgtctacttcagcctcccaaagtgctgagattacaggtgtgagccaccatgcctggccgggacattctatatgtgtgcgtatgtgtgcgtttatatacatatggttatacacacacacacacacacacaccctaagcactcacatatatagttgtttcaaattttaaaaaatataaattttgtatttttctttctttttctcacatttgtgtttctatgacaccatatacatattgaattttatagttctattttattcttttggattgcagtttaatagtccatacataactttatcaacatgtaattatccactctttttatcatggacatttgtgttgtttccggattttctcttttataactcgggccttgataatcgtgtttctgtgtgatcccttgcatacatatgctgaattaattagacatatttacctaggaatgaaattattggttttgggtgcaagttggtgttgagcttaaccaggaagtgccaaaatatttccatcatgaccaaatgtggcctggaaagttttttggggtcaattttcctgtttcttctaaggaacaaaattgatgtcactgatttttctgtcctgtttgtcatttatgaatatacgtacatatgcacgtatatatttgcttgccattttatgtttttcctcgacgttactttggaattaatttgctgatgtgtagtatttctgcaagcgaaagttacctatttactcagctcttccttcttttctaacacagacatttgaggcttattttcctttaacactgttctatctgtatccccagtcatttgccgagatgtgttttcatttttaattgatacaaaatattttccacctttctttgaaatgtttttcttccactcattgtttattgctatgtgtgtttattaattttaaaatatttgataatttccccagcatttccttgttgtacatttataatttaattcaactgtttcatctatcatattacctatgattcagcatttaaaaatttattttggtgaatgttccaggggtgctagacaagtttgtggattaggaagatttgaggtggatgttttctaaatgtcagttaagaaaaaaatcattcaaatgtttttctttatttaaaaaaaatagagacggggtctcactatggtgcccaggctggtctcaaactcctggcctcaagtgatcctcccattttggcctcccaaagtgctaggattattgaaattattaaatgtttcatatcaacacccaaccttatgcacccgccgcctacacaaatgtttttcaagtctttc

SEQ ID NO: 1560553 - DNA, 4001 bp, Homo sapiens
tccaggcccatatctccaccccaggcccagatctccacctccaggcccataactacactccaggatcatatctccactccaagcccatatctccacatcaggcccatatctccactccagtcccatatctccacacccaggcccatatctccattccaggcccatatccccatcctaggcccatatctccaccgtaggcccagatctccactccaggcccatatctccactccagggccatatctccactccaggcccatatctacacaccaggcccatatctccaccccatgcccatgtctccactccagatccatatctccaccccacgcccatatctccactccaggcccatatctccaacccacgcccatatctccacctccaggcacatatctccaccccacgcccgtatctccactccagtcccatatctccactcccggcccatgtctccaccccatgcctatatctccactccagtcccatatctccactccaggcccatatctccactccagacccatatctccactcggcccatgtctacactccaggcccatatcaccacctccaggcccatatctccactccaggcccatatctccacctccaggcccgtatctccactccagacccatatgtccactccaggcccatatctccactccaggcccatatctccactccagggccatatctccactccaggctcatatctccactccaggcccatatctccactccagggccatatctccactccaggctcatatctccactccaggcccatatctccactccagggccatatctccactccaggcccagatctccacctccaggcccgtatctccactctagtcccatatctccactccaggcccatatctccacctccaggcccataacttcactccaggcccataactccactccaggcccatatctccacctccaggcccatatctccactccagggccatatctccactccaggctcatatctccactccaggcccatatctccactccagggccatatctccactccaggcccagatctccacctccaggcccctatctccactctagtcccatatctccactccaggcccatatctccacctccaggcccataacttcactccaggcccataactccactccaggcccatatctccacctccaggcccatatctccactgcagacccatatctccactccaggcccatatctccactccaggcccagatctccactccaggcccagatctccactccaggcccagatctccacctccaggcccctatctccactctagtcccatatctccactccaggcccatatctccacctccaggcccataacttcactccaggcccataactccactgcagacccatatctccactccaggcccatatctccactccaggaccatatctccactccaggctcatatctccactccaggcccgtatctccacctccaggcccataacttcactccaggcccataactccactccaggcccatatctccactccagtcccatatctccactccagtcccatatctccaccctaggctcctacctcccctccaggttcctatctctcctccaggttcctctctccactccaggttcctatccccactccaggcccatatctccactccaggcccagatcttcactccaggcccagatctccactccaggcgcagatctccacttctaggctcatcactccatctctaggcccagatctccactccaggcccataactccacctccaggcccatatctccacctctgggcccagatctccatccccacgctccctccctctattcccttccaggactcaccaacacacgccatgatgatgaccatgagcgacatggtgctgccggtgcagacaggcggccgcgccccagctcagctcagcagcgcacaggatgttatttggcgccctgcccatgcagtttacatgttgaccacatcatgggagggtgacgtacgcaggctttttctaccttgcatgaggcccagtgggtgctcgctcaagagcagaacatggcttcctggaaattgctctcactagaattgacacctcgcgtccttcactatgaccaactcaaaacatgtcttagatccaacctcccaaacatgagatgcctaaaatctgtgctaacatgaaagacttttcatgaatttttattgtttttatctgagattcgaactcttcttcctgtgtaatatgcaaaatatctaataggtattattagtgttttcagagtcattgtgactaataaaccattagaattgttcatgcttgtatttctagtattacagcagaaccagttcaaatgatttaaattcccagggaaggattatgcaattatttacaatcttagaattgtactttatcagcaaaaaccacacatgtaaattctggatttttgtagttttatctataatttgtctcatgactcaagattccagagtcccaactctggagtttgctctctctctgtctctctgcctccctcattttaaattttacagaaatatccagtaacataatgctatagaaaatcaagtttcccccagcaggtcgggaagccgaggtgggcggatcaactgagatgaggagattgagagcagcctggccaacacagtgaaaccgcgtctctgctaaaaattcaaaaattagccatgcctggtggcaggcacctgaaacgccagctactcaagagactgaggcacgagaatcgcctgaacctgggaggcggaagttgcagtgagctgagattgctccactacagtcccgcctgggcgacagagcaagactccgcctcaagaaaaaaaaatagcaagtagcctataataacaaattagagggctctggctactaaatttaaagggttttataaggctacatgaagtgcagcatcctcaagagtgtggacacagagagccccttagcagaaacagtgtctaaaatacatccgtgtacacacagtccctttagagttgacaaaggctgccgtgtggtttaaggtggcatagaatgtcttcttaataaataatattaaaccaaagggttacacgtaggaaaaaataaatctaaacttattctcacactataaaaacacttcttactttttatctagttattgtacattttttatgatttatatttaaaattgagaaataaaagtcatatacggtcatcctttactattcgtgggtgattggtttcaggatctccactcaggtaccaaaatctgcagatgctcaagcctcttacataaaatgacacagcatttggatataacccatgcacatcctcctgtatacatgaaatcatctcttgattacttataattcctgatacagcctacacactgcctcatttgtgtccattcaacatagttttgcattttgaaactttgtggacattttctctgaatatttttgatttacacttggttcaataaacacctgtaaaccccacagatatggaggagcgactgtatatttatagtatgaaatatgatgtgttgatatgtgtccccgtggagatgagactagcaaggcttatgactctacaaatgtttcatcgtggaatgactctgccagctttccaggttgcagagagtaagaatatcacttgttcatgtgattcacgatccttggaacctcctatgtgctgcatctttggatggaaattggagtcccagagacaaatgaggctccaccctgcttccagaagctcagagtccaggggtgagaacccagcggagaacagatggggttatgtggacatggtaatgataacagcggtttctttcagcgaatacagtgtcacattacctgaagcaatgagggcagacatgtttatttgaagaggagacagctacattgaaatcacaaaaaattttataagtttcactgctgacagaaggctggaaaatagtccgaagaa

SEQ ID NO: 1560554 - DNA, 4001 bp, Homo sapiens
cctttatagttgacaaaggctgccatgtagtttaaggtggaatagaatattttctcaacaaataacacaggaccatagggttacacgtaggaaaaaataaatctaaacttatcctcacactataaaaacacttcttattttttatcttgttgttgtaaattttttatgctttatttttaagattgacaaataaaaattatataccatggtccttcactatacctgggtgattggttccaggatccccattcagataccaaaatctgcagatgctcaagccccttgcatgaaatggcatagtgaagctgggcaccgtggctcacgcctgtaatcccagcactttgggaggctgagctgggtagatcacaaggtcaggagttcaagaccagctggtccaacattctgaaaccccatctctactaaaaatatacacacaaaaaaatttatctgtgcatggtggcacgtgcctgtaatcctaggggaggctactggggaggctgagggaagagaatcgcttgaacctggaaggcggaggttgcagtgagttgagatcacgccactgcactccagcctgggtgagagagtgagactgtctcaaaaaaaaaaaaaaaatagcatagcaattgcatagaacccatgcacatcctcctgtatacatgaaatcatctcttgattacttataattcctgacacagcctacacgccactcaatttgtgtcgattcaacatagttttttgctttttgaaacttcggggattttttttctcaaaatatttttgatttattgctgattcaataaacatgtgtaaaccccagagatatggaggagtgactgtctatttatagtagtatgaaagatgatgtgttgatacgtgtccctgtggagatgagactaacaaggcctatgactctacaaatgtttcatcgtggaatgactctgccagctttccagatctgcagagagtaagaatatcacttgttcatctgattcaccatccttggaacctcctatgtgctgcatctttggatggaaattggagtctcagagacaattcaggctccaccatgcttccagaagctcagagtccagggctgagaacccagcggagaacagatggggttatgtggacgtggtaatgataacaccggaagccttaggcaagaaaagagtcccattgaagaaaccatgagggcagacatgtttacttgaagaatagaaaactacattgaaattataaaaaaaatttataagttttactgctgacagaaggctgaaagatactctgaggaaaggtggaatagcacgtatctaagtgccgtgttaagagggagcctcttatatgtttggaattgtgagttcctcagtgtgatcgcagcctcaagtagactaggaagtaagccagttaggttggagaggtgggcaggggtcaagtgaaatggagaattgtgggctaagcaagtgtgttttctctccagcaggcagtggggaccttagacatttgtaagcaagagagaggcatgttcagattcgtggtgtgaggaagagcgatgccctaagatgcagactcacgccttcagagtccagctgctggtacatgggagctggcaacccggttttgagacagggctattgtctccctagaagatcccatcaaggcctgactgtggtgctagtggacagaagacaactttggatctgcgctcagcatttggaagttccgtgttacacgctggtatctgttgggggtgtcttgggcctctgagaagggcgagtgatttttctctgtgtgaaaacgcagtgattcaactgtgcgtatgtcacctcctgagggtcttgttcatcagagtcctggagggagggaaatgctgagtgagggagggtgctcacattttccaggactctttgggaataagactagccacgaggctgggcggaggagcacctacctccctgttcactgttctgttccctgcaggctcttggtccattacaacagcatctgtagaagacggaagtcgtcaaaacagctcggagggcacttctgggtcctcatttcataagcagataccaacatacagggggaggccataggtgcctgaggtccctcagttgccaacagcagactcagacattctatctctctgagctcaaggatccatcccatgtatagctctgagttcccatcctattgattctgtgtcccactttctgcctgtcatggaaccttctcctggatgtgagtggctgcaggggatgtgaggatacggttcagaatcaggcaatggtctgtgagctgaaggcagaggcagggagtctggtgctctctctagaaagtcctgcctctgtggctcctgccttgggccagggaccatccagtctgtgaggaacacacacctgagtgctcccatcctgcttccccacatggccctgagctctctggcttctgcttcgtgagacttactctttttgttggcacaccagcgatgaaggagaaagaagaggaggatagcaaaggggatgatgaccactgaggtcccaatcagaacgtgcaggtttctggagttacctggaggaagacaagacaccaataagaagctaatcatagcagttcctctatatgaattgtctcacatttcttgattgacaggtaaccacatacaacgtctctttaggacaagcacccagatggcgggagacctagcttcctcctgctttctcagttgtagtaaccatagaacgtgctgaggatacaactgctttagtttagatgtttgaccccttcaaacctcacattgaaatgtaacccccagagtgggaggttgggcctcttgggagttgtttgggtcatggaggtggatccatcatgaacagatcaatgctgttccaaggagacggggttagcaagttccccctctattagttcctggagaactggttgttaaaagagcttggaagctccatcgctccccctcccccttggtccctctcttgccgtgtgatctctgtggtctctgcacagacagaccctccttcccttctgccagagtgggagcagcctgaggccgtcacaagaaatagatgctggtgccatgcttccagtacagcctgcagaactgtgaggcaaacacatttcttgtctttagaagttacccaggctcaagtgttcctttagagcaacaaaaatggactaagacagcaacgtcctgagatcaggaggaacatcccagaacagcctgggctgtcttcctgttcttcctggaggaggacgtcatgcagtgctttagctgagtgcttcctgtggctccagggtacaaaacccaggctgggctgctttttgatttcccccagatacactgcatatggggtgactccacatgtctcgagcagcttttctgagccttgagggactggctcacattgaaatgtaggtttctgttgtcactcgctgcttatctgttagtaatgaacctgcctgtgtaatgtgttctctgtgtgttctgtctccctggagtgacggtgagtgataggaattggtataggcccaggtgcattccaggaggtgtttagaatcttctctgggaagactggattgggattgatacacagcgaatgtgctttacagtttctaccaccacaaccctcttgactcaaaaaaattacattctccaagaaaagaaagaaaaaatgaaatcaagataaaaaaagtgaagtagaactgacttaaatcaaacagccatgaaataatgatgtagcccaggaacaacatgctactttttgtgatctgctgagacatatattaggctgctattccacccgagaagcacggggaaggaccgccctctccgtcgtttattgtttcaatacagcctgtccttctgtgagttagtacgaaatgtgaccaggggctagtgctggcactggtctctgagtccaagatctgagctcactccaaagagtattagtgtttacctccccatgatctatctgtatctccatagg

SEQ ID NO: 1560555 - DNA, 4001 bp, Homo sapiens
tactgaatccccctttaccccaaatacagtcggggcctggatgattggaccctgatggacgcccccaccagaagctctgggattcaggaggtgggacagtgagaagcccagacagaaagcctctgacctgtgaccatgatcaccacagggttgctgggtgccgaccacccagtgggggagtgtgggtgtgaactgcaacatctgtaggtccctgcatgtgctggggtcacagggcccatgagaaagctgttccggaatattctgttgtagagctcagggacaggcatcccgtcttctttggacagactgaattcattaaacccaagacgagagcgacactgaagagtcacatgttgtccttcagacaccacagtgccgggccaggcagagaggaagggcttgtcctgaccacctgggggagaaggaggcaccaccttagagaggaggatgtggagccgcccctccctccctgtgctcagaagattctcccatttccacgtttctaaggctcctaccacacctgggtgcccagggctacaggaaggacccatcccgcatagacatggcgtctccctacagcaagtgtcagctgagaactttgagcaggtgctgaagaagcgactcttactagattttaacactgcaaaattacttacataaaagaacacaaggtagacacaggatggagggcatgatcagctaatgcatgaaccataataaacaactgagcccctattagaagatctggaatgtcagggtcatgactgtggttcccccacctcttaggtagaatgacagcagccacattgcagcccctaccgtcatggaaacgctggagggtgtgagttatgctcttgtcctcagaggcctgttgttccttgcactgcttctctcccttcctctgccggtgacaccacttcctccctgcacaccactcctttgagcacttcagtctccccctgggtccccacagactcagccaagggaaagaaaggccggggagggctaggacagaactgtggcgaagcttcccctggcttccttttcctagttcatgagagattcccacatggcttcccatggtcagcccatcagtcaaccccctgtgtcgcctgcctcccgtttcaggagcatcatcttatgtggggagatgacaacctaaggtttgggggaaggactcacccacatgtggccagggcccctccagcaagaagaaccctggaaagaaagatcatgatggatgatccatctgtacatcacctccaggcccatatctccactccaggcccatatctccacctctaggcccatatctccactccaggcctatatctccacctccgtcctatatctctactccaggcccatatctccactccaggcctatatctccacctccgtcctatatctctactccaggcccatatctacactccaggcccatatctccacctccaggcctgtatctccacctccaggcccgtgtctccattccaggcccatatctgcactccaagccaacatctccactccaggcccgtatctctactccaggcccatatctacagttccaggcccatatctccacctccaggcccatatctccactctaggcccatatctccacctccaggcccgtatctcaattccaggtccatatctgcactccaagccaatatctccactccaggcccatatctacagttccaggcccatatctctactccaggcccatatctctacttcaggcccatatctacagttccaggcccatatctccactccaggcccatatctccaccccaggcccatatctccactccaggcctatatctccactccaggcccatatctccactccaggcccagatctccactccaggcccagatctccaccccagcgctccctccctcgattcccttccaggactcaccaacacacgccatgctgacgaccatgagcgacatggtgctgccggtgcagacaggcggctgcgccccagctcagttcagcagcacacaggatgttgtgaggggctcatgcagtttacatgctgaccacatcatgggaggatgacgtatgcaggctatttctaccttgcatgaggcccagtggctgtttggtcaagagcggaacatggcttcctggaaattgttccaactagaattgacaccttgcatccttcactataaccaactcaaaacacgtctcagatccaatctctcatacaggagatgactgaatgcttggcttacattaaagacttttgatgtatttttgttgtttttatctgagattcaaactcttcttcatgtgctattttccccaggctgttctttgacttcagagttcaagcaatcctcctgccccagcatttctagcagctggcagtatgtcacaatctgccacacccaagtcacaacttttagaactttttttttttttgagacgcaatctcacttcgtcacccagtttggaatgcagtggtgagacctcggctcattgcagcctccacctcccaggttcacgcaattctcgtgcctcagcctcctaagtagctggatttacaggcacccaccatcacgcccacctaatttttgtacttttagtagagaggaggtttctccatgttggccaggctggtcttgaactcctaacctcaagtgatctgtctacttcagcctcccaaagtgctgagattacaggtgtgagccaccatgcctggccgggacattctatatgtgtgcgtatgtgtgcgtttatatacatatggttatacacacacacacacacacacaccctaagcactcacatatatagttgtttcaaattttaaaaaatataaattttgtatttttctttctttttctcacatttgtgtttctatgacaccatatacatattgaattttatagttctattttattcttttggattgcagtttaatagtccatacataactttatcaacatgtaattatccactctttttatcatggacatttgtgttgtttccggattttctcttttataactcgggccttgataatcgtgtttctgtgtgatcccttgcatacatatgctgaattaattagacatatttacctaggaatgaaattattggttttgggtgcaagttggtgttgagcttaaccaggaagtgccaaaatatttccatcatgaccaaatgtggcctggaaagttttttggggtcaattttcctgtttcttctaaggaacaaaattgatgtcactgatttttctgtcctgtttgtcatttatgaatatacgtacatatgcacgtatatatttgcttgccattttatgtttttcctcgacgttactttggaattaatttgctgatgtgtagtatttctgcaagcgaaagttacctatttactcagctcttccttcttttctaacacagacatttgaggcttattttcctttaacactgttctatctgtatccccagtcatttgccgagatgtgttttcatttttaattgatacaaaatattttccacctttctttgaaatgtttttcttccactcattgtttattgctatgtgtgtttattaattttaaaatatttgataatttccccagcatttccttgttgtacatttataatttaattcaactgtttcatctatcatattacctatgattcagcatttaaaaatttattttggtgaatgttccaggggtgctagacaagtttgtggattaggaagatttgaggtggatgttttctaaatgtcagttaagaaaaaaatcattcaaatgtttttctttatttaaaaaaaatagagacggggtctcactatggtgcccaggctggtctcaaactcctggcctcaagtgatcctcccattttggcctcccaaagtgctaggattattgaaattattaaatgtttcatatcaacacccaaccttatgcacccgccgcctacacaaatgtttttcaagtctttcatatgcttaataattttctgtg

SEQ ID NO: 1560556 - DNA, 4001 bp, Homo sapiens
ctgtcttctttgtatagcatgaaattgttaaacctatgacgatagtgacaccgaagagtcacgtgtcctcctcgaggcaccacagcgctgggccaggcagacaggaagggtttgtcctgaccacctgggggagaaggaggcactgccttagagaggaggatgtggagccgcccctcactcccagtgcccagaagattctccccatttccactttctaaggctcctaccacacctgggtgcccagggctacaggaaggacccatcctgcatagacttggcgtctccctacaacaagtgtcagctgagaactttgagcaagttgctggagaagcaactcttactagattttaatactgcaaaattactcatataaaacaacacaaagtagacacggcatggagggcaagtcctatgtgaatggaatatcagccaattgatgaactgagcccccatcagaggatttggaatgtcagggccatggctgtggtttcctcaccttttctggtagaaagaccgcagccacactgcagcccctaccatcacggaaacgctggagggtgtgagttacacctttgtcctcagaggacctgctgttcctagcactgcttccctctctttctctgctgctgacaccacttcctccctgcacacccatcttggagcaccctagtctcaccccagtcttcacagagcttgactcaggaaagggaatgaaaggccggggaaggcaaggtcagaaatgtgggccgagcatccgagggtcccctcttcctagtgtatgagagactccccgacaggacttccctcccatttcaggaaaatcctcttatgtggggagatgacaccctaaggtttggggaaggactcacccatgtgtggaccggccctctggaccaagaacaaccctagaaagaaagatcatgatggaccatccctctgcaggcaaaccagggcaccctgctgcccccactgggctgtgcgtcttggcagccaggcccttgctgggctgaaggtaaactcaccctcgctgcctacctgcccccaggaacaaggatctcggctgtgcagagactgagcctccaggcccagatctctacctccaggcctagatctacacaacaggcccagatctccactccaggtccgtatctccactccaggcccatatctcctctccaggctggtaagtccactccaggcccatatctccactccaggctcctatctcaactccaggctcatatatccactccaggctcatatctccactccaggcccatatttccactccaggcttctatctcctctccaggcccatatctcctttccaggcttgtatgtctgctccaggcccgtatctccaccccaggcccatatctccactccaggatcatatctccactccaggcccagatctccacttcatgcccttaactccacctccgggcccataactccacctctaggcccatatctccactccaggcccatatctccacttcaggcccatatctctactgcaggcccataactccacctccaggcccatatctccactccaggcccatcgctccacttctaggcccatcactccacctctaggcccacatctcccctccaggcccatatctcccctccaggcccatctctccaccccaggcacatatctccaccccaggcccatatctccactccaggcccagatctccactccaggcacatatctccaccccaggcccctatctccactccaggcccagatctccactccaggcccagatctccacttcaggcccataactccacctctaggcccataactccacctctaggcccatatctttacctccaggtccagatctccatccccgcactccctccctcgattcccttccaggactcaccaacacacgccatgctgacgaccatgagcgacatggtgctgccggtgcagacaggcggctgcgccccagctcagctcagcagcgcacaggatgttatttggcgccctgcccatgcagtttacatgttgaccacatcatgggagggtgacgtacgcaggctctttctaccttgcatgaggcccagtgggtgctcgctcaagagcggaacatggcttcctggaaattgctctcactagaattgacacctcgcgtccttcactatgaccaactcaaaacacgtctcagatccaacctcccgaacacgagatgcctaaaatctgtgctaacatgaaagacttttcatgtatttttattgtttttatctgagattcaaactcttcttcctgtgtaatatgcaaaatatctaataggtattattaaggttttcagagcaattgtgacaataaaccattagaatttttcatgattgtatttctagtattacagcagaaccagttcaaatgatttaaactcccagggaaggattatgcaattatttacaatcttagaattgtactttatcagcaaaaatcacaacatgtaaattctggatttttgtagatttatctagaatttgtctcatgtcccaagattccagagttccaactcatggtttgctctctctctgtctctctgcctccctcattttaaattttacagaaatatccagtaacataatgctatagaaaatcaatttccccagcactttggaagccgaggtgagtgatcaaccgaggtcaggagtttgagaccagcctggccaatatagtgaaaccatgtctctgctaaaaatacaaaaattagccatgcctggtagcaggcacttgtaatgccagctattcaagaggctgaggcacggaatcccttgaacctgggaggcggaagttgcagtgagccgagatcgtgccactgcactccagcctgggcaacagagcgagactctgcctcaagaaaaataaaaaaagcatagcaaatagcctataataaataactagaggactccagctaccaaattttaggggttgtataaggctgcataaaatgcagcattctcaagagagtggacagagagagagccactgagcagaaaacagtgtctaaaatacatccgtgtacacacagtccctttatagttgacaaaggctgccatgtggtttaaggtggaatagaatgtcttctcaataaataacatgggcccaagggttacacatagagaaaaatatatctaaacgtattctcacactataaaacacttgtttattttatcttgttattgtaatttttttatgttttatatttaaaattgagaaataaaaattatatacagtcatccctcactattcgtgggtgattggtttcaggatctccactcagatagcacaatctgcagacgctcaagcctcttacatgaaatggcacagcatttgcaaataacccatgcacatcctcctgtgtacatgaaatcatcccttgattatttataattcctgatacagcctacacacagcttcatttgtgtccattcaacatagttttgctttttgaaactttgtggattttttctctgaatatttttgatttatatttggttcaataaacacctgtaaatcccacagatacagaggaccgactgtatatttatagtatgaaagatgatgtgttgatatgtgtccccgtggagatgagactaacaaggcctatgactctacaaatgtttcatcatggaatgactctgccagctttccaggtctgcagagagtaagaatatcacttgttcatgtgattcacgatccttggaacctcttatgtgctgcatctttggatggaaattggagtctcagagacaaatcaggctccaccctgcttccagaagctccaagtccaggggtgagaacccagtggagaacagttggagttatttggacatggtaatgataacactggaaactttcagccaaaaaaagagtcacctaaagaatgaaggcagacatgtttatttgaagaggagagaactacactgaaatcaaaaaaattttataaggtttgctgatgccagaa

SEQ ID NO: 1560557 - DNA, 4001 bp, Homo sapiens
gttattcttcccaccacagcacccatttcccctgtattcaatctcccttgaccccaaatacagttggggcctgggtgatgggaccctgatggacacccccaccagaagctctgggattcaggaggtgggacagtgagaagcccagacagaaagcctctgacctgtgaccatgatcaccagggggttgctgggtgccgaccacccagtgagggagtgtgggcgtgaaccccgacatctgtaggtccctgcatgtgctggggtcacagggcccatgatgaagctctcctggaatattctgccgtggaagatgggaacgtggcttctgtcttctttgtacagcatgaaattgttaaacccacgacgatagtgacactgaagagccacgtgtcctcctcgaggcaccacagtgctgggccgggcagacaggaagggtttgtcctgaccacctgggggagaaggaggcactgccttagagaggaggatgtggagccacccctccctccctgtgctcagaagattctcccatttccgctttctaaggctcctaccacacctgggtgcccagggctacaggaaggacccaccccacatagacatggcgtctccctacaacaagtgtcagctgagaactttgagcaagtgctgaataagtgactcttactagattttaatactgcaaaattactcacataaaacaacacaaagtagacacggcatggagggcatgtcctatgtgaatggaatatcagccaattcatgaactgagccccctcagaggatttggaatgtcagggccatggctgtggtttcccccctcttctggtagaaagaccgcagccacactgcagcccctaccgtcacggaaacgctggagggtgtcagttatacctttgtcctcagaggacctgctgttcctagcactgcttccctctctttctctgctgctgacaccacttcctccctgcacaccccagcttggagcaccccagtctcaccccagtcttcacagagcttgactcaggaaagggaaagaaaggccagggagggcgaggtcagaaatgtgggccgagtatccaagggtcccctcttcctagtttatgagagactccccgacaggacttccctcctgtttcagaaaaatcctcttatgtggggagatgacaccctaaggtttggggacggactcacccatgagtggccaggccccctgcagcaagaagaaccctggaaagaaagatcatgatagacgatccaactgcaggcaaaccagggcaccctgctgcccccactgcactgtgtgtcttggcagccaggcccttgctgggctgaaggtaaacttagcctccctgctacctgctgccaagaacagggctctcagctgtggagagacccaggctccaggcccagatcaacacttcctggcccagatctccactccaggcccatatctccactccaggcccctatctccactccaggcccatatctccactccaggcccatatctccacatcagacccatatctccactccaggcccagatctcccctctaggcccatatctccactccaggcccatatctccactccaggcccatatctccacatcagacccatatctccactccaggcccatatctccactccaggcccagatctccacctgcaggcccatatctccactccaggcccatatctccactccaggcccgtatctccactccaggcccatatctccacacccaggcccatatctcccctccaggcccatatctccactccaggcccatatttacacctccaggcccatatctccacacccaggcccatatctccactccaggcccatatctccactccaggcccatatctttacctctaggccgagatctccatccccactctccctccctctattcccttccaggactcaccaacgcacgccatgctgacgaccgtgagcgacatggtgctgccggtgcagacaggaggccgcgccccagctcagctcagcagcgcacaggatgttatttggcgccctgcccatgcagtttacatgttgaccacatcatgggagggtgacgtacgcaggctctttctaccttgcatgaggcccagtgggtgctcgctcaagagcggaacatggcttcctggaaattgttgtgactacaattgccaccttgcatccttcactatgaccagactcaaaagacgtctcagatccaacctctcacacatgaggtgattgaattctgtgcttacattaaagacttttgatgtatttttgtttttatctgagattcaaacttttcttcatgtgtaatgtgcaaaatatctaagaggtattattaacattatcagagtaattgtgacaaaaagccattctaattttcctgatgagtttctagtactaaacctgaggcacgagaattgcttgaacctgggaggcggaggctgcagtgagctgagctcaagccactgaactccagcttgggtgacagaggaagagtctgtctcaagaaagaaaaaaaaaagcaaactaaataacctataataacaaatcagagaactcaggttaccaaattttaaggggttctataagtttatatgaaatgcagcatcctcatgagaggggatacagagaaccactgggcagaaaactgtgtctaaaatacatctgtggatacacagtccctttatagttgacaaaggctgccatgtagtttaaggtggaatagaatattttctcaacaaataacacaggaccatagggttacacgtaggaaaaaataaatctaaacttatcctcacactataaagacacttcttattttttatcttgttgttgtaaactttttatgctttatttttaagattgacaaataaaaattatatactgtggtccttcactattcctgggtgattggttccaggatccccattcagataccaaaatctgcagatgctcaagccccttgcatgaaatggcatagcgaagctgggcaccgtggctcacgcctgtaatcccagcactttgggaggctgagttgggtagatcacgaggtcaggagttcaagaccagctggtccaacattctgaaaccccgtctctactaaaaatacacacacaaaaaaatttatctgtgcatggtggcacgtgcctgtaatcctaggggaggctactggggaggctgagggaagacaatcgcttgaacctgggaggcggaggttgcagtgagctgagatcatgccactgcactccagcctgggtgagagagtgagactgtctcaaaaaaaaaaaaaaaatagcatagcaattgcatagaacccatgcacatcctcctgtatacatgaaatcatcccttgattacttataattcctgacacagcctacacgccactcaatttgtgtcgattcaacatagttttttgcttcttgaaacttcggggatttttttctgaaaatatttttgatttattgttggttcaataaacacctgtaaaccccacagatatggaggaccgactgtatatttatattatgaaagatgatatgttgatatgtgtccccgtggagatgagactaacaaggcctatgactctacaaatgtttcatcgtggaatgactctgccagctttccaggtctgcagagagtaagaatatcacttgttcatgtgattcacgatccttggagcctcctatgtgctgtatctttggatggaaattggagtctcagagacaaatcaggctccattctgcttccagaagctcagagtccagggctgagaacccaatggagaacagatggggttatgtggacatggtaatgataacaccggaagccttaggcaagaaaagagtctcgttaccgaaaccatgagggcagacatgtttatttgaaggcgggaaaactacattgaaattatttaaaaaatttataagttttactgctggcagaaggctgaaagatagtctgaagggaggtggaacagcacgtgtct

SEQ ID NO: 1560558 - DNA, 4001 bp, Homo sapiens
gcaactatttctctgtactgaatccccctttaccccaaatacagtcggggcctggatgattggaccctgatggacgcccccaccagaagctctgggattcaggaggtgggacagtgagaagcccagacagaaagcctctgacctgtgaccatgatcaccacagggttgctgggtgccgaccacccagtgggggagtgtgggtgtgaactgcaacatctgtaggtccctgcatgtgctggggtcacagggcccatgagaaagctgttccggaatattctgttgtagagctcagggacaggcatcccgtcttctttggacagactgaattcattaaacccaagacgagagcgacactgaagagtcacatgttgtccttcagacaccacagtgccgggccaggcagagaggaagggcttgtcctgaccacctgggggagaaggaggcaccaccttagagaggaggatgtggagccgcccctccctccctgtgctcagaagattctcccatttccacgtttctaaggctcctaccacacctgggtgcccagggctacaggaaggacccatcccgcatagacatggcgtctccctacagcaagtgtcagctgagaactttgagcaggtgctgaagaagcgactcttactagattttaacactgcaaaattacttacataaaagaacacaaggtagacacaggatggagggcatgatcagctaatgcatgaaccataataaacaactgagcccctattagaagatctggaatgtcagggtcatgactgtggttcccccacctcttaggtagaatgacagcagccacattgcagcccctaccgtcatggaaacgctggagggtgtgagttatgctcttgtcctcagaggcctgttgttccttgcactgcttctctcccttcctctgccggtgacaccacttcctccctgcacaccactcctttgagcacttcagtctccccctgggtccccacagactcagccaagggaaagaaaggccggggagggctaggacagaactgtggcgaagcttcccctggcttccttttcctagttcatgagagattcccacatggcttcccatggtcagcccatcagtcaaccccctgtgtcgcctgcctcccgtttcaggagcatcatcttatgtggggagatgacaacctaaggtttgggggaaggactcacccacatgtggccagggcccctccagcaagaagaaccctggaaagaaagatcatgatggatgatccatctgtacatcacctccaggcccatatctccactccaggcccatatctccacctctaggcccatatctccactccaggcctatatctccacctccgtcctatatctctactccaggcccatatctccactccaggcctatatctccacctccgtcctatatctctactccaggcccatatctacactccaggcccatatctccacctccaggcctgtatctccacctccaggcccgtgtctccattccaggcccatatctgcactccaagccaacatctccactccaggcccgtatctctactccaggcccatatctacagttccaggcccatatctccacctccaggcccatatctccactctaggcccatatctccacctccaggcccgtatctcaattccaggtccatatctgcactccaagccaatatctccactccaggcccatatctacagttccaggcccatatctctactccaggcccatatctctacttcaggcccatatctacagttccaggcccatatctccactccaggcccatatctccaccccaggcccatatctccactccaggcctatatctccactccaggcccatatctccactccaggcccagatctccactccaggcccagatctccaccccagcgctccctccctcgattcccttccaggactcaccaacacacgccatgctgacgaccatgagcgacatggtgctgccggtgcagacaggcggctgcgccccagctcagttcagcagcacacaggatgttgtgaggggctcatgcagtttacatgctgaccacatcatgggaggatgacgtatgcaggctatttctaccttgcatgaggcccagtggctgtttggtcaagagcggaacatggcttcctggaaattgttccaactagaattgacaccttgcatccttcactataaccaactcaaaacacgtctcagatccaatctctcatacaggagatgactgaatgcttggcttacattaaagacttttgatgtatttttgttgtttttatctgagattcaaactcttcttcatgtgctattttccccaggctgttctttgacttcagagttcaagcaatcctcctgccccagcatttctagcagctggcagtatgtcacaatctgccacacccaagtcacaacttttagaactttttttttttttgagacgcaatctcacttcgtcacccagtttggaatgcagtggtgagacctcggctcattgcagcctccacctcccaggttcacgcaattctcgtgcctcagcctcctaagtagctggatttacaggcacccaccatcacgcccacctaatttttgtacttttagtagagaggaggtttctccatgttggccaggctggtcttgaactcctaacctcaagtgatctgtctacttcagcctcccaaagtgctgagattacaggtgtgagccaccatgcctggccgggacattctatatgtgtgcgtatgtgtgcgtttatatacatatggttatacacacacacacacacacacaccctaagcactcacatatatagttgtttcaaattttaaaaaatataaattttgtatttttctttctttttctcacatttgtgtttctatgacaccatatacatattgaattttatagttctattttattcttttggattgcagtttaatagtccatacataactttatcaacatgtaattatccactctttttatcatggacatttgtgttgtttccggattttctcttttataactcgggccttgataatcgtgtttctgtgtgatcccttgcatacatatgctgaattaattagacatatttacctaggaatgaaattattggttttgggtgcaagttggtgttgagcttaaccaggaagtgccaaaatatttccatcatgaccaaatgtggcctggaaagttttttggggtcaattttcctgtttcttctaaggaacaaaattgatgtcactgatttttctgtcctgtttgtcatttatgaatatacgtacatatgcacgtatatatttgcttgccattttatgtttttcctcgacgttactttggaattaatttgctgatgtgtagtatttctgcaagcgaaagttacctatttactcagctcttccttcttttctaacacagacatttgaggcttattttcctttaacactgttctatctgtatccccagtcatttgccgagatgtgttttcatttttaattgatacaaaatattttccacctttctttgaaatgtttttcttccactcattgtttattgctatgtgtgtttattaattttaaaatatttgataatttccccagcatttccttgttgtacatttataatttaattcaactgtttcatctatcatattacctatgattcagcatttaaaaatttattttggtgaatgttccaggggtgctagacaagtttgtggattaggaagatttgaggtggatgttttctaaatgtcagttaagaaaaaaatcattcaaatgtttttctttatttaaaaaaaatagagacggggtctcactatggtgcccaggctggtctcaaactcctggcctcaagtgatcctcccattttggcctcccaaagtgctaggattattgaaattattaaatgtttcatatcaacacccaaccttatgcacccgccgcctacacaaatgtttttcaagtctttcatatgct

SEQ ID NO: 1560559 - DNA, 4001 bp, Homo sapiens
tgccatggaagatgggaatgtggattctgtcttctttgtatagcatgaaattgttaaacctatgacgatagtgacaccgaagagtcacgtgtcctcctcgaggcaccacagcgctgggccaggcagacaggaagggtttgtcctgaccacctgggggagaaggaggcactgccttagagaggaggatgtggagccgcccctcactcccagtgcccagaagattctccccatttccactttctaaggctcctaccacacctgggtgcccagggctacaggaaggacccatcctgcatagacttggcgtctccctacaacaagtgtcagctgagaactttgagcaagttgctggagaagcaactcttactagattttaatactgcaaaattactcatataaaacaacacaaagtagacacggcatggagggcaagtcctatgtgaatggaatatcagccaattgatgaactgagcccccatcagaggatttggaatgtcagggccatggctgtggtttcctcaccttttctggtagaaagaccgcagccacactgcagcccctaccatcacggaaacgctggagggtgtgagttacacctttgtcctcagaggacctgctgttcctagcactgcttccctctctttctctgctgctgacaccacttcctccctgcacacccatcttggagcaccctagtctcaccccagtcttcacagagcttgactcaggaaagggaatgaaaggccggggaaggcaaggtcagaaatgtgggccgagcatccgagggtcccctcttcctagtgtatgagagactccccgacaggacttccctcccatttcaggaaaatcctcttatgtggggagatgacaccctaaggtttggggaaggactcacccatgtgtggaccggccctctggaccaagaacaaccctagaaagaaagatcatgatggaccatccctctgcaggcaaaccagggcaccctgctgcccccactgggctgtgcgtcttggcagccaggcccttgctgggctgaaggtaaactcaccctcgctgcctacctgcccccaggaacaaggatctcggctgtgcagagactgagcctccaggcccagatctctacctccaggcctagatctacacaacaggcccagatctccactccaggtccgtatctccactccaggcccatatctcctctccaggctggtaagtccactccaggcccatatctccactccaggctcctatctcaactccaggctcatatatccactccaggctcatatctccactccaggcccatatttccactccaggcttctatctcctctccaggcccatatctcctttccaggcttgtatgtctgctccaggcccgtatctccaccccaggcccatatctccactccaggatcatatctccactccaggcccagatctccacttcatgcccttaactccacctccgggcccataactccacctctaggcccatatctccactccaggcccatatctccacttcaggcccatatctctactgcaggcccataactccacctccaggcccatatctccactccaggcccatcgctccacttctaggcccatcactccacctctaggcccacatctcccctccaggcccatatctcccctccaggcccatctctccaccccaggcacatatctccaccccaggcccatatctccactccaggcccagatctccactccaggcacatatctccaccccaggcccctatctccactccaggcccagatctccactccaggcccagatctccacttcaggcccataactccacctctaggcccataactccacctctaggcccatatctttacctccaggtccagatctccatccccgcactccctccctcgattcccttccaggactcaccaacacacgccatgctgacgaccatgagcgacatggtgctgccggtgcagacaggcggctgcgccccagctcagctcagcagcgcacaggatgttatttggcgccctgcccatgcagtttacatgttgaccacatcatgggagggtgacgtacgcaggctctttctaccttgcatgaggcccagtgggtgctcgctcaagagcggaacatggcttcctggaaattgctctcactagaattgacacctcgcgtccttcactatgaccaactcaaaacacgtctcagatccaacctcccgaacacgagatgcctaaaatctgtgctaacatgaaagacttttcatgtatttttattgtttttatctgagattcaaactcttcttcctgtgtaatatgcaaaatatctaataggtattattaaggttttcagagcaattgtgacaataaaccattagaatttttcatgattgtatttctagtattacagcagaaccagttcaaatgatttaaactcccagggaaggattatgcaattatttacaatcttagaattgtactttatcagcaaaaatcacaacatgtaaattctggatttttgtagatttatctagaatttgtctcatgtcccaagattccagagttccaactcatggtttgctctctctctgtctctctgcctccctcattttaaattttacagaaatatccagtaacataatgctatagaaaatcaatttccccagcactttggaagccgaggtgagtgatcaaccgaggtcaggagtttgagaccagcctggccaatatagtgaaaccatgtctctgctaaaaatacaaaaattagccatgcctggtagcaggcacttgtaatgccagctattcaagaggctgaggcacggaatcccttgaacctgggaggcggaagttgcagtgagccgagatcgtgccactgcactccagcctgggcaacagagcgagactctgcctcaagaaaaataaaaaaagcatagcaaatagcctataataaataactagaggactccagctaccaaattttaggggttgtataaggctgcataaaatgcagcattctcaagagagtggacagagagagagccactgagcagaaaacagtgtctaaaatacatccgtgtacacacagtccctttatagttgacaaaggctgccatgtggtttaaggtggaatagaatgtcttctcaataaataacatgggcccaagggttacacatagagaaaaatatatctaaacgtattctcacactataaaacacttgtttattttatcttgttattgtaatttttttatgttttatatttaaaattgagaaataaaaattatatacagtcatccctcactattcgtgggtgattggtttcaggatctccactcagatagcacaatctgcagacgctcaagcctcttacatgaaatggcacagcatttgcaaataacccatgcacatcctcctgtgtacatgaaatcatcccttgattatttataattcctgatacagcctacacacagcttcatttgtgtccattcaacatagttttgctttttgaaactttgtggattttttctctgaatatttttgatttatatttggttcaataaacacctgtaaatcccacagatacagaggaccgactgtatatttatagtatgaaagatgatgtgttgatatgtgtccccgtggagatgagactaacaaggcctatgactctacaaatgtttcatcatggaatgactctgccagctttccaggtctgcagagagtaagaatatcacttgttcatgtgattcacgatccttggaacctcttatgtgctgcatctttggatggaaattggagtctcagagacaaatcaggctccaccctgcttccagaagctccaagtccaggggtgagaacccagtggagaacagttggagttatttggacatggtaatgataacactggaaactttcagccaaaaaaagagtcacctaaagaatgaaggcagacatgtttatttgaagaggagagaactacactgaaatcaaaaaaa

SEQ ID NO: 1560560 - DNA, 4001 bp, Homo sapiens
gctgagacataatttgaacccaggtagtctggccctagaatctttaccctgcatcatatttcaagagtccaaacccatgaacctctgccctcccatgtcttcttctcttctggatgagcctgtggtcagagtgtaacccaagtttccctcaatgggcaaaggctagcacaggaatttggacctgacctgatggaaggtggctccatccaacaggaccccatctcggaaccacagcaattcaggggtagggcgggcatccccacggctccgacatgtcaggttcgcaggaactccagcaaccagagacacagaggggccgcccagcacctggggggcttctggggggactgcaaggtggatttggggtcagagatggatcctgatcttctcagctccaattgaccatgcccctgggctccctgggctctgctactcacagctagtacgggctgccctcttgggctcccaggggacaagtgggcgaggtccttacccagcacgtgcagttgggctggtctggagcggaggcctgcttgtgtagcctgacattcatatgatgcttcatcctctagctccacgggcctaatgtggaggtcatgctggccattggctgcattccctgatatccagtaccgggaccaccctggagtcagggagaaggcagtcagcacaccatggttctgaaatcctggcctcaggcctccatccccagacatcctccaccagaaaactggcccacacatttggtggtaagacactattaaaaagtgtgtactgggcccagagagactctaactccctcccaacccagagtcactgcaaacttaggggtaataaagtcaggaaggaaagcaagaaaatgattgccataaaaattaggttagatactacttctggagtgagggggagggggctatgataggggaaaggaacacggggtcttctggggagctagcaatggacttgggtattggctgtgtgtgtctattttatttggtaaatcttccatttatatttactgtacttttttgcatttatgttctcttttttttttttttttgagacagggtctcaccattgcctgaagtgcagtggcttgatcatggctcactgcagccttgaactcctaggctcaagcaatcctaccacctaagcctcctgagtaactgggactatagatgcacaccaccatacccggctaatttgtttaaaatatatatatacatttgtgtagagataaggtcttgttatgttgcccaggctggtctcaaactcctggtttcaagcgatcctctggcctcaacctcccaaagcgttgggattacaggcgtgagccactgcacctggcctatgtactattttgcaataacataataattcccaaactccgtgggtcacccccaaagaagcagctcaaaaatcaggactcctaaatgtttacccgagcccatcaatttcccaaacttgaaaatgtcaaaatagaaactgcaggtacagccgagcccagcaactctccccctagccagcccgtcccagcgtggagagaacactcttacctggtaggtccctttggccccctagggccagcccactcttagtccactgaactagcccccagtaggcgcccagagcacacggcagccgggcttcctcccccagcagcaccaccaggtcctctggctgttgcaggaaatggggcgacgggcctaggagagttcggggcagcagggctgagcttagcaccttcaggggcctcctcattcaggacccaggagtcccagcccccagctcccttctcgctagtgaagaggcagcccgcaagcaactccccacccccaccccatattcctccgctcccctcgtgcggtacctgctctccctctgaagcagaagaggaggacgaggagggcggggacccgcatcctgagcattcgtcccccaaggttcacgagatttgccgtcgcactggccttcccgtcaacttcttcctctcaagcacgcctcctgtcaccctggcccggagcccccttcacgctcgactcttcgcccagcctagtctctggcctggagtcctccaagtctgctcatccgcagcctctgacgctctgaaacgcctgccagttccgcggcctgggtctctgggagaccccaagagggcccgatcccgctcgccccgcccgggtccgccccccgggagctccgccctcttcccgttgagaaactcccgcggctgagacgcggatgaatgggggacgcagggcgggatcccccggcgggtgggcgcccccagctcaattggggtctgggagccggaacacctgggttcgaggagggagggggtcccggctgggttggacacctgcgccctgccggggttgaggggcaggcaaggggtgaggaggagggaagggagagagtggaagaaacttgctcagcccaggtcctagagggactgcgctcagtggaaactgagctataaatgggagctcctggggcctcgccagtttccgcgccctgggggatgcggggtccggggctcccccgggcctgcgtgtcgggaagagggcacaccgatacctgggggacagttgggacccctacctcgactcccccagcctcaaaacccctcctcaaaatatccctctgttcccttgttattgctgcaaactacagcacgtcctaagacccaggaatccaggccctcggcccctcctttcccaggaccccgcagtcccagcccaacccctctccccactcggccggccgggcccctcggcctggttgcccggcgacggctgggaggcggcggtgccgggccggggcaggcagggaggctgggaaccgcgcagcttgtcctgacggctccatgcagcccagctggggcgttcccacgctgcgcagctggccgagcaggtgggagggaccccgagcagcctgaaggagggctggggggctgggaccctgatctgacattcctggacctgtaagaactggagggtccacattcagattctccactgttcttaggctcagactccgtgtccctaaatgggggagtggggttgggagtgggggttggacttacagggttataagggactggtggttcaggcctttgctggctgagacgctgatggcctgatctcccggttccttgagaggctggagactcaaggtgcactcaagtgcatggtgcacttggaagagggtgacaggggtcagaatatctggtcttaagtcttaagagtcggtggatctatctgccaatctctccccacccccacacaggcccaggaggatttggaaatcagaccgtgaacatctgtcctaagtcctgtgtgtatgtgtgtgtgtgtgtgtgtgtgtgtgtgtgtgtgtgtgtgtgtgtgtgtgtatggggaggtgcgggggtgggtagtgtggccaggaggatcagaggcccaaattcccgagtccttggagagaagggactgagaccccagggtctgagaggggagggatctgggggcctacactcccggcttctgtgtggcttatctagtgcctggattttgaaataggatggacatggggctggaactcctgagtcttagggaggaactcaagtcatggggctgtttttccaggcacttgacgccgcttccccttcctggctctctggggctacggacatggaaagatggagagcccaaggtcccaggagcatgcagagaaggaaaacagccaaggtggagggtggaaggtttgtgcttattaaaggccccagcaagggacagctccacgctctggcacctagggacaccatctggcgagggcccccaggacagagccactcccccagctcggcatccagcccatttcccagggggtgtagagagcagttgggagaggggaggtgggaggagggcaaggagtcaagcatgtgagggaagatggaagtccagcatcgaggatgaagctgggggctgaggccagatgcctcatcttgttcctgggaacga

SEQ ID NO: 1560561 - DNA, 4001 bp, Homo sapiens
tttccctcaatgggcaaaggctagcacaggaatttggacctgacctgatggaaggtggctccatccaacaggaccccatctcggaaccacagcaattcaggggtagggcgggcatccccacggctccgacatgtcaggttcgcaggaactccagcaaccagagacacagaggggccgcccagcacctggggggcttctggggggactgcaaggtggatttggggtcagagatggatcctgatcttctcagctccaattgaccatgcccctgggctccctgggctctgctactcacagctagtacgggctgccctcttgggctcccaggggacaagtgggcgaggtccttacccagcacgtgcagttgggctggtctggagcggaggcctgcttgtgtagcctgacattcatatgatgcttcatcctctagctccacgggcctaatgtggaggtcatgctggccattggctgcattccctgatatccagtaccgggaccaccctggagtcagggagaaggcagtcagcacaccatggttctgaaatcctggcctcaggcctccatccccagacatcctccaccagaaaactggcccacacatttggtggtaagacactattaaaaagtgtgtactgggcccagagagactctaactccctcccaacccagagtcactgcaaacttaggggtaataaagtcaggaaggaaagcaagaaaatgattgccataaaaattaggttagatactacttctggagtgagggggagggggctatgataggggaaaggaacacggggtcttctggggagctagcaatggacttgggtattggctgtgtgtgtctattttatttggtaaatcttccatttatatttactgtacttttttgcatttatgttctcttttttttttttttttgagacagggtctcaccattgcctgaagtgcagtggcttgatcatggctcactgcagccttgaactcctaggctcaagcaatcctaccacctaagcctcctgagtaactgggactatagatgcacaccaccatacccggctaatttgtttaaaatatatatatacatttgtgtagagataaggtcttgttatgttgcccaggctggtctcaaactcctggtttcaagcgatcctctggcctcaacctcccaaagcgttgggattacaggcgtgagccactgcacctggcctatgtactattttgcaataacataataattcccaaactccgtgggtcacccccaaagaagcagctcaaaaatcaggactcctaaatgtttacccgagcccatcaatttcccaaacttgaaaatgtcaaaatagaaactgcaggtacagccgagcccagcaactctccccctagccagcccgtcccagcgtggagagaacactcttacctggtaggtccctttggccccctagggccagcccactcttagtccactgaactagcccccagtaggcgcccagagcacacggcagccgggcttcctcccccagcagcaccaccaggtcctctggctgttgcaggaaatggggcgacgggcctaggagagttcggggcagcagggctgagcttagcaccttcaggggcctcctcattcaggacccaggagtcccagcccccagctcccttctcgctagtgaagaggcagcccgcaagcaactccccacccccaccccatattcctccgctcccctcgtgcggtacctgctctccctctgaagcagaagaggaggacgaggagggcggggacccgcatcctgagcattcgtcccccaaggttcacgagatttgccgtcgcactggccttcccgtcaacttcttcctctcaagcacgcctcctgtcaccctggcccggagcccccttcacgctcgactcttcgcccagcctagtctctggcctggagtcctccaagtctgctcatccgcagcctctgacgctctgaaacgcctgccagttccgcggcctgggtctctgggagaccccaagagggcccgatcccgctcgccccgcccgggtccgccccccgggagctccgccctcttcccgttgagaaactcccgcggctgagacgcggatgaatgggggacgcagggcgggatcccccggcgggtgggcgcccccagctcaattggggtctgggagccggaacacctgggttcgaggagggagggggtcccggctgggttggacacctgcgccctgccggggttgaggggcaggcaaggggtgaggaggagggaagggagagagtggaagaaacttgctcagcccaggtcctagagggactgcgctcagtggaaactgagctataaatgggagctcctggggcctcgccagtttccgcgccctgggggatgcggggtccggggctcccccgggcctgcgtgtcgggaagagggcacaccgatacctgggggacagttgggacccctacctcgactcccccagcctcaaaacccctcctcaaaatatccctctgttcccttgttattgctgcaaactacagcacgtcctaagacccaggaatccaggccctcggcccctcctttcccaggaccccgcagtcccagcccaacccctctccccactcggccggccgggcccctcggcctggttgcccggcgacggctgggaggcggcggtgccgggccggggcaggcagggaggctgggaaccgcgcagcttgtcctgacggctccatgcagcccagctggggcgttcccacgctgcgcagctggccgagcaggtgggagggaccccgagcagcctgaaggagggctggggggctgggaccctgatctgacattcctggacctgtaagaactggagggtccacattcagattctccactgttcttaggctcagactccgtgtccctaaatgggggagtggggttgggagtgggggttggacttacagggttataagggactggtggttcaggcctttgctggctgagacgctgatggcctgatctcccggttccttgagaggctggagactcaaggtgcactcaagtgcatggtgcacttggaagagggtgacaggggtcagaatatctggtcttaagtcttaagagtcggtggatctatctgccaatctctccccacccccacacaggcccaggaggatttggaaatcagaccgtgaacatctgtcctaagtcctgtgtgtatgtgtgtgtgtgtgtgtgtgtgtgtgtgtgtgtgtgtgtgtgtgtgtgtgtatggggaggtgcgggggtgggtagtgtggccaggaggatcagaggcccaaattcccgagtccttggagagaagggactgagaccccagggtctgagaggggagggatctgggggcctacactcccggcttctgtgtggcttatctagtgcctggattttgaaataggatggacatggggctggaactcctgagtcttagggaggaactcaagtcatggggctgtttttccaggcacttgacgccgcttccccttcctggctctctggggctacggacatggaaagatggagagcccaaggtcccaggagcatgcagagaaggaaaacagccaaggtggagggtggaaggtttgtgcttattaaaggccccagcaagggacagctccacgctctggcacctagggacaccatctggcgagggcccccaggacagagccactcccccagctcggcatccagcccatttcccagggggtgtagagagcagttgggagaggggaggtgggaggagggcaaggagtcaagcatgtgagggaagatggaagtccagcatcgaggatgaagctgggggctgaggccagatgcctcatcttgttcctgggaacgatattggcgggggtcttggggaggtagggagaaaactagcatttccaattcccgcaggagataagcaggcagaagaagcttatcccaggcaagtgtatgtgcacgcggggagggcaggcccaccagcatatggttataaaatc

SEQ ID NO: 1560562 - DNA, 4001 bp, Homo sapiens
ggacagaaggtggggagactgggagaggagggcaggaggattggggaagtgagggagcccttggggggcggctgataccccgagtctgagacaggggggctgcgtgggatggagggacaggcggggcaagaagcctcagggcctcagtagcccttcctcaccagtgacccgggtccccgtctgcatccctcccccattcccgccccccactccagttctaggctgcaccaccgcccagccccttcccgcaagctgggcaccccagcccctggttctcctatgcgttgcctcgcgccccgcccaaggtccgtcctcccttcccacgtgggctccccctccccacatgcgcccgccccccgctccggagctcatcccctctcctcgtccccacgtgcgcctcctcccctcctgctccagagtgcacccctgccccgccccaccatgcgccccctcccctccagcttctgagtgcatctccctccgtccccacgtgcgctccctcccctcctgctccgcagcgcaccccccctccccgtccccacgtacgatcccctcccctcccactgcggagcgcactcccgcctgtccccaagtgcgtcccctcccctcccactgcggagcgcacccccgcccgtccccaagtgcgccctctcccctcctgctccggagcgcacctgctggatgtagttgacgaacttgcacatgaagtcgcccagcacccagccgggcagcgggtacagcagggccgtgaaggggacgcagcacaggaggaaggtcacgtccgtggccgccaggttggctgcggtggggatgcgcgggcgctgggcgtgggcgccactggccgcgggaaccgcccagcgctcctggccctgacccctggcccccaccttggtccgagtgaccagcaggatggctcagggaggcccccccctcccccagcgcccctggcctcctcgggcggagaagttggggcgccttctagtaattcccccttacatctcaaacattacgcctccggctcggatttcctggccattccggcagaaatcggttctgctgggccctgtccgggctgggggagcctaagcaggcccctgaccctctgagcctcagtttccacaactgcaaactggagacaatggtgccggcccagcagccaccgactgggctcacagctgtgtgtgataggggaccccaggacacaaatgcataaacaggctcagagagccaccggggcaggggtcgcaaactaaggcccgcgggccaagccagcccctcccccagccctttgttcagctgacaccgagccgttggcccgcgctgcaccggggcgagccccgcgagtggccaggtcgaggtttccatgtgccacactccccaccctccggcccgcccgggcccgcccgcgctggagtttgcgacctctagcctcaggtgcagggaccacagggaaaagattcgaggttgggggggacccctgcaggggacagagccgggtccgagagggccccgatgcgtcgcgagagggcgccccaggccgctcggccctcggagcccccgggacggcagcaggtgcggcgcagcgcccgcactcaccgatgtagaagttggtcacggtccgcatcggcttgtggcggcagatgacgtagatgaccagcgagttccccaccaggcccagcagcatcagcgccgcgaagaagagcggcacgagccaggcgtccacggcccgcggcgaagggactgggccgtccgaggcgttggcgccacagcccgggcagccggaggcgttggccggtgccccccaggacgcgttgggtccggacgtagccacggtgtgcatggccgcgcgcacctcctcctcccggccgccctccaggattgcgccctggcaccgccccggggacccctccgcccgaccgcccgggggctgcgcctgtggaactcaggaaggggctcggctggggtccgcagggtccagagggcagctgtgctgggctcggcggctcctctgccggcgccgctgcggccgagcgtttatagcccgtgcccccctcccctggccttgccttcccgcctctccggcagccgctcgccactccctcccctgcccacgcgccctctattcacccagcggcaacccccctattccctcctcccggtgcaaggtcggagtgagagcgcgggagggggctggagggggcggagcaggcagggggtgggccgcgtggaggccgctgtggacctggaaggaccgaccttaaccagcgagtagacgctcagcccggactaggagcccagccaaggcgcgaactctaaggcctgtgaatatgggaagggctttgaccctcgtaggggctggggctccagggggtgggcccagcctggcggggaggccagccctcagcggagaccctgagtgaggatagcttgggtttgtccccaggaccctggagagccatggaaagttcagggcaggtgagggacgtccccgatctggtggtttgggactgaatgtgtcccacatgactgacaaggggtgtctgatacccgcagggacactagcagcgggaaccaggtggagggcaccttgcaaacgccacagcctcattattattattattattactgatttatgtatttatttatttttttgagacagagtttcgctcaggtcgcccaggctggagtgcagtggctccatctcggctcactgcaagctccgcctccctggttcacgccattctcctgcctcagcctccctagtagctgggactacaggcgcccgccacctcgcccggctaattttttgtacttttagtagagtcagggtttcaccgtgttagccaggatggtcttgatctcctgacctcgtgatccaccctcctcggcctcccaaagtggtggattagaggcgtcagccaccgcgcccggccttttattatcattattgagacagggtgtcgctctgttgcctaggctggagtgcagtggcatgatctcggctcaaagcaacctccgcctcccgggttcaagcaattctcctgcctcagcctcccgagtagctgggattacaggtgcctgccaccatgcccgggtaatttttgtatttttagtagagaccaggtttcaccacgttggccaggctggtctcgaactcctgacctcaggtgatccaccctcctcggcctcccaacgtgctgggattacaggcgtgagccactgctcccggtccagctaatttatttttaaattttttattttttatttttttgcaaataaagttttttttttaattttatttattattttattttattattattatactttaagttttagggtacatgtgcacaatgtgcaggttagttacatatgtatacatgtgccatgctggtgtgctgcacccattaactcgtcatttagcattaggtatatctcctaaggctatccctcccccctccccccttaaatttttttgtagagacaagatctcactaggttgcccaggcttgtcttgaactcctgagctcaagcagtcctcctgcctcagcctcccaaagtgctgggatgacaagcatgagccacccagcctggtcagcacaaccttgactccataatcccacagctggaagtgtaccccaggatgacatccaggaggttcccccaaagtccatcctgcaacagagtccaagacatttggtcatcatggagtaatacacagcgaagaaaaaggtgcttccatttgcataaaaaaagacaaaaaagggaggaaaaaaaatgaataggccgggcacagtggctcatgcctgtaatcccagcacattgggaggccgaggcaggtggatcacttgaggtcaggagttccagaccagcctggccaacgtggtgaaacctggtctctactaaaaatacagaaattacccgggcttggtggagggtgcctgtaatcccagctacttgggaggctgaggcaggagaatcacttgagcccaggaggtgga

SEQ ID NO: 1560563 - DNA, 4001 bp, Homo sapiens
gactggagtgcaatggcatgatgttggctcactgcgatctccacctccccaggttcaagcgattctcctccctcaccctcccaagtagctggaattacaggtgcccgccaccacacctggctaatttttgtatttttagtacagacggggtttcaccatgttggccgggctggtctcaaactcctgacctcaaatgatccacccgctccccccttggcctcccaaagtgctgggattacaggcgtgagctaccgcgcccagccaacctttttttaatttttaaaaaactaaactatgcccagctaatttttgtttttgtagagacggggtatcaccatattgcccaggctagtctaggattcctgggttcaagcaatccccgccgcctcagcctcccaaagtgttgagattacaggtatgagccactgcacccggccaatctgtgtgcttgtgtatatcacaccatacctattctcacacctcacacacaaacatcataaatggttgaactcacaaccacacaggttcaagagtcatcctgacaaccacaaccattcttcacacaattttgccgatgtaaaacctccctctataacctcagacacagccttacacacaccactccacagccagattgacaaccacagcaacaaacacggctcaaccacagccatccagcactcgggctgtgtcccagacacacagcagctcccacactcacacagagccccgggtgcacaaccgcacagctgataatcataggcacagtcccacacactgatccctgacgcggacccccttttccatcctgtcacccgcttggaggagcatcccacttaaatgtccacgtctccactcccatctcccacaaactctccgttgcacaccactgccagccacggtatcaatgcagatcacacaccctctagttcctctctacacacacacacacacacacacacacgcacacacggcttcacacacctccacacctcactcatccaaccccaaggttccacgcgcaccgtcccatgaaacagctccacttctggacacagttccgcccagccccatgcaccatcacagtgacacacaatcaaaagtcaatcatagtcacctatcactgatccagtgccacactgtccaccacacgcgcgcgcgcacacacacacacacacacacacaccaacaggcagaaagacaaccacagccgcacagcctcttggtcaatcacacctaatcctacaaccagttccactctctgccatgaagacagccacacacacagccacacacatgcacatcaggccaagcagaaagtcgactacagtcgcactagctcttggtcgtaaagtgctaccagcaatccaattctacacacacaccattccagtcagaggtcgcccacgttttcacattgctaaaagtgtcacatcatacacacagtcccatcacagggttacacggacagtcgctttcaccctcatacccacagcctgacacactctcttacacacacgcaaagccacacacacacacacacacacacacacaaacacaggcaggcaggagactcccatcgtggcccagccccgcaagccgcaccaacttaccctggcctgcccagccccgcgcaccaggctcacccgcagtcacaagggccccctccctctccctcccaggccccgccccgtcctcgctgtttacctgcgctggggtggggggcatgggaccccagccaggcctccagatcccggagagccccaggacggggcagggggcatccgggagccccaaggcccttccccgtctcagggcgagcgggcccagggttgcccccgccccccatcatcgcggctctccgagagtcccgcgccccactcccggcacccacctgaccgcgggcggctccggccccgcttcgccccactgcgatcagtcgcgtcccgcaggccaggcacgccccgccgctcccgctgcgccgggcgtctgggacctcgggcggctcctccgaggggcggggcagccgggagccacgcccccgcaggtgagccggccacgcccaccgcccgtgggaagttcagcctcggggctccagccccgcgggaatggcagaacttcgcacgcggaactggtaacctccaggacacctcgaatcagggtgattgtagcgcaggggccttggccaagctaaaactttggaaactttagatcccagacaggtggctttcttgcagtgcctgccccagagccttttccttggttgtgtggcctgcttcgatctctcttcccacagatctcatcgtctttaggtctcttctcaaaggccacctcctccggcaggccttccctgattgcccccttctaaatggcacccttccaccaaaacattacatactcctcttgattttgttcacaaaacttttcagggcctaaaattaccttatttatttattgagagggagtctcgctccgtcacccaggctggagtgcagtagcgcgatctcggctcactgcaacctccacctcccaagttcaagcgattctcccatctcagtctcccgagtagctgcgactacaagtgtctgccaccacgcccggctactttttatatttctagtagagacggggtttcgccatgtcggccaggctggtctcaaactcctgacctcaagtgatcctcccgcctcggcctcccaaagttctgggattacaggagtgagccaccgcccccggcccctaaagttattttatataacatatatcacatcattatgttatgttatatattatgttattggcaagggaatgtgatatctaagaattgggctcagggttcaaatttgattccggcacttacttgctgtgcaggccttgggcaagtaacttaacctctctgtgcctcagtttccctagtcaataaaatataaatagtctaaggctttgagaattgaatgttaactaatacagggacagtacttttttttttttttttttttttttgagacacagtctcgctgtgttacccaggctggagtacaatggcgctatcttatcttggctcactgcaactcctgggttcaagtcattctcctgtctcagcctcccgagtagctgggattacaggcgcccgccaccatgcccagctaatttttccatttttagtagagacggggtttccccatgttagccaggctgatctcgaactcctgaccttaggtgatctgcccacctcgacctcccaaagtgctggaattacaggcgtgagccaccgcgcctggccaggacagtacttttatcagggcctcgcaaatagaaagtacttagtaaatactcgctactgactgtatattatgggttcactttttctcctctactatataagctctgagggcagggctgtatattgtcagcactgttatcttcagcaagagcttgatgcaaagtcggtgctcaataaattgtgactgaatgaaggaatcaagtcctagaatagtaagctggccaaagctgggaggacacgattctaatataacttgaggacggcgcagtggctcacacctgtaatcccagcactttgggaggccgagggggctggatcacttgaggtcaggagttcgagaccagcctggccaacatggtgaaaccctatctctactaaaaatacaaaattagccgggtgtggtagcgcacgcctgtaatcccagctacttgggaggctgaggcaggcgaatcgcttgaaccccagaggcagaggttgcagtgagccgagatcacaccattacactcctgcctgggcaacaagagcgaaactccatctcaaaaataaataaatgcatacatacatacatggctcaatgcgcgcggtaccccggtcactacactatgaaatgcttccagcagagggcgctgctggtccgtggaccaaactccagactcggcacagctccgcgctccctccgaattgcagccaacgtgccctctacttccctgttgtctga

SEQ ID NO: 1560564 - DNA, 4001 bp, Homo sapiens
cactcactctcagaggccagccaagtccaagtcccgccctctgcaacccttcttcccctgtaactacagcgggcgccgcgccctttctcatgtccggggccccgccccctcacctgtgtgcgtgcgcagatgcgccttcaggtgggagctcttggtgtagctcttgccgcaacccgggtgcgcgcacgtgtgcgctgcctgcctcttgcgcgcccacgaacgtcggcctcgcttggatggcgcggtctcggctatcacacctggatcctctgcagtccccccgagtccagtgcccaccgtcccgggtcccaaacaactcaggaaggagggggacgtggcgggaccgggcgcgggtccctggagcccgcggaagagctggaagtgcccttggtactgaggcgccgggtacatcgcggggtacccggacagtagcccgtagggggcgcccgacgccgcaggcactgaaagcccggtccgcgggaagtagccacccgaggagccggcgccgggccccgggtacaccggttgcagcgccagcgccttgggctcgggggccggggctggagccagggctgggcccacgaaggcgtcgggagcccgggctcgcagggcagggcgcacccaacccgagtgatcctccgaacccaaaagcccagccaccagccccgggccgccagcatatgcgcccagagtctcgggcggcggcggatattgcgccccggaggcctcgctgggcgccagagcgcaggtctggggcgcgccaccgggctccgggcccgagaagttggtgaggaggagatccaggtcccaggtggcgtccgcgcccctctcatcgtcctcttcctccccgggctggtcctcagacttcacgtggaggggcggctccgtggggtcaggaggacccgggcccatgtcctgcgcctcttcggagcgccaccactgcgggagggagcaggcagctcgaggttcggtggacactggggtgccctgcccagggacatcgcgggctggacactctgacgcagaggctttggaaaggggtcttgtttgcctgtctgtctgtcccacttccccaacactgcccctctaaccgcccctctccccgctccccccccagctccagggacagaaaccgatcaggtctggctggagacaggagataagacttccactatctggaaccacactcggggatgggggaaggggtagcagagctgctggagatggaaaactggcaggggacgggggagaggatgccagccttgacttagttttcccccagaacatccctctccttccctgtctcccaaaacaagattaattccgaaattttggatgtcccccagacacactcatcatttcccgctgatatctggaagattgtctgtgagcctagatctcgttcctttttttttttttttttcttgagatagggtcttactcttttgcccaggctggagtgcagtggtgcagctcactgtatccttaatctcctgggctctaatgatcctcctgcatcagcctacggagtacctgggactacaggcacacgcccccatgcctggcctaatgtttttggtattttttgtagagatagggtttcaccatgttgcccaggctaccttcgttttctattaccgaaatagatcacacttagaacctcaaacccctagaccaccctcctcaccccctgccagactaagctgagatctcctctcctggactgagcgtacctcagtcctggttaagtctcttgatttcaggtcaagatgcaggtctggaccccaagatctgtgactgtggccctggattccagccagcccacctagaccccaccttctaggccccaccttgaggaagtcatcctgtgtgtccgggaaggggcccagggcggtcagtgtgctgatggagggcaaggcggtctcggctgtggccatggctggctggtgcccaccctgggcctcaagcctcctcttcctcggctgcctcgtgaactctgaggctgtgatagccccttcgagggctcctctctgtccttagctgattggctgcagcctctgataaggcaaagcaaggcaaggcggcgggggggcactgtttctggggcacaaacttcacgttggcctgtctggggctggggttaaagactaaccctgtgtccaaagccaagtcaaatatcaagggttggggggttcagggtttgagggtccaggtgctgggtaaaaacagacattgggtctccaaagaaggagagacttgggggtcttccctcagttaactttcctggaaaaggcagaaagggtattctgggaagaagctgtgggaccccctgtccccctgattgaggctccacagccctccccctccccagtaaacagcaacaaccgtgctgatggcgggacttggcacgagctccccgccaagcattatcagacaccccagacgttggaggctgctatcaggtgggggcccaggccagctagagctctgtcctccggtgaaggggagggctgggagttgggtcttcaaattagcctggcgttcaatttgcctgggttgggacctcccagggtctcagccctgcagcaggaggaagcccctgacaactggcccaccattgtctactggggacccttgggtggcactgcatgggactgcatggaggctggttcagtgccagctgctttagtgcgatgggggcagccaagggaaaagtgaccctctctcctcctgggtgggataggaccgttggatcaagccacaggcagtacctgacctgcaggagaccagtgccctggctctgggcctggctgctccttgattctgcccaacatgaggagaggatctgagtttctacaacaggaacctccactctggtgccctgggagcctgggaaggggacatggatacgtattacagacacataactcatagtcactcattggaagactgaggcaggaggatcacttgacaccaggatttcaagaccagcctgggcaacataaaacctatctctccaacaaaaagctgtgagtggtggtgcatgcccatagtcccagctactcaggaggctgaggtgggaggattgcctgagcccaggaggtcgggactgcactgaactataatcacaccactgcagtccagcctggggcacagaaagcaagactctgtcgctggaaaaaaaaaaaagttgggtggccatctttattcctggcagatcaacctgggtgacacaaacaaaaacaaggccaggtgcggtggttcacacctgtaaccccagcactttgggaagccaaggtggggagatcacttgaggtcaggagttcgagaccagactggccaacaggatgaagccctctctctgctaaaaatacaaaaattagctgggcattgtggcacatgcttgtaatcccagctatttgggaggctgagctggagaactggttgaaacttggaggcatggggccaggcgcagtagctcacgctagtaatcccagcactttgggaggccgaggcaggcagatcacctgaggccaggagttcgagacaaacctggccaacacagtgaaaccctgtctactaaaaatataaaaataggccggggatggtggcatacacctctaatcccaggtacccgggaggctgaggcacaagaatcacttgagcctgggaggcagaggttgcagtgagccaagatcatgccactgcactccagcctgggctacagagtgagattctgtctctaaaaaacaaaaacaaaacaggcttggagcagtgagtagtggctcatgcctgcagtcccagcactttgggaggccaaggtaggaggaatgctcgagcccaggagttcaagaccagcttgggcaacatagcgagatcccatctctaaaaacaaaaacaaaaacacagttactcacaggaccatgcaattacataatgacatgagttcctgttccctcagtcacactgatcatataatccgtgcacatataattgtgtgt

SEQ ID NO: 1560565 - DNA, 4001 bp, Homo sapiens
tcctcgcagaaaacgcagaccccacccaagtcctgtcttgacgccctcggttcccgtctgtgtctcaaggtgggcagagcctccaggcccctgggaccaggacagggactgagcgaggggtgaaaagagtgcagaacagagagggggcggccggcaggctacacaccaccgcccccacccgccctcctgctctccaccctcaggcgtcccagcgcggctccccataccccaaagatggaccctcaattcttccgcaaggcattcgcggcccctgctcatctcagccccaccactctggacggcccacttcccttcggctgctccacgtgtccctacaatccgagcccacggaccaagcctccttggagtgtccagctgcccaaagcggccaccgctatggctatgaaatagaggcagcatcgcactcttgatagaaatgagaaaattgagacccagatcgggtagaggtcttctgtttggtggcaaggccagaatgccaagcccaagggcagccgcacagctttcccccagccccccaccctccccggaagggacaagcacctctaatgcccaaaccagggccggccatcaaggcccaccgtcccctgttgcccagtccaaactcccagtccagaaagtggaaccctaggaggggacggagtgaaaaaatacagccaggcccaccaggctcccggttcccctcgccgccccggggactgcgctaggaggggcgttggtgtagccgaagcgctccaactacgcgcaccttcccgaatcgcccgccaggtaggggtgaacaaacacgccagggaaatacagcagtgtggacccgagcccctcgagggtcctccaatactatgaagttcccccgcccagactcaggccccaacccgcgctcctagcctcgccctccccctcgttaaaatacagagaacgcagagaaaacgtgccgggctccccccatcctggccccacgccaggtgctctgccgacctctggggagaatccgcgcggccaccccggcggcggcgacgcggttcctcctccattttcacagataaggaaactgaggctgggggagggggagaacccagaaccccagagccggatgctccaaccacggtgcccaccgcccagaccagaacgcaaaagaaaaaaaaaaaaacggaacaaggcccagaaagggagagaggtggtctgcccaggagtctcaatcccgcccgcagacctcgctgggcccccggagcccccgccactgccgccggggcggccatccgctcgccgcccgaccgcgtggccgccacgccccccgcgcgcgccccacccaccgaggccccgccctgccggccggcgcggcggcggcccgggcgcgcccccctccccgccccccacgcgccacgcagtttcggggtcctggcgggggaggggtctcaggcggccgcccccgcaagggccgggatcgcggctgcactcacctgtgtgcgtccgcaggtgcgactttaggtgcgaggacttgtagtaggctttggcgcagtccgggaagggacagcggtggctcttggcggcggcggagggcgcggcgccgggggcgcggcccgaggacggggacgaggcggctgaggaggaggaggcgggcgaggcgccccccggggcggctccgggtccgccgcgcaggtcggccaggatgctggcggccagcaggtggggcgccgcggcggcgccggggcccgggccagaagcggcggggggcggcgggggtggccccggggtcccgggtgaggcggcctcgcggcgcgccgcgcgcacatccaggccggcggcggggcccgcgccctcggggccgggccgcccgcggtgcaccacggcgcccgaagagatggccatgagcacgtcggcggcgaagtaatccacgcacgccacggccgccgacatgccgagcaagggcgcgcggcgcggcgggcggagcggaggcggcgggagcggcgtccgtccggccggcggcggctgctcgagtgcgggaggcggaggaggaggaggaggaggcccggcgcgcgccgccgccgacgcccgcgctcggcctgccccgccccgcctgacgcgtcctgacgcaccggagcccgcgggggcggccacagcccgccccgcccggaggacgccccctcggggcgccgcagccacgccccccgcccggcgcgccctccaccactctccgagccgcgcgcggccgccgggggcggggctcgggccggaggaacccgccccccggcgcgcccactccggcctccgccagcgcctagcgtcttaggcccggagcgcgccttctccgcgctagggtgcaaggccgggagccccgccccctcccggcgcgccccactccagcgcgcgcccccgtaccctttcccggagcaccaccccctcaagccggggcgggaggccgaggaccccgccccctctccggcacgcccctccttccgagagcgcgccccgccccatcccggcacgcccctccctcccagagcgcgccccgcctcctcgctggcgcgcccaccccacgccggggcgcgcggccggcgggagcccgccccctccccggatgcttccctcctggccccgggcgcgcccccgttcgcgatggaggagggctccgatccccacgtggccggggttggaggggtgcggaagcggccggccccgcccccaggccacgtgcgcgacccttcccccctcttctcccggcctggggccctgctttgaccccgcactcaggcatctgctcgtcctcttctctggggttccccctcgccgctcacagagcccctcggagcctcccggccgagacacccggtatcccgcgcccgcggcggggcccgggagggtggggcaaggctgcgttcgttcctctttttgcacccagttccggagctactagagcgcgccccactgggggtggggagggccggttgggtcccagagggtcgggatagggggacgggaagagggggccgaacgcaaagggctgggctgggctgggggcgcctgagcgggtcagaggttccccgccctgctgggacaccggggtccggggcttctctttccattcccaggcatcgattcttggggttcggacgggaaaactgaggccaggtattcgggcctcccggccgcgaggacgtccaggccaacttgttaaatattaggggggacaccagggacgcggatggcccagttcgcaggcccaaggcggcgggggcacagaaactgggcggcccccctcggtcgcgaccgcgctcccgccccttcccagctccggcggggcggcggggactgcgcagtggccggagctgcctccagggggcggagctgctttggcctgcggcgacctcctgctctgggttgggcatggacagaggccctgacccgattcggggcttctctagccccatcccccgcccacctgcaaccccagctgacgccctgaggctgaccactgttccctgggtcgcccgcactgcgcctgggctcaaccatgcttggttaagccagctgagccctccctgggccccagtaagcccactctacgtggctggacagagcggagccgagagagaggaggttcagcgaagtgtgggagggtacagggtgccctgcacacacttgcccctctcctaggcctgggctccagagccctctctgcacccctaccattcggtgggcgctgggggtcggcgttcctgctcctgctgggcctctgttgtctttgaacttctaggacgatgggccacttgggcaggtcccccaggtccccaccatcccagcagcccccagggtcctggaaccccgcattggcttgtggacaggtgtgtcttgaggcctcagggtccacacccaaccatgcgtcttccactgatgtttcctgggcttagagcagaaccaaccagccctgccctcaaggggcttacagttgtaactgggaggctaacgatggggggcaggggtgagca

SEQ ID NO: 1560566 - DNA, 4001 bp, Homo sapiens
gagagtaagcgtcagttcccctcccaggacagggcacgtatggctaccccggcgagcgcaacctatccctaaccagggccttgacgcgctccccgcggtagtgttgcgcccctgagggatccttgccctacatccccaactccccccacaatccggatcctcacccccagggggtcggaggagcgcaaggtccactccccactgttgtcagccacgctccccgacgggtcctaagcatgcaccctctctccagcattctaagacacggaatctctcaaggtttcccagcgaacactccctccccaaggtcctgagccttgtccccagaggagtcccaagcctgagcgccctccccaacttcctgagacgcagcatctccccggggttcctaaacgcgcacctactccccaactacctgagcctcagccccggggattctgagccaagtgcccagcggctcctaaacctgctccccctccccaactttctgagactgtctccctagccacgcctccaggaggttttctaagtgctcttcccaacctccggaggcccccctcgtcctaagcgtgcaagcccccaccccaacctctcggatcacacttccttagggagtgttcctgtgtgcccccccaaccaacctcccgagccacgcctcctggggagtcctaagcgtgcaccacctgccagatccccctgagccacgccccaagggaggtcctaaattcattttctggcgcgcgctgggaatccgacctctcctcccgcgtccccccgcctgcgctcctggctcgtgcgtgccgcccacctgtgtgcgtgcgcagatgcgccttcagatgcgaactcttggtgtaggtcttgccgcagcccgcgtagctgcaggtgtgagtggcggtgcgtttgcggggccaagagcggcggccgcgctttggcttggcctccagcagctccagcggggacgcaggcggcgtgaggagaccgcgggcggcggggggcgccaggcccagggctgccgcggcggcggccgcgtcgtcgaagagaccgaaggctgggggcgcaggcggcgcgtaatgcaggccgggcccgggcgcgccgaaaccagggccaccgaaaggcggcgggaaggaggcgcgcggaccgggcgcgggcaggcgcgcggggccgtcggggctgagcggcggtgtgtcgggcggcggcggggggcggcccccgggacctcgcatgcacgaagccgccgggcccggggcgccctcgcgcttgaggccgcgcggtccacgggtcagcccgggggcgcagccgtagccgccgccgccgtccgcttcagggggctcggccttgaccaggcggccgggcggcgccagcagaaagcggccgtgcagtgcgggccccagcggcgcatccagctcgggtcgcagcagctcagacaccaggccacccgcgggggcgctgtagggcgggggcgcgccgggttcggggtaatagaacgcaggcggcgggggcggcggcggcggctccggggcggcctcggcgcccaggccatccagccccatggacaggatgaagtccagcacgctgttgaggtcgtcgtcggtgccgccggactcgggttcggcgcgcggccagcgctgcgggcgacagggcaatgggcgtgagcgggcggcggggctcggggggcgctgcttgccttttaccaccctaagtccgcgatccccgtggcccgcatcctcctctcctgagtctgcagtccccgccttcgcgtcctgtcaccccgcagcccacgttctactaccccgagcccgccgcccacggtcccggccgccccgccgtccccgccgccctcacctcctgcaggccgcgctcgcggcacgggctggcgaaagtggagaaggacggcaggatgggttcactcagcgccatggccgggacccggggagaaaggacgcggacggggacaccggtgagtggctgcccgaggccgggctggtcggggcgcgggcgggcggggacggctctgtgggccgcggccgggcccgcccaagccttataggcgcggcgcgcgcgggggccgggccaaagcggcggcggcggaaacgcgtcccggatggggacgagctccgggcgcagcctaaatttagccgcggtatataagccggcgggcggcagcggccgtggccactgcggcggcctgggccttgcgctgacagcccggcccctcgcgcgccgccagggccgcgcctccccctctcccgggccccgcccccgcccgtctccccggcgacgttgtcaacacgcgctccacaacagcggcgtgacgctcagggatcccccgggcgccccgggctcccgcctgcgcgagcatcccggggacctggagcgggggcggtgtcggggcctctcagagactctcaggggagcaccgggcttggcggtctccccggatcccttgacggaaggggagattggctccagcctcagagagggctgcagaaccctggatggatgggaagtctggagtctccaggattcatggatgggtgaggctgggcccctcatctgttgtgggaccacccagagggacccaccgtgtgcacatcaccctgtaaaaaaaaacaccttgtgtagacctggtgcagtgggtcacatctgtaatcccaccgctttgggaggctgagacaggaggatcactcgaggccaggagttcaagaccagcctgggcaacacagtggcccccatctcttaaaaaataaaaaaaattagctgggtgtagtgggaggctgaggtgggaggatcgcttgagcccaggaggtcgaggctgcagtgagatacaatcacaccactacactccagcctgggtgacagaggagactgtctcaaaaaaacaaacaaaacaaaacttttgtgtggtaacatcaagacacattaaatctttgacatttgagacacccaccccctcctccccaacctcaataagcccgtcaagtgcagggaaactgaggcagaggtggctgggagaagttggagttgcggcaggcacaggcaggctgggttcctttactgacttccataaatgaattaagtaactcagaggacggtgatgacagtcattcccccaatacagctccagcatcgggggcatcagaggacaatgctgcccaatgggtcccttcaatgctccacctctgtcccccacaccatatccctgctggccagggactgtcactcctgttacaactgtctgccagccctgggtaggcactggggacacagtaaccaagagatagacaagatccctgccctaggggacctccactttagtgaaggagggaaggatagaggtttattcatttgagtttttttgagacagggtctccctctgttgcccagtctggagtgtagtagtgcaatcacagctcactgcagcctcgaactcctgcgctcaagagatcctcctgccttagcctcccaagtagctgggattacaaggtgcacaccaccatgcctggctaaatttttttttttgtatttttttgtagagacggggtctcactatgttgcccaggctggtcttgaagtcctgggctcaggcgatccacccgcctcggcctcccaaagtgctgggattacaggtgtgagccattgcgcctggccttactgataggggtttaaaaagaaaaatggagcagtagaagggactagaaagtgagtgtgagatgagggagtgggaaggagaaaatggggaaattctgaatctcacccagggggtgaaatgtgagctaatgtgaaaaagtcattggggaccatgtgggtatgggaggaagagcatcccaaggaggaacttggagccaggtggtgagggatgcaggcagctcctgccctggaagcttggactctcagcctctgcagaaatgcactctgcagggtcccctctgcagcccccaccaaacccagtcaccggagacttcaagttgaatacaaacttgctttctgcagttgccactgaa

SEQ ID NO: 1560567 - DNA, 4001 bp, Homo sapiens
gataaagctgtttataaaaaaagagccatgcccagcatggtggctcacatctgtaatctcagcacttagtgaggggtgaggcaagaagattgcttgagcccaagagtttgagaccagcctggcaacagagcaagacctggtctttacaaaaaatttaaaaattagccaagtgtggtggtgcacacctgtagtcccagctactcaggaggctgaggtgggaggatcacttgagtccaggagtttgaggctgcggtgagccttggtggcgtcactgcactccagcctagatacctgggtgacagagcgagacggggtttcaaaaaaataaaaataaaaaaagccctagccccaggttatcccactccagtgcccaaggcagggacctggggttcactgtccctcttccctgtcccttacttgccaactgatacccaattttcaagccctggccactccctgaatatctctgaaaatcctctgacatctcctggctccctactgcaggacaatcttgccccacacctaccccaggaggctggtcacccctctggacacacacctcctgggttccccatggcccctctggcagaccagattcaatgcccacagacctaagtctcaaggtgccactcagcatcctcaggaacaggcagggcctttgcctcctctgtgccctggcccagccatccctcctcccttccccacccatcccatgcgtgttccattcagtaccaaatcacacagccaggccatcaggccattccctccaacaatcagcccacaggtccaaaactccacagcacgtaagtatcaaacaacttcatcatttatcatgttgcctgaaattactggctcctggaagctcaccagcaagaaaaagcctgaatttcctccttggcctgacctgggtgctgggctagaggaggagctggggtgggagggtctggctttgcccaataggaaaagagcaggagatcacactcctaaggcaggtgttctttccctctgacaatccaatacaatgcatgcacacacatatcattagttattgatgataactaattgtcatgcaaacctggacgttcaagcaatccatgtcaggactgggccatggggaaagggggcctccctctgaccaaaggggtgaattctgtccccttgtctgagggcaagacctttctgtaagtcctttagcctgttggggatgtggatttggaccccatggggatggaagggaggagccccaaagaagaaccctctgtatgttctttataaaccccctggagttctctcacccccctcaggttccctagacccaccccaggccccctcagcctccccatctcagactcccagattcacctaagtcccccacccagagcctcccacagtctctactccttccagcgcccctcagcacgctctcaggaccacctttagccaccttggggcccttcagcacctcccaggatgccttgggccttagccccttcctcagagcccccaagacacctcaccaccctcagactggccatggcatggcccctgctcaggccctctctgctgcccaggccctttggcatccccagttgccccacggcccaccacagtcaagagcccctcggtttcccttcagacccccaggattctcaggtccctagggccgcctgcagacgcctcgaggtcctggggcacccagcccccctccagccaccccctcagtagccctcggctcctccagtaccccacggccccgtaaagtccaaattctcagcgaaagaccctcgagccgtgccaggcctcccctcaacccctcaggacgcccaagactgcccacaggtttcctgggctccaagacaggtgcaggtctatcctgcgggccgggtctcacctgttcgggcgctcggggcccgggcccgcgccgaaagcgccgccgccaccagcaccaccgctgctaccgccggactccgccatcttccccccgccgtcgcgcgttcgagtgacgggagccgcgcgcgcaggcccgggaaaccgagacgcggggggcggggcggggccaggtctgcggaggggcggggccgggaccagaaaccaaggattggggcgggcccggaatcggaggggcgtggtctacggagggccggggcgggtctgggataaagggaggggcctgctatgcagagaggtgggtccagggcggggcctgggctaggggtgccggattggggcgggaccctggcgtgaggggcggaaccaagtctgaaagggaagcggttctgggctgagagggcgtattgtctgtggataggtggggacggggcgaagcaggacaagtaggcgcaggatggggttggtccctgggctgaggagtggggcggggtctgaagaaggggcaggcccagggcaagaggaggagggacaagggtccggcctgcggaggaggcggggcgcaggataaagggcggggccaggtgtgagaagggacaaggtggaggttaggaatgcggtgggggagtggtcggggaggtagaaaggagaagatgggtctgaggttgggcgggtctgggcaggagagaggaggaatctggggatggatgtggtcaagcgaagagagggcctggtctgaggaagggcggggcctgggcgaggggtggagtctggttggaaggagggcggggaagatcaggggtgtgtgcgtggagggggcgagggattggcggggccgggggggcggagcctcatctgatgggggtggggccgggctaagtgagcggcggatctgaggaggggcggggcacgtgcaggtgttaaggagtgtctgtgagtgccctggggcgctggcaggcgtgccccgggcgttggctgggcgtggttatactttgaggcgttggagccacagggaagtgagttataggtagggtgggagggagggtgagatggagcatggagaaatgggtctctaagctctgagaaccacaccctccctctccccaccctgcacaccccgactccagtcttacctccttcccaggcctctctcaggggcgaaactcacccatgcccaggcctcagacttccagcccctcatggttccccaccctcccctgacataccctcttcagagcctccaccctgagaccccaatcatctggccttaggttcccaccacctgcttcatacaccaattctggtttctcatactctaaaaccctgcacatccaattatctcccattctctactcaaaactcatctcccactcccccaaatccctgcccacagatccttcaaaccttacactcccaaagtccattccaccggacccaacaccctcagatccccaagcaccagccctcccaacacactgaccctcagccagggctcaaagtcctgcatctataggcgtctatgaagcatctagaccttttgggggcacccctcaccccccatctctggtaagctccaggctcccaggatcccctctgtagcttggagctcatttattcttttaacctccaagtcagaaaactctgacttgtgcagtcttgggcagaaagcagtgatccagaaggagctcaaagccttctttcccgtcagtgctggaagaaggaggtggctatggggctggagaccccataggaggaaggaaggggcctgcttgagtggactcctgcaggttggaccgcactcaaccagcatctccaacagagggcctgatacaacaatacgtgctcaatcgttacacaaaatgctctcagatgaccctgtgcaagctgacagataccaagtgctgaagggaactgctggcatctccaatacacagtaagcactctgcaaatgttgaatgcacgcgtgcatgaacagctcacgttccggcaagctctgcacacacacacacacacccttgcctgccctaagtcagcaccgccccaggagtctttgttccagacgaaccacatgcaggcatcaaacctcactcagcagcgacctacagctgacacac

SEQ ID NO: 1560568 - DNA, 4001 bp, Homo sapiens
ggtacagagccgcctgccagggctgggaatgctgctcacactcccagcctcccacaatccgggactgaatcgggggcgcagcacctgcagaggcggtgctgggtcaggaagggcagggttggcaggagaggccagggacaaggctaggagagggagctgggctgtgggtctgaagggacattgcgggtagaggaccagggctggaggttggggacatgggcaaggggtgttgggaaggggtgggactctggactgttccctgggcttttggagtggtggctggacctggtggggagattttgtgctctgacagtagagcagcctccagggatcagggtaggagacaggagacagtgtctggagcagacactgcatctgggcgtcaggtcatttggggtctggggctgggggatgggaggtggtgggttaggggagtggaaagggattctggaaaccagggatcaaggcgccaagggtgggacaggatcagaggctcactgaggaagaatctggagggctaaggggctcctaggctagggaaacaggacctgggttgggcttttgaggttcaggaaaggatgcagctttagggaaccaggtctgagaggtaaagaagagcatctggactgaagagtttgggggtgacttggggtccctacattggggttggaaggggccagcttggctgggacagttagatttcagggcttcctggttaaagggtaaaagaaagggctatggttaaggctagaggtgggcttccgagaggttttggggtccttcctgtgaaccaggaatggcaatctgaggggaggttggggccctgagaacacagttgcggtcaggactgggacggggctcaggaggagggaggcgtgagtggcagtccttctcggacagggtgaaggatgggatcttcgtttctcatggggatggggttcatggtctgagggtactggaaggatatggggtcctcttggaggcaatcctaggaagaggattggagaagtggtgagaacaggcgccaagcagctgtgggaatgcaatgcaggacccacttgacgtgaggttgtagaatcacatactgacttgggggaggccagggcagaagcgctggctgagaaggcattcaggatccttggggtggggttccagaaaaccagagctgtgtaggaacaattcaggcagagaagggctggggcctggggcgggatggaacttccccaaggaaaggagcatgtggtgggagggtgtggtgtttttcctgggagagctgggggtgctgggtgggaagggacatttgcagacccccccccataccagatgggggatcccacatgccagtttgggaagcagggttttctggtgaaatttgggggaccctggaaggactggggagaccagatgtcagggtctggaggacacagttgagagcggacagctggatggaaaaagtcactggagtgtggtgggatttgtagactcaggagccaaataggtggccgcagggaactagggggcaggaggggatgatcagagtcctgtggggtgggggaagcccatgggagggttggggtcctccagagagagacagagatggcccagaatctgcccctttggtaaagcggtgggacagggcgttggctagggaagaggagaaagtactgaggcttcctgggaggagcaggaatctggtgtgggagtgagcactatgacaacatggaggagcgggggtggaagtttagggtggggccgcgcaagatagataagagccggggcaccccggactaggatagactgtgggccagagggatgagggtggggtgttggaggggaaggtcttatcggggggggatgtgaggccagcaagagaatcagggcccgttccccctcccacatccccccactgtctcaccagtcccccccagggacagggcgaggcacagaaccaggaaccacatggtgacagaggtgtccaggggccagcaggtggaggaactggggaacctccctggggaggcttttaaaagcccttatcccctcagagccccacccctgccctgctggcacccagatgttggccaaggcccttcccctgttgcctgggggctggacaattgccccccccccctccgatccccagagctgtagacggggagggagaaccagcacctgttctgcaggccctggatcacgctggacgcattcctggggttgaagccaggtggggcagggcctgtggctctggggctttgctctggggagcagccagtgaggcaaggggggactgaggggaagcagaaacaggaagacggaggaatcagtgacccctggtacaaagccccatatacctcagtctcaattaaggccctgcacccccagacctggtgccctcaaacaccagcagttagggctctgattccctgcaccactcggagccaagatactagcatctcagctgccagttccccctgaaatataagccttggccttcagaatgccctggttcttgcactcccagacccaggacctaggtccccaaagctactgttcctttcataataaaattttggggtacacatcaccacattcctagtgcctccagatccaggaatgtgaagtttcaggggtctcccagggtaagttctttagcattacaaaatccagtgtccctcccaaacaatgctggggtctcaatgagcctcccacttcttgctcccagttatgggtgctcaacgtcctgtcctccaaagtcccagagatctggacaaccttccctcccaggtcaagatcaggctaaccacagattccaatgacccttcccccccaccaccagtacaatatttaggtctcacgagccaggttcatgtacttcaacattcagcgaccttgaacatcacattttgtggtctctgaagataattaggaactagattcctgcagcctcaatggtaaacccataggcttccaacaggttgtcttggctttttggtaaaatcaaagcagctcagagttccagcctctgctgtatatcagggacctggctaaggaaaggacagtatttgcctttttgccatggctaccaggaagcccagaactaaatctttttttttttttttttttttctgagatggagtcttgctctgtcaccaggctggagtgcagtggcgcgatctcggctcactgcaactcctgcctcctaagttcaagcgatcctcccacatcaccctcccaagtagctaggattacagtcgtgtgccaccacgcccggctaaatttttttagtatttttagtagagatggggtttcaccatgttggccaggctggtcttgcactcctgacctcaagtgagccgcccgccttggcctcccaaagtgctgggattacaggtgtgagccaccatgcccggcccagaactaaaccttaaagaaaaagccattcttggtaatctagtgtctgttaggtcctttaactgggatccagagatagagggtatttactcagtgccagacacgattttaatcagttcagacgaatcatctcatttaatcctcacaacagccctttgaagtcagcaataagatggtctcattttacagataaggaaaccaaggcgaagtgagattgggcctcttgttcaagatcacacgggtggtcatgtgtgttgaatgaatggagccctgcttcaagccgcttctcctcacctagggatcggggtggtgggtgaaaaggaacagtgtacagtgtctcggggtttctctttgaccccagaaaaaagtcacagaaattcctacagagcaacttggatcagcgctttgttatcttggcattaaacaggtgaccttgagcgccagctttgtcctcaggtgggacaagtccttggctaacatctgggccttggacagggtcttgggggatggctccgttctgttccatgtcaggcggggctgctggccagctgtgggggcttctgctcagtcaggggcacaggagataggct

SEQ ID NO: 1560569 - DNA, 4001 bp, Homo sapiens
aaaaaaaaaaagaaggaaagaaaaagagagagaaagaaaaaaacaagaaagaaagaagaaaaaataagagagaaagtaaaacaagaaagaagaaacaaacgaaaggaaggaaggaaaggaaggaaggaaaagaagaacgaaagaaagaaaagaaagaaagaaaaagaaaaaagagagagaaagggaaagaggaagaaaaaaagtgaggggagagggcaaaaagcggtaaggcaagactcaggataaaacacggtggtgtggccgggagcggtggctcacgcttgtaatcccagcactttgggaggccgaggcaggcggatcacgaggccaggagatcgagaccacggtgaaatcccatctctactaaaaatacaaaaaactagccgggcttggtggcgggcgcctgtagtcccagctactcgggaggctgaggcaggagaatggtgtgaacccgggaggcggagcttgcagtgagccgagatcgcgtcactgcactccagcctgggcgacagagcgagactccgtctcaaacaaacaaacaaacaaaacaaaacacggtagtgtaaaatggagcggggccgggatggggcggcgtaagaggaggagaaagaacgcggcgaagagtccacggaagagcgaggatccgggtggcagaaatcggacagggcctgagtggggcgggtcacccaggggccgagccagaagaagggcccagctgacttgggggcgggccgtgctccggagcgctgggtgggtgctggggtctcgggggaggagaggtgcgcggggcttggtgacgggaacacattctcctcccgcccgtgcctcccaccggcgcctctccccgccccctgcccccgaccttaccccagagttgcgccatcagcagcggcagcagcttcgccagagcccgggcgccagaggcggcggagaggtggaggtgcggagctctcatggccaggatctgctggggtgtgtgcaggggcgggttaaaacagatgctccgttagagacccccacctcgccgcgctcatccgcccagcctgggccaccccagcccgcaagcacccttttgacctgcagccgataaccccaggggctggcagacgggagattcgggctggaacagcggtaatgggcacaattaccctaatgacgcccctcgcggcatcttcccgtcctccctgtgcccgagtggagcgctctccgcgccccagctaccctggctgcagccacgccgcgcccgaggtttccccctccttcacgcgcggggtggggatccgaggctcggagccagtgggagcctctttctcaacctcacagcggggggacttccgcgtcccgcaggtggagaaaccgaggctctaagccggctcctgcctgtggcccgggggtccccacccatcctctcgcaatccaccccaacccgggtggggtgcaggtagcttcacctgggagtcgccgataggaaggagggaggggacccagacgtgcctctgccctgcctgtggtctgccgctggtatcctctgcccagggacccctggcgggaccttcccttttaaccccaaggagtccggaagcttctccaccctcccctacccccacccccgggctccctccctttccctctgtctaattgtaccgtgggtgaggctggcactcctgggtcccagattcctgctctgggaggggccctggaatacaggcttctcccagtgcccgaaacgcccccttttcatcccttttggaactggcttccgtggggattctccgggtcccggtgccaagaaggcttcccaggcgcggggagagggttcacgtccccagcaaggctaggggtggcaggatgagaggccactgagcaagaggaaatcaatgggaagtgcatacctagagtgacaatgtgagaagccagactgtggaagaggaaggaggaaggcctagagataaagcaggttgagtaggagggacagaggctggcttgaaaagggagattgtaacaaaccaaggctaaaagagccagagagagagagagagagagagagagagagagagagagggagggagggaggcgccgaggctaagagaaacagaaacaaggaaaaagggaaacccacgcccactctgtggccgtgagtgagctctgtgtgtgtcccagtgactagcccatgtgcgtgttggggggggctgtggctctgcctcatacccatgtgtggccatctcacaccctccctgccatctgtgtgccaccaggtgacacacaggcccctgaatcataggaggtcaaagctgtgaggggcatcggcatcacctcagccaactccctcatctcaggtgaggagtgagaggctcagagagggcagagactcacaggaggtcacacagcaagtccacttgacaaccagaaggccctggttccactctgggctcctattgctcatgccagccacttctgcgaggtgaacagaccatcccaaaagatcctgagctggccgggcgcggtggctcacgcctgtaatcccagcactttgggaggccaagggggggcggatcacgaggtcaggagttcgagaccagcctggccaacatagtgaaaccccatctctactaaaaagacacaaaaattagctggggatgttggcacaggcctgtagtcccagctactagggaggctgaggcaggagaattgcttgaacctgggaggcagaagttgcagtgagccgagatcacgccactgcactccagcctgggtgacagagcaagactctgtcgcaaagaaaaaaaaaaaaaaagatcctgagttctggattctctccgtgggacatcctcttcagaggccatctaactcagtgctgctcagctgaactttctgcagtgatgttttatatgcactagctaatccagccaccaccagtcacatgtggctatccagccttggagatataacaagtgagacagaggagttacatttctggctttatgtaattttaattggaagagccagctgcggttagtggctaccatattggccagcagaggtctccactatctaattacctatcatggaagttggagaaaaacaataagctcctttggttaggtcttagtatgtgcaggctaactgacttctttacttactgtgttatacttttgcatgcagcattttacaggaaaggaaacaaacagagccttactccaggaacatcacttggtaattaagagatcgccttgcttcagatccttgctctcctagccacgtgactgtgagcaagtgactttgcttctctgtgtctgtttcttcaactataaaataggtatgaaaacagtaccgacctcacagggttttgtgaggattaagttgatacatttgaaagtgcttggaggccaggcacagcgactcatgcctgtaatctcaccacttttggaggctgaggaggacagactgcttgagcccaggagtttgagactagccggggcaacatactgagacctctgtctctacgaaaaatacaaaaattagctgggcttcgtggcatgtgcctgtagtcccagctactctggaggctgagggaggacaatcacttgaccccaggaaattgagattgccgtgagctgtgattgttactgcactccagcctgggcaacagagcaagactgtctcctaaatagattaattaatttaatttcttttaattaataaatgaaagccgggcgggcgcggtggctcacgtctgtaatcccaggagtttgggaggccaaggagggcagatcatctgaggtcaggagttcgagaccagcctggccaacatggtgaagccccatctctactaaaaaatacaaaaattagccggatgtggtggtaggcacctgtaatcccagctattcaggaggctgaggcaggagaattgcttgaacccaggaggtggaggttgcagtgagcagagatagcaccactgtactccagcctgggtgacagagcgagactctgtcaaaaaataa

SEQ ID NO: 1560570 - DNA, 4001 bp, Homo sapiens
ccggatgtggtggtgcatgcctgtggtaccagctactctggaggctgagtatcgcttgagcccaggaggtcgaggctgcagtgagctctgattgggccactgtactccagccacggagacagagcactgccctgtctcaaaaaaaaaaaaaaaaaaaaaagaaggaaagaaaaagagagagaaagaaaaaaacaagaaagaaagaagaaaaaataagagagaaagtaaaacaagaaagaagaaacaaacgaaaggaaggaaggaaaggaaggaaggaaaagaagaacgaaagaaagaaaagaaagaaagaaaaagaaaaaagagagagaaagggaaagaggaagaaaaaaagtgaggggagagggcaaaaagcggtaaggcaagactcaggataaaacacggtggtgtggccgggagcggtggctcacgcttgtaatcccagcactttgggaggccgaggcaggcggatcacgaggccaggagatcgagaccacggtgaaatcccatctctactaaaaatacaaaaaactagccgggcttggtggcgggcgcctgtagtcccagctactcgggaggctgaggcaggagaatggtgtgaacccgggaggcggagcttgcagtgagccgagatcgcgtcactgcactccagcctgggcgacagagcgagactccgtctcaaacaaacaaacaaacaaaacaaaacacggtagtgtaaaatggagcggggccgggatggggcggcgtaagaggaggagaaagaacgcggcgaagagtccacggaagagcgaggatccgggtggcagaaatcggacagggcctgagtggggcgggtcacccaggggccgagccagaagaagggcccagctgacttgggggcgggccgtgctccggagcgctgggtgggtgctggggtctcgggggaggagaggtgcgcggggcttggtgacgggaacacattctcctcccgcccgtgcctcccaccggcgcctctccccgccccctgcccccgaccttaccccagagttgcgccatcagcagcggcagcagcttcgccagagcccgggcgccagaggcggcggagaggtggaggtgcggagctctcatggccaggatctgctggggtgtgtgcaggggcgggttaaaacagatgctccgttagagacccccacctcgccgcgctcatccgcccagcctgggccaccccagcccgcaagcacccttttgacctgcagccgataaccccaggggctggcagacgggagattcgggctggaacagcggtaatgggcacaattaccctaatgacgcccctcgcggcatcttcccgtcctccctgtgcccgagtggagcgctctccgcgccccagctaccctggctgcagccacgccgcgcccgaggtttccccctccttcacgcgcggggtggggatccgaggctcggagccagtgggagcctctttctcaacctcacagcggggggacttccgcgtcccgcaggtggagaaaccgaggctctaagccggctcctgcctgtggcccgggggtccccacccatcctctcgcaatccaccccaacccgggtggggtgcaggtagcttcacctgggagtcgccgataggaaggagggaggggacccagacgtgcctctgccctgcctgtggtctgccgctggtatcctctgcccagggacccctggcgggaccttcccttttaaccccaaggagtccggaagcttctccaccctcccctacccccacccccgggctccctccctttccctctgtctaattgtaccgtgggtgaggctggcactcctgggtcccagattcctgctctgggaggggccctggaatacaggcttctcccagtgcccgaaacgcccccttttcatcccttttggaactggcttccgtggggattctccgggtcccggtgccaagaaggcttcccaggcgcggggagagggttcacgtccccagcaaggctaggggtggcaggatgagaggccactgagcaagaggaaatcaatgggaagtgcatacctagagtgacaatgtgagaagccagactgtggaagaggaaggaggaaggcctagagataaagcaggttgagtaggagggacagaggctggcttgaaaagggagattgtaacaaaccaaggctaaaagagccagagagagagagagagagagagagagagagagagagagggagggagggaggcgccgaggctaagagaaacagaaacaaggaaaaagggaaacccacgcccactctgtggccgtgagtgagctctgtgtgtgtcccagtgactagcccatgtgcgtgttggggggggctgtggctctgcctcatacccatgtgtggccatctcacaccctccctgccatctgtgtgccaccaggtgacacacaggcccctgaatcataggaggtcaaagctgtgaggggcatcggcatcacctcagccaactccctcatctcaggtgaggagtgagaggctcagagagggcagagactcacaggaggtcacacagcaagtccacttgacaaccagaaggccctggttccactctgggctcctattgctcatgccagccacttctgcgaggtgaacagaccatcccaaaagatcctgagctggccgggcgcggtggctcacgcctgtaatcccagcactttgggaggccaagggggggcggatcacgaggtcaggagttcgagaccagcctggccaacatagtgaaaccccatctctactaaaaagacacaaaaattagctggggatgttggcacaggcctgtagtcccagctactagggaggctgaggcaggagaattgcttgaacctgggaggcagaagttgcagtgagccgagatcacgccactgcactccagcctgggtgacagagcaagactctgtcgcaaagaaaaaaaaaaaaaaagatcctgagttctggattctctccgtgggacatcctcttcagaggccatctaactcagtgctgctcagctgaactttctgcagtgatgttttatatgcactagctaatccagccaccaccagtcacatgtggctatccagccttggagatataacaagtgagacagaggagttacatttctggctttatgtaattttaattggaagagccagctgcggttagtggctaccatattggccagcagaggtctccactatctaattacctatcatggaagttggagaaaaacaataagctcctttggttaggtcttagtatgtgcaggctaactgacttctttacttactgtgttatacttttgcatgcagcattttacaggaaaggaaacaaacagagccttactccaggaacatcacttggtaattaagagatcgccttgcttcagatccttgctctcctagccacgtgactgtgagcaagtgactttgcttctctgtgtctgtttcttcaactataaaataggtatgaaaacagtaccgacctcacagggttttgtgaggattaagttgatacatttgaaagtgcttggaggccaggcacagcgactcatgcctgtaatctcaccacttttggaggctgaggaggacagactgcttgagcccaggagtttgagactagccggggcaacatactgagacctctgtctctacgaaaaatacaaaaattagctgggcttcgtggcatgtgcctgtagtcccagctactctggaggctgagggaggacaatcacttgaccccaggaaattgagattgccgtgagctgtgattgttactgcactccagcctgggcaacagagcaagactgtctcctaaatagattaattaatttaatttcttttaattaataaatgaaagccgggcgggcgcggtggctcacgtctgtaatcccaggagtttgggaggccaaggagggcagatcatctgaggtcaggagttcgagaccagcctggccaacatggtgaagccccatctctactaaaaaatacaaaaattagccg

SEQ ID NO: 1560571 - DNA, 4001 bp, Homo sapiens
aggggtggggcgcagtggtttacgcctgtaatcccagcactttgggaagccgaggcggttggaccgcttgagctcgggaattcaagaccagcccgggcaacacagcaagacccagtctctacaaaaacaaacaaacaacaacaacaacaacaaaaaagtagtcgcggaggcatgcgcctgtagtcacagctacctgggaggctgaggtgggaggatcgcttgagcccaggaggtggaggttgcaatgagccgagattgggccactgcactccagtctgggcgacagagtgagaccctgtctcaaaaaaaaaaaaaaaaaaaaaaaaagccggatgtggtggtgcatgcctgtggtaccagctactctggaggctgagtatcgcttgagcccaggaggtcgaggctgcagtgagctctgattgggccactgtactccagccacggagacagagcactgccctgtctcaaaaaaaaaaaaaaaaaaaaaagaaggaaagaaaaagagagagaaagaaaaaaacaagaaagaaagaagaaaaaataagagagaaagtaaaacaagaaagaagaaacaaacgaaaggaaggaaggaaaggaaggaaggaaaagaagaacgaaagaaagaaaagaaagaaagaaaaagaaaaaagagagagaaagggaaagaggaagaaaaaaagtgaggggagagggcaaaaagcggtaaggcaagactcaggataaaacacggtggtgtggccgggagcggtggctcacgcttgtaatcccagcactttgggaggccgaggcaggcggatcacgaggccaggagatcgagaccacggtgaaatcccatctctactaaaaatacaaaaaactagccgggcttggtggcgggcgcctgtagtcccagctactcgggaggctgaggcaggagaatggtgtgaacccgggaggcggagcttgcagtgagccgagatcgcgtcactgcactccagcctgggcgacagagcgagactccgtctcaaacaaacaaacaaacaaaacaaaacacggtagtgtaaaatggagcggggccgggatggggcggcgtaagaggaggagaaagaacgcggcgaagagtccacggaagagcgaggatccgggtggcagaaatcggacagggcctgagtggggcgggtcacccaggggccgagccagaagaagggcccagctgacttgggggcgggccgtgctccggagcgctgggtgggtgctggggtctcgggggaggagaggtgcgcggggcttggtgacgggaacacattctcctcccgcccgtgcctcccaccggcgcctctccccgccccctgcccccgaccttaccccagagttgcgccatcagcagcggcagcagcttcgccagagcccgggcgccagaggcggcggagaggtggaggtgcggagctctcatggccaggatctgctggggtgtgtgcaggggcgggttaaaacagatgctccgttagagacccccacctcgccgcgctcatccgcccagcctgggccaccccagcccgcaagcacccttttgacctgcagccgataaccccaggggctggcagacgggagattcgggctggaacagcggtaatgggcacaattaccctaatgacgcccctcgcggcatcttcccgtcctccctgtgcccgagtggagcgctctccgcgccccagctaccctggctgcagccacgccgcgcccgaggtttccccctccttcacgcgcggggtggggatccgaggctcggagccagtgggagcctctttctcaacctcacagcggggggacttccgcgtcccgcaggtggagaaaccgaggctctaagccggctcctgcctgtggcccgggggtccccacccatcctctcgcaatccaccccaacccgggtggggtgcaggtagcttcacctgggagtcgccgataggaaggagggaggggacccagacgtgcctctgccctgcctgtggtctgccgctggtatcctctgcccagggacccctggcgggaccttcccttttaaccccaaggagtccggaagcttctccaccctcccctacccccacccccgggctccctccctttccctctgtctaattgtaccgtgggtgaggctggcactcctgggtcccagattcctgctctgggaggggccctggaatacaggcttctcccagtgcccgaaacgcccccttttcatcccttttggaactggcttccgtggggattctccgggtcccggtgccaagaaggcttcccaggcgcggggagagggttcacgtccccagcaaggctaggggtggcaggatgagaggccactgagcaagaggaaatcaatgggaagtgcatacctagagtgacaatgtgagaagccagactgtggaagaggaaggaggaaggcctagagataaagcaggttgagtaggagggacagaggctggcttgaaaagggagattgtaacaaaccaaggctaaaagagccagagagagagagagagagagagagagagagagagagagggagggagggaggcgccgaggctaagagaaacagaaacaaggaaaaagggaaacccacgcccactctgtggccgtgagtgagctctgtgtgtgtcccagtgactagcccatgtgcgtgttggggggggctgtggctctgcctcatacccatgtgtggccatctcacaccctccctgccatctgtgtgccaccaggtgacacacaggcccctgaatcataggaggtcaaagctgtgaggggcatcggcatcacctcagccaactccctcatctcaggtgaggagtgagaggctcagagagggcagagactcacaggaggtcacacagcaagtccacttgacaaccagaaggccctggttccactctgggctcctattgctcatgccagccacttctgcgaggtgaacagaccatcccaaaagatcctgagctggccgggcgcggtggctcacgcctgtaatcccagcactttgggaggccaagggggggcggatcacgaggtcaggagttcgagaccagcctggccaacatagtgaaaccccatctctactaaaaagacacaaaaattagctggggatgttggcacaggcctgtagtcccagctactagggaggctgaggcaggagaattgcttgaacctgggaggcagaagttgcagtgagccgagatcacgccactgcactccagcctgggtgacagagcaagactctgtcgcaaagaaaaaaaaaaaaaaagatcctgagttctggattctctccgtgggacatcctcttcagaggccatctaactcagtgctgctcagctgaactttctgcagtgatgttttatatgcactagctaatccagccaccaccagtcacatgtggctatccagccttggagatataacaagtgagacagaggagttacatttctggctttatgtaattttaattggaagagccagctgcggttagtggctaccatattggccagcagaggtctccactatctaattacctatcatggaagttggagaaaaacaataagctcctttggttaggtcttagtatgtgcaggctaactgacttctttacttactgtgttatacttttgcatgcagcattttacaggaaaggaaacaaacagagccttactccaggaacatcacttggtaattaagagatcgccttgcttcagatccttgctctcctagccacgtgactgtgagcaagtgactttgcttctctgtgtctgtttcttcaactataaaataggtatgaaaacagtaccgacctcacagggttttgtgaggattaagttgatacatttgaaagtgcttggaggccaggcacagcgactcatgcctgtaatctcaccacttttggaggctgaggaggacagactgcttgagcccaggagtttgagactagccggggcaacatactgagacctctgtctctacgaaaaatacaaaaattagct

SEQ ID NO: 1560572 - DNA, 4001 bp, Homo sapiens
cgccccagcccccgcacccacggcttgaggcagtgggctgctgtcaggagccatctgggggcgatgagcgtcgccccacagagtagccgcgtcttctcgaacagggctgcctgccagggctgggagtgaggcttgcactcgaaccccttgatgatcctggtctctccccctacaagccctggagggggtgagagcaaaagaaggggctcaggaaggagaggtggtagaccaggaggactcccagaaatgggggtggggaggagagaaagagagtgggtggtctgggccctggtctggtgtccctctgggttgccctggatgctggggtcgggtattaaaggatgaaaatacttccataaggtcaaatgcagtggctcatgcctgtaatcccagcactttgagaggctaaggtgggaggattacttgagcccaggagttctagatcagcctaggcaaacatagtgagacctcctcccccatctctacaaacaattaaacaattagcctggcttggtggcaggtgcctgtggtcccagctaccggggaagctgagatggcttaaggatcacttaagcccgggaagtcaagactgcagtgagccgtgttggcaccacggcactccagcctggacaatagagcaagactttgtctctgggaaaaaaaaaaaaggaaatacttccatactggttggtcagtagcccctgtcctgggcgctttgagtgactgctcccccaactccagcttcctcagcccctccacgggaccctttacgacccccttgacctctcctcctttggcatttaaagggattatctagaagggcatccaggccctcatgaccactgctccagttcaggtgccttatgggttgttctgtaatttggaatcagccctgtcactgtccagacacagagggttaggggatcccagagattcaagagggaggatcctgccctgcccccatcccctgcgtacctgttgccagagcaagcaggattaactgcagaatcctcatggcctggaggggggaggagcgggccccaggttcctctgggaacaaggagggacatggggccgcatcactttacggggaaatcgggaggggggggctggctcatgccctctcctctctccctcacctgctcccgctccccacttgggagaaacaaggttggggaaatcccctgtttctcacagcactcagatctccaaacacttaaaatatatcttaggtgtctagggtggccttggagagggcctggtcacagctagaagcttccgagataccaagaaccatgtggaagtcgttgggaggggctttgagctgtcaagccatggttcggccctgttcaagtcagccatgggacctccccggcacatgtcagaggatgttttccttcttgccttgagagctggccaggccccagcagcttggggtggaaggacaaggggaaccagacaccgttccgtagccacccctttttcattgtcttcgcagcagagcgatatggagcctttgaggtctgctggaggggagtagggggctcagccccagacaatgtctgggacccccatcacccggcttgctgaagccctgtccgccaaacccctgcccttttgaaggacagccaagcaaagctgggcggggctggtcgaggggagggccagtgccctccgctgccctggccagcgggggtgggagcagagggccagctcagcagctgaagccatggagattagaggtaactgaggctgcggacagccatcggaggtgagaggtgtagagagaggccaggaacccccacccaagcagagaaggacagagcagagggagaaatgggtgcccgagtgggacaggtgtccttggggagggctgacacctggacggggaggggcagcttccctttcctcctggactcacaggctctggggctggggctctgggggcccagtggcggcggagacggcagtggcggcagctacagcaggtaggctgggttggagcgccaggtgccaggcaccaggcaggcgggctggcaggggggcggccctgggcgggcccaggatgactggcctccaagccctgccttaatgccccggggcggggtgtgtgtgagggccctccccggaggcctctgaggcactggctgcctgcctgtgccacctctccaagcccctcttctccctgtgtctcagcctccctctgtctgtctgtctgtctgcagccttcctttccctgccctgagtctctgaatctgtgtctcgttctatgtgtcattccctgtcattcagtaattctgactttgtgtgatttttctctttctgtccctatgtgtctgtctgcctttctctgtcctcgtccctgtctccatctccactcttctctctctgtctggctctgtgtggccctttctctaattccttctatctttgtgtctctcagtcagtctctctgactgcatctctggcaatttgtcttgaaatccctcttcttccatctaatctccgtctctctttttcctcccgtcccagccactccctctccacagccccagcccaggtgggcccctggcctcccctaggccgctcccttctcctttgcaaggagagggggggtgtgctgggatgtcacacaggtggggctgctgccaggcacaggggcaggaccggagggtgggggaggcaggtcagggcctgtggaagccgagtccaggaaagggaacagagcccttggctgtgctccaccccagggctcctctggggcctcgctcctctgctgacccttcccctgcccgcttctccctgccgcccaggcagcccgagtccagctgttcacttactggctgctgtgagacctctgcccgatgacttccagtcccgcagccacctcaacctctgcatctgcggaacccgagcgcagattcctgcttctcccagcttgtttgttttcagttaggtcccttcccttggctttcctcccctctctcccctgaccaggtgtggagcaaggcaggggagggcctaggttctgacagcagccagccctggcctcaaacctaggtgcttcctcttcctactactatgactacccttatgacgtggggacaagggactccacccctgcaaggctcagtttcttcatctgagagatgggggtgacagacctgcttgcaggggaggttgggatcaggcttccaggagggtccacttggaaagagcagactgcgggggggctcagcaaatgtgcctccgctggtatgatcacccctcactccctccctcctccagtttcccttcagtgcatttggggagatggtctctcctcacctcttgagtcccagtggagacagaatccaaggggtgggcaggaggattaaagacgtaggctgagctctcctgctttccaagcctgcactccacccttcgtcttattagaacaaagccacgtcccacattaaagatacaatgtatgcttcattacaagaaagtaaactgcagttggctagtggaaagaatgctacgttttatggacattggattaaatggtcataaatgttgactttgcagctttcatctggtattttggagctaacaattttctttttctttttcgggtcttttgtggactcttgaaaagcttataagctctgggcactatttctattatgccagatgaagaaacatgtgtcttatttatattgctgggtttttgtttttgagacaaggtctcactttattgcccaggctggagtgcagtggcatgatctcggctctttgcagcctccacctccccggctcgggtgatcctcccacctcagcttcccaagtagctgggactacaggcacgcaccaccacacccagctaattttttgtgtttttgtagtgacaagatttcactgtgttgccaggctgatctcgaaatctgagctcaagccatcctcccacctcggcctcccaaagtgctgggattacaggcgtgggccactgcacccggcctata

SEQ ID NO: 1560573 - DNA, 4001 bp, Homo sapiens
aggccccagcagcttggggtggaaggacaaggggaaccagacaccgttccgtagccacccctttttcattgtcttcgcagcagagcgatatggagcctttgaggtctgctggaggggagtagggggctcagccccagacaatgtctgggacccccatcacccggcttgctgaagccctgtccgccaaacccctgcccttttgaaggacagccaagcaaagctgggcggggctggtcgaggggagggccagtgccctccgctgccctggccagcgggggtgggagcagagggccagctcagcagctgaagccatggagattagaggtaactgaggctgcggacagccatcggaggtgagaggtgtagagagaggccaggaacccccacccaagcagagaaggacagagcagagggagaaatgggtgcccgagtgggacaggtgtccttggggagggctgacacctggacggggaggggcagcttccctttcctcctggactcacaggctctggggctggggctctgggggcccagtggcggcggagacggcagtggcggcagctacagcaggtaggctgggttggagcgccaggtgccaggcaccaggcaggcgggctggcaggggggcggccctgggcgggcccaggatgactggcctccaagccctgccttaatgccccggggcggggtgtgtgtgagggccctccccggaggcctctgaggcactggctgcctgcctgtgccacctctccaagcccctcttctccctgtgtctcagcctccctctgtctgtctgtctgtctgcagccttcctttccctgccctgagtctctgaatctgtgtctcgttctatgtgtcattccctgtcattcagtaattctgactttgtgtgatttttctctttctgtccctatgtgtctgtctgcctttctctgtcctcgtccctgtctccatctccactcttctctctctgtctggctctgtgtggccctttctctaattccttctatctttgtgtctctcagtcagtctctctgactgcatctctggcaatttgtcttgaaatccctcttcttccatctaatctccgtctctctttttcctcccgtcccagccactccctctccacagccccagcccaggtgggcccctggcctcccctaggccgctcccttctcctttgcaaggagagggggggtgtgctgggatgtcacacaggtggggctgctgccaggcacaggggcaggaccggagggtgggggaggcaggtcagggcctgtggaagccgagtccaggaaagggaacagagcccttggctgtgctccaccccagggctcctctggggcctcgctcctctgctgacccttcccctgcccgcttctccctgccgcccaggcagcccgagtccagctgttcacttactggctgctgtgagacctctgcccgatgacttccagtcccgcagccacctcaacctctgcatctgcggaacccgagcgcagattcctgcttctcccagcttgtttgttttcagttaggtcccttcccttggctttcctcccctctctcccctgaccaggtgtggagcaaggcaggggagggcctaggttctgacagcagccagccctggcctcaaacctaggtgcttcctcttcctactactatgactacccttatgacgtggggacaagggactccacccctgcaaggctcagtttcttcatctgagagatgggggtgacagacctgcttgcaggggaggttgggatcaggcttccaggagggtccacttggaaagagcagactgcgggggggctcagcaaatgtgcctccgctggtatgatcacccctcactccctccctcctccagtttcccttcagtgcatttggggagatggtctctcctcacctcttgagtcccagtggagacagaatccaaggggtgggcaggaggattaaagacgtaggctgagctctcctgctttccaagcctgcactccacccttcgtcttattagaacaaagccacgtcccacattaaagatacaatgtatgcttcattacaagaaagtaaactgcagttggctagtggaaagaatgctacgttttatggacattggattaaatggtcataaatgttgactttgcagctttcatctggtattttggagctaacaattttctttttctttttcgggtcttttgtggactcttgaaaagcttataagctctgggcactatttctattatgccagatgaagaaacatgtgtcttatttatattgctgggtttttgtttttgagacaaggtctcactttattgcccaggctggagtgcagtggcatgatctcggctctttgcagcctccacctccccggctcgggtgatcctcccacctcagcttcccaagtagctgggactacaggcacgcaccaccacacccagctaattttttgtgtttttgtagtgacaagatttcactgtgttgccaggctgatctcgaaatctgagctcaagccatcctcccacctcggcctcccaaagtgctgggattacaggcgtgggccactgcacccggcctatattattaaaagtaactttttctactccatttctgagtaactactcagggaagaccctcatcctatttgagcactgggttttttgtttgtttgtttttgagatggagtctcgctctgtcgcccaggctggagtgtaatggttcaatctcggctcgctgcagcctctgcctcacgggttcatgctattctcctgtctcagcctcctgagtagctgggattacaggcatgcgccaccatgcctggctaatttttgcatttttagtagagttggggtttcactatgttgaccaggctggtcccgagttcctgacctcaggtgatccacctgcctcagcttcccaaagtgatgggattacaggtgtgagccactgtgcctggccttatttgagctctgtttctactcctatgagatagggaaactgctgagtccttcttccagtctcaaccagcatgaggacttcaaatggacagacatggcccctccttcatttatatttattccagactattgcacacttctctcaccccgctcgtgggtcttagaagggctggcaggagttaaagttccaagaagttcccaggccaacaagagtggagctaggggaagtgatggaggagatattggtgctctgagggccagaggggtacccaagttaaggggtgggggtggaggtggaggaaacaggtcagttgttcctcatgatcatccggatccagtccacatacttgcaaatataggtgtagactccagggatgccatcttgtccacagggccccacagacccccaggacaccagaccttgaaggactcccccacacaccagggggcccccagaatcaccctggaagggaagagaagtactgtctgaacaagggagacatcttatttctgttttcctccccaacccttcaacccagtcctgggccttggggagggctccaagtctggtcattagacaaaagagtataatcactttcccggaggacaatggcaatggctaaccaaaagagaagaaccactgtctctaggggccaatcccagggaagaagggtggaactccataaaggacagaggttctctcaaggacaatggctggggccctgaccaatgaggagagagagcacagtcattaatgaccaatctcaggggaggctgtcaagacaacataaagagtcgagcattctctcaaggacaatggctggggccctgaccaatgaggagagagaacactattatcaatgaccaatcccaggggaggagggtgggactccataaaggatagaggttctctcaaggacaatgcctggggttctgaccaatgaggggagagagtgccatcaaaaatgaccaatcccagggaaggtgggcaggactccatcaaaagcacagagttctctcaaggacaatggctggggccct

SEQ ID NO: 1560574 - DNA, 4001 bp, Homo sapiens
atggcctggaggggggaggagcgggccccaggttcctctgggaacaaggagggacatggggccgcatcactttacggggaaatcgggaggggggggctggctcatgccctctcctctctccctcacctgctcccgctccccacttgggagaaacaaggttggggaaatcccctgtttctcacagcactcagatctccaaacacttaaaatatatcttaggtgtctagggtggccttggagagggcctggtcacagctagaagcttccgagataccaagaaccatgtggaagtcgttgggaggggctttgagctgtcaagccatggttcggccctgttcaagtcagccatgggacctccccggcacatgtcagaggatgttttccttcttgccttgagagctggccaggccccagcagcttggggtggaaggacaaggggaaccagacaccgttccgtagccacccctttttcattgtcttcgcagcagagcgatatggagcctttgaggtctgctggaggggagtagggggctcagccccagacaatgtctgggacccccatcacccggcttgctgaagccctgtccgccaaacccctgcccttttgaaggacagccaagcaaagctgggcggggctggtcgaggggagggccagtgccctccgctgccctggccagcgggggtgggagcagagggccagctcagcagctgaagccatggagattagaggtaactgaggctgcggacagccatcggaggtgagaggtgtagagagaggccaggaacccccacccaagcagagaaggacagagcagagggagaaatgggtgcccgagtgggacaggtgtccttggggagggctgacacctggacggggaggggcagcttccctttcctcctggactcacaggctctggggctggggctctgggggcccagtggcggcggagacggcagtggcggcagctacagcaggtaggctgggttggagcgccaggtgccaggcaccaggcaggcgggctggcaggggggcggccctgggcgggcccaggatgactggcctccaagccctgccttaatgccccggggcggggtgtgtgtgagggccctccccggaggcctctgaggcactggctgcctgcctgtgccacctctccaagcccctcttctccctgtgtctcagcctccctctgtctgtctgtctgtctgcagccttcctttccctgccctgagtctctgaatctgtgtctcgttctatgtgtcattccctgtcattcagtaattctgactttgtgtgatttttctctttctgtccctatgtgtctgtctgcctttctctgtcctcgtccctgtctccatctccactcttctctctctgtctggctctgtgtggccctttctctaattccttctatctttgtgtctctcagtcagtctctctgactgcatctctggcaatttgtcttgaaatccctcttcttccatctaatctccgtctctctttttcctcccgtcccagccactccctctccacagccccagcccaggtgggcccctggcctcccctaggccgctcccttctcctttgcaaggagagggggggtgtgctgggatgtcacacaggtggggctgctgccaggcacaggggcaggaccggagggtgggggaggcaggtcagggcctgtggaagccgagtccaggaaagggaacagagcccttggctgtgctccaccccagggctcctctggggcctcgctcctctgctgacccttcccctgcccgcttctccctgccgcccaggcagcccgagtccagctgttcacttactggctgctgtgagacctctgcccgatgacttccagtcccgcagccacctcaacctctgcatctgcggaacccgagcgcagattcctgcttctcccagcttgtttgttttcagttaggtcccttcccttggctttcctcccctctctcccctgaccaggtgtggagcaaggcaggggagggcctaggttctgacagcagccagccctggcctcaaacctaggtgcttcctcttcctactactatgactacccttatgacgtggggacaagggactccacccctgcaaggctcagtttcttcatctgagagatgggggtgacagacctgcttgcaggggaggttgggatcaggcttccaggagggtccacttggaaagagcagactgcgggggggctcagcaaatgtgcctccgctggtatgatcacccctcactccctccctcctccagtttcccttcagtgcatttggggagatggtctctcctcacctcttgagtcccagtggagacagaatccaaggggtgggcaggaggattaaagacgtaggctgagctctcctgctttccaagcctgcactccacccttcgtcttattagaacaaagccacgtcccacattaaagatacaatgtatgcttcattacaagaaagtaaactgcagttggctagtggaaagaatgctacgttttatggacattggattaaatggtcataaatgttgactttgcagctttcatctggtattttggagctaacaattttctttttctttttcgggtcttttgtggactcttgaaaagcttataagctctgggcactatttctattatgccagatgaagaaacatgtgtcttatttatattgctgggtttttgtttttgagacaaggtctcactttattgcccaggctggagtgcagtggcatgatctcggctctttgcagcctccacctccccggctcgggtgatcctcccacctcagcttcccaagtagctgggactacaggcacgcaccaccacacccagctaattttttgtgtttttgtagtgacaagatttcactgtgttgccaggctgatctcgaaatctgagctcaagccatcctcccacctcggcctcccaaagtgctgggattacaggcgtgggccactgcacccggcctatattattaaaagtaactttttctactccatttctgagtaactactcagggaagaccctcatcctatttgagcactgggttttttgtttgtttgtttttgagatggagtctcgctctgtcgcccaggctggagtgtaatggttcaatctcggctcgctgcagcctctgcctcacgggttcatgctattctcctgtctcagcctcctgagtagctgggattacaggcatgcgccaccatgcctggctaatttttgcatttttagtagagttggggtttcactatgttgaccaggctggtcccgagttcctgacctcaggtgatccacctgcctcagcttcccaaagtgatgggattacaggtgtgagccactgtgcctggccttatttgagctctgtttctactcctatgagatagggaaactgctgagtccttcttccagtctcaaccagcatgaggacttcaaatggacagacatggcccctccttcatttatatttattccagactattgcacacttctctcaccccgctcgtgggtcttagaagggctggcaggagttaaagttccaagaagttcccaggccaacaagagtggagctaggggaagtgatggaggagatattggtgctctgagggccagaggggtacccaagttaaggggtgggggtggaggtggaggaaacaggtcagttgttcctcatgatcatccggatccagtccacatacttgcaaatataggtgtagactccagggatgccatcttgtccacagggccccacagacccccaggacaccagaccttgaaggactcccccacacaccagggggcccccagaatcaccctggaagggaagagaagtactgtctgaacaagggagacatcttatttctgttttcctccccaacccttcaacccagtcctgggccttggggagggctccaagtctggtcattagacaaaagagtataatcactttcccggaggacaatggcaatggctaaccaaaagagaaga

SEQ ID NO: 1560575 - DNA, 4001 bp, Homo sapiens
tctttgcatctgatctcccctttcacaaaaaaagttccaggccaggcacagtggctcatgcctgtaatcccagcactttgggaggtcaaggcaggaagattgcttgagctgaggagtttgagaccagcctgggtaacatagcaaaaccctgtctctacaaaaaaaatttaaaaattagccaggtgtggtggcgcaggcctgtagtcttagctccttgggaggctgaggtgtgaggatcacttgagcccaggtggttgaggctgtagtgagccaagatagcatcactgcactccagcttggatgacagaaagagcaagactctgtctccaaaaaaaaaaaaaaagaaagaaaaagaaaaaaattccagaacatcagtctactgaggcccagagaggtgccaggcatagattctgaagttgcacaaagagtttgggtcatgttggccgggtgcagtggctcacacctgtaatcccagcactttgggaggccaagacgggcaggtcatttgaggccaggagttcgagaccagcctggccaacatggcaaaaccctgtctctacaaaaaatacaaaaattagctgggcatggtggcgggtgcctgtaatcccagctactcaggaggctggggcaggagaatcacttgaacctgggaggcagagacagcagtgagctgtgatcacgccattgcacagcagcctgggcgacagagcgagaccctgtctcaaaaaaataaaaaaaagaaaaagaaaaagagcttgggtgagacctgggccccgggcccagactgggtcaaggaatggctggggtgagtggcagatgtcatataggaaagaaagggtacatgcaggaatgggagaggcaggagggcaggttccaggaccctccccggccctccacccaacatacctcaccctgcccagcaccaccccaggcccactgctaaggaagttccactcctggtctaacctcagactctcttgttgcaggatcagcttcttcccagtgggcaccaccctcccttgtgatcctacccccagcgcttgccttcccatagtcctcccttcgcccaccccaggaagggacttacctgccgctgcagtgagccgctgtgaggacccacctgtggtcaataaggacacccccgcagcgcaggctggtgccctcaaacagccccacctgccacggctgtgagttacgcccacactcagtgccattgaaaatcttcggtgtggctgcctggctgagccctggagacagacaggggcatgggtcagagagaggaagaaaagatacagagatggagagacacacagagtgagagagagaaacaggcaggagagagagaggagaaagagagacgagaaagagagagaaagagagagagacccagtgatagaaaaagaccatgaaacatcaaagacacccagggagaaagatgcttacacataggagggaaatggagagacagagattcagagagggacagaagggaagagggatcaaaaaataggggagaccgaggtgagcagtaccctgagagctgcaggtaaatggaggcacagagaaagcccctctcctcctcaccaccaggctgggggccagagctgagatggggagggtggtggggcctcctcatgggggtgaagggatccagtcgcagtcctgccctctccctgctccgggagaactcaccaagaacacacaggagcaaaaagatgctgagccccatggtgggtcacttccaaagtctgggggaaaaggggaatctcagaggtcaccctttccctgtgccccccacctctgccctctctgcttctctttgaaggtcaccaaggggatgacctgcttgtcctctctctacctgctcccctgtgtgtcactccctcattggcagtcgcctacctccttctcaccttgtctctttgtctgccagatcctctacgtggctgtcactgtttggcctgtcctcgtcgctgctatctctccgtccacctacctgcctgtcttctcatgtgctggccactccgccagccaactctaccactctgcacctggctcctcagccacctgtcatgttgctcaaccggtccctttccttccatctgtcgctccagacagaccactgacaaagctcttaactctctttgtcctggcccatccagtttccgggttaagggaaggggaccacgaagacaggggtggggcgtgctctaattctgcagaaactcttctcagctaatcacacttaattgagctttacagctaaacggagtggggaaggaggaaaggacccagggtgggaagacccagccccactccctctctcctctgcaagcccgtcagcagccccaggactgatgactcaaggtgactagggagctgggttctaatcctgactccagtgacaaaggagggtggggagaccttggacacctggggcccatccccatgcagtgcaggggaggggcagggggaaggagaggctgtgaaagcaggagagtggacgggaggggcaggaagcccaagctagaaagagtcccagaaagagaagaagagttgaaggaacagacttccaaataggtgatcaggcaggggtagaagagagtttctgaactgagttcatatatgtacatatgaagtggatcaatctaattccataaagtttttctttgctaagaacttctattgcttaaataaaacccacagagagaaaaaaaaaagacacagggaaggagaaatggtagaaagagagagagagaatgagtcacaggacaagggaactttgtgctgttttttgtttttcgttttgagatggagtctcgctctgtcacccaggctggagtgcagggctgtgatctccgctcactgcaacctccacctcttgagtacctgggattacaggcacgtgccaccatgtccggctaatttttgtatttttagtagagacggggtttcaccatgtgggccaggctggtcttgaactcctggcctcaagcaacctgcctgccttggcttcccaaagtgccgggattacaggtgtgagccaccatacctggcctctgtgctggtttatctgagtttttgcttcatctaggaggaatggaaggagagaaagaaggagagagagaggggacagagagagaaaatgagaacaaaaagggaattcggctcagaggaagggggattgagaaacaaaccaagagaaaagcagtcagggccaggcgcggtggctcacgcctgtaatcccaacactttgggaggccgaggcgggcaagtcacttgacgccaggagttcaagaccagcctggtcaatatggtgaaaccccatctctactaaaaatacaaaaattagctgagtgtggtggtgcatgcctgtaatcccagctgctcgggaggctgaggcaggagaatcccttgaacgtgggaggcggagcttgcagtgagccgagattgtgccaccgcactccagcctgggcggcagagcaagactccatctcaaaaaaaaaaaaaaaaaaaagaaagaaaaagaaaaaaaagaaaagcggtcagacagagcgcacaaacaaacaaaaaaacccagaacaaaacagaggagagcaaactcccaccctatgactgtcttttagtccttcactttctctctgggtctccagtctctgtccgtgtctcattttcagaatcacagaaccttagcttttgatttgctcttagaaacgacctaactgctttaactcatcattggtcagcgcgactggcgttgataacgctggtccctacaaagcctcctgctggctgttaagagctttccttctttgggcagagaggataaaaaagcaccatgactgtcctttctctggaaaggacacacgtcacacgctcacagcacaaaaacgccacttcttcctttttctggtgtcaagttttacaataaacctcaactgaataagcaaagaaacaaaaacaaaaataccaacaactacccaactcaacctctctctctt

SEQ ID NO: 1560576 - DNA, 4001 bp, Homo sapiens
agctcacttttcaaagccaggaggacacagaagcctcatcaggccacctaacatttattacactgaaccatctgcaaaagttgttttaggaaggtcaaaaagggtcaagtatcagcaatttcaggtggtccaacccaataaacatattattttcttttcattgtgcaggatttatttccttccttaccttctatttatgacaaagaattctattctctattcaggacagtaatataaagttgaacatgcttttgtttgagtgaaaaaagaagaaaaaaagctaactttaagcaaatgattaggtcaaaagttataaaaatggttttcagagcctcaagtccaggatatggacagggaaaacaaccttgattaggattctgactcaggcatcgccggtgtcattggagcaggagccttctgtctttgagtcctaggtttctctgccatgaaattggagtaattacaatgcacctacctcgccaggttgttgaggactccacaaggcgtagcgtgtgggtctcctagcctagggtgtggcactcaggagtggcacgggcatgaatccagggagtgtcgccagaggagaaaagccaccccaccttcaggccaaggatggtgccaggtgccaggcacccacagatccctcctttttcaggtcttggctcaagggtcaagccctttgggaaggcctctggtcgggaagccgccattacatctctaggcccctggcttggctccttgaagtcttcacctcatgtcaagataattattaactaattatttggataattgtttgaataacatctgcgtctgtccccgctagactccaggtgctgagagcagggactgtgtctctgcttgtacagcacccagcacagtggccggtgtttaatagctgtttgttgaatgaataaatgattcatgaacggggtttccagagaacctgcctacaacggcagggaaagatgggaaagatccataaggatcttaaggactaccaatttggggtgaggtcacataggtttggggtcaacccaaggattaaaataacaatctagaaggttctggaaggggctgagtatgaagacagaatactagaggccgggctcggtggctcatgcctgtaatcctggcactttgggaggctgacgcgggctacttgaagttagaagttcgagaccagcctaaccaacatggcgaaaccccgtctctgctgaaaatacaaaaattagttgggcgtggtggcgggcgcctgtaatcccagctactcgggaggctgaggcaggagaatcgcttcaacccgggaggcggaggtttcagtaagccaagatcgtgccactgccttccagcctgggagacagagcaaggttccatctcaaaaaaaaaaaaaaaaaaaaaaaggaatactactaataaagtaataacggctaagtggctaactttcaagtcccttctacctgcgacatactgaaggctcgacgcattacctcgtttcaatattcacagtgaccttctctggtaagcacttatagattaagcccattttccagatgaaaacaatttaggcacaaagcagctgctaggctactggctcaaagcggcagcgtcaggacgcgaacccatgtctttcagctttccagagaggacaggaagccttgaacgcgggaggggctgctgcgagggtattttgggaggtgaagggtctggggtcggagggccaacctcagccgggaaaccaggtcacccagggacaagcaggaagagctctgagctgtccccactggacccggccccgagtgggcggggggcggagctcgcggctcccacgccccctccccctccggcctgacccctcctaccattgtcccgaatggccgccgcgcctccacccccgcgcattcttacctcctgacaaggccaaggtcagggaggcgatcactagggccaggggccacatggctccgggatcgggaggggagggcagggcgggcggggcctgaggagaaggtgaagggggtgttgagggcgtgcccggaacctccgcgtctgaaacctctctgctcctgaatgtctcctcgcctcattcactcttgacagccctgaccctggaatctgccccccgcctccaattccatccttggtgggggtgcagtggcgaggtgggaggaacagtgtgcaacctcctggggctccggcgtgcagcccctcaccccaggaagccgtccctcctcccctgccctctggcgagctgggtggtcggtgcactctcgcccttttcctccagagtctgccttccattctacccctctgggtctgtccacacgcttggtattagcccaagttcttatctgtccgcgcccttcgcctctctccgtctctgcaggtttctctctagatctgagactctagcttcactctccctctccctgactcagctgcccttctgctttccccatccttcctatcccctcttctctcccctccctgccctcctccgctccccgcccccgccccaggcagaccctacctgagtgaggggcccacgaggagcgtcagccgccagctgtctagaacttcagccccgaaccatggcttttaacccctgaactccctcccccagctcactcagcatttcctggtccctggcctccccctctccacccccagtggctcagcgggatgtctccaggcacccccgacctgggcttggccctctgcttggggcggagcttccaggacgtgctgggacctaggtctgaccccgcccaaggcagagttgaacccactgtgaactttcaggcctcaggacccaaaaaagggtaaggggaaagcccatttccttccccctaccccgctgagttccatgcccatccctaacttcaacccattctgcacccagttttctaacctcttctccaaccccatgcataattcttaataggcagtcagcccccagatggccgtgttctatcagattcccacctccctatccatccctaaccataccaagtactccagcctgttcctcaaccccagtcccatctccaacctcatctcaggtttagctctcaacacatccaggttccaattcccagtctcatctcaaccctttttcttttgaaagacacaaggacacccacaattatcccatcatcctgcctccctgctcccgccaaccaccggacacaagaaggaaatcatcagctgggtggatagaaaatcagctccctcggacttggatgggggcagagatgcgacctgagaaagcaacattttccagaaatggccttttaggagcagggccagagggggtgagggagtccacggggacctaggtggagaggaaaaagcaggagccggaaagctttgaagacgtggattgggggtgggggagaggaaggaggaaggggtggtgttttgagaatgagtaggtgtctccaggaactatgactgggtggagccctgagttaatcctagggggtggaggggacaggattagggattaaggactgaggtggggtcagaatttggaagaaagccagggacgtggaccagatgaagtttggaaagagtgagagagtggaggtgtcacaatgaggataaagaatagagatggatggggcgagggctcacatggaaacttgtacagtccttattgatggagttcagatttggatgtggagatcaaatctagtgtcaaagggtaacttttaaaacatggtcttaccatgactctctgacatatatgaaatgaacatgtgtcaaagattgtatcttgactcattaataaatggcagagccagtaagatgttacaaagagccatatgcacagagacaacgaggaatgctgaaatgaatttacaaatagatgcaaaactggctattccacactgggaggaggagggaaatccattgtacttccacctggcaaaattcatgtaaacatttatggacaagaattatttgcattgctctcagatacctacaatttagagtcataa

SEQ ID NO: 1560577 - DNA, 4001 bp, Homo sapiens
ttctgacattgtttctttcctaacacagtcaggtagagccccgtgatctttctgctatgacccactcaggacctaatagttccctaagattccttatgtattttgcaccagaccttataaacacctctctccccggccccacaattccctagcacctccacaactaggaatttaggcctccagcacgttcccccaccatgacccccaaaccactccctgctctttcttatgaggtcaccatgagcatccaggggccccaaggacccatccccatctcttctcagagtctccaggggacccccttgtgtcatacccaaccgttctcttacctatagccaggacttgaagtgctgtcagcaggaggaacattttaggggctgagggccaggtcctgtcaaatgcagagaaaaagtgagagagaaggaaccttcaacagaaccgggggctgagaggcagagacagcaaggggcacttacccagagcccaagaccctcagggacatgaagacacagcagagaggtagggaccagagacgaggggggcggggcctgcaggctctgcgggcggcaggtgggaggatgtggagcagggcacaggtccctccttgatgtcttgatgaaggaaggaggggaggtgtctctcttcctagtcacactggcaaagccttttatccctggtaaggacagctggccctgcccccacctcccgccgccctgcttctgacatttttttttttttattgcctagttcccattccaggactccctgatcccatcccctccctcccctgtctggccaaaaaagcagccacaattgttcatgagaacccgcccagggaagatgctataatctagaaggaatcctgggaggggaccccagggcagggtgggcaggggagggttcccagttgctggaggtggtggatctagtggtggagtcaggaaaccagggtggggagtgtcagaggaaagggcacgaaggggctgagagagggaggaagagatggactgagagagggagtcacgggaggagggagagagggagagagagagagagagagagagagacagagagagatggagagagagaaagacagagagacacacagacagagagagacagagacagggtgacgggggggagagagagagagagatggagagagagacagagagagagccagacagagagacacagagagagagagagaaagagagagacagagacagagtgacagagagggggagagcaagagacagagagagactgggaaaatgaatgagaagatatgacagtggagagagaggagtccaggaatacgagcacagaggcaggtgtgctcatgagagaaggaactgaggagagagctggagaaaccggtggaagttggatgtgacagggaacagaagaggcagacggtgggaaaaaaacaagacagaggaagagggagacacagagacgcagggagagaggggtgtggagaagtggagatagaaaagcaaaagacggagggaagaaggtggagatagaatggaaacagacacacagaaagagaaaacagtggagagagaggagagaggccgagacgcccccaccatgcggcactcaccacaaacacacacagaacaacagcgatgatgatgaaggcagtgcgggcatgagacgtggaagagaacgggacatggtgggagaaagaggatgggacaggcaggccgatggcagaggggagacgggaaggatgggcacctacaggggatggggacaatgacagaggagacggaggcctagatgagagatggcagcgccagggagagatggagaggaggggtgggatagaggacgggcaggaggtgggcgggagatacctggacctggagcagagctgcccaccttgctttctcactttcgactcctgagagatgggggagcagaggccccagcagggagcaggaaggttggtgccagaactggcattccccagcttgggatctgctaggtgcagagacaaagtgagagctggagatgcaaagagagagtgacagagacccagagagggggacagagacccagagggagagggagagagacccagaaagagaaggggacagagattcagagacagaaggacagtcttaacagacggggttggaaattcaaaataggagacggcagagagcaggagagacagagtgaatgagatggggaaggattctggccagcctgcaggggggttctggagttgggggggttccatcctcatttgggggagggcctaccctcctcagcccctcccctagccccttaaattccccagtgcttgtgtccgtctctgggcctgggcagccccgtacctggaccacgtggtgactcaggaggctgcttgcctcccttggctaccccaactgttccccggcctcagcctgactcagcctccctccacctcggcacccccctaggctggctctttgagctggagcttggcctgggtctgtctgtacacctggggacgcactgtctgggcacctgcatctggagccacacacccatctctccccaggtgcctttctgtgattcctgaactgtttctgtttaactatgggcctccctgctttgagctgaaggccttgggaagccttcccggcctcctctgccttggttcaggctcggcatcaacacaagaaccccctctttatttttaaatttttaaatttattttatttatttatttattttatttttttttctttttttctttttcttttttttttttttgagacagagtctcactctttagccccggctggagtgcagtggctcaatctcggctcactgcaacctctgcctcctgggttcaagcgattctcctgcctcagcctcctgagtagctggggctataggcacccaccaccatgccccgctcatttttttgtatttttagtaaagacagggtttcaccatgttggccagtctggtctcaaactcctgacctcaaatgatccaccctccttggcctcccaaagtgcaaggattacaggcatgagccaccacacccgtcaagaactccctcttttaagaaagggttctcttgggacccagggatggggtggcaggagggagctgctctgtggtgacgaatcagctttgcactggatgtggcggtgattacacgattctacacatgagataaagagacacagaagcccacgtgcacacacacacgtgcaaagaaatgcgtgtgaaaaatgaacgcgcagtgtgatctgtagtctcattaatagtttggtttctgtgttgatttcctggtttccattctgaacgacagttacacaaggtgtcgccacggggagaagtaggtgagggagattccctatgctgtgtgtgtagcctcctgtgagtctgtaattatctcaaaggaaaaagttaaaaataaaacagaatttcctagtaaacacaaggtctccctgttcctaaaaagaacaccctacttaagcagaaggccttggtcaacccccaggagcctgggagtggctccttcatgccactctatccctgagatccaagagaatcctttctttaaagggtggcaggggggcaggtgctgtggctcacgcctgtaatcccagcactttgggaggccaaggtggatcacctgaggttaggagttcaagaccagcctggaaaacatggtgaaacccaatctctactaaaaatacaaaaaaactgagctgggcatggtggtgggtgcctgtagccccagctactcaggaggctgaggcaggagaatcgcttgaacccgggaggcagaggttgcagtgagctgagattgtgccactgcactccagcctgggtgacagagcgagactctgttgcaaaataaataaataaacaaacaaataaataaagagggggttcttgtgtttatgcagagcctgagccagggcacagaatgactggaaggctccccaaggccttcagctcaaaggtagggagacagctggaga

SEQ ID NO: 1560578 - DNA, 4001 bp, Homo sapiens
ctcacgcctgtaatcccagcactttgggaggccaaggccgaggtgggtggatcacctgaggtcaggagtttgagaccagcctggccaacatcgtgaaatcccgtctctactaaaaaataaataaataaataaataaaaatacaaaaatcagctgggcgtggtggtgcgtgcctgtaattctagctactcgggaggcagagacagaattgcttgaacctgggaggcggaggttgcagtgagctgaggttgcaccactgaactccagcttgggcggcagagcgagactccgtctcaaaaaaaaccaaacaaacaaaaaaaagtcaaggttaaaaccgtgattcacccacaagacattttgtagagttagagctgcagacaccaacccagaaggccaacactcagatgtggacttgctgtctggggcagcacccagacacggggctgggcattcaaggtcaaagacatgcagctgaagccagaggcagccagggcaggacatatttatccatctctagatcagcccccaagccagatctgtggagtcactgattgggtttcacatatggggatctggctcatgcatgtggagaggatgtgaacatacagggccttgtatacccactgcacacgtgcatgtacacacacacacacacacacacacacagaatggcattatgcttaaggacatgattagagacattcaaggtcacaggaccaggacccctctccactgggcaatgtggatgcatcccctgaaggttgaagccatgcacactcccacccacacaggggcaggatttgcacagccagaccaaatgcccacactctccccatcacagtcaggaactgggccaaaggcccccgtgagaccaggggaatgcggatgtggtggacaaggggcttaacaaaggaagggtgaggtcgtcctccgaagggcggagggtacgggctgaacagctgggcaccgaggctgcacctggccagtccaagccagaggaaggtggaggccccagctgggcgcagcaggcaggcgcgaggcaggtaggtgagtgcacagagagagccggaggggaggctggaggcgtgggggtctcaggggcccccaggagtgagggtcatttgtggcagaacgttaatgaaagtccaccccccaatttctccagaagagaggcatcaggttacaattaatttcttggtgtgtggcagctgagttcaatctggagtttgcctgacacccaaggtgaccttgatgttgtggccgtccctctgagccacagccccttcccttgtcaaatgaggtcggtggtgcccaccacacatagacgttgtatgtaagctctaagcaccgtgcctggcttgcacacctgaaggggcactacctgggccaggcttatgcttctgcctcacacacaaccacatttaatcccctcaaagaccctgtaagagacagggagtggcaggtgtgggactcaagctggagtctgtctgtgctgttggcctctcagcacttgtctaatgcttgctatgtatattacctctgttatgctattgagacctcactgttattgtctcaagtgggtgctgtcttatagagaaggcattcgaagcccagagaggtgaagcagttccctcaaggacacacagcaaggaagcggttgccccaggactcagctcaggtttgtgtaaccccaggaccgtgttccttgtcgtgggcagcgagaggccccaggcaacatagcgactccagagcagcagcaccagcacctgacggtaagggcttagggacattggcacaggtggagggtgaaggaaggatctttagtggtctctgggtgaggtaggggctggcagatcactgggcccagacatgcttgggaagggggcacctgctcccacagacctggccccctcctggggccacctcacctgtggatgccagcaggaaggagagagtgaggagaagccacattgtggaggagggaccagggttcggctgcagtctggggagggagtgagagaatccaggtgaggcaggacccttctgcctccaccaggatccctccagacacagacttatcccatccactgttaataaatttcttctgaccaccggtatccccttcccccaaccccactctgcgcttccttctgggtcccccatctctggaaggtttactcttcctctaggcactcggacagaccctgccccacctcctccacctgtcagcctccagcaccatgctaccagcccctggatctctctccatcatcaccaaggacccctgtcccaacttttttttttttttgagacggagtctcactctgtcacccaggctggagtgcagtggcacaatgtcggctcactgcaagctccacctcccaggttcacaccattctcccgcctcagcctcccgagtagctgggactacaggcgcccaccaccgtgcccggctaattttttggaaattttttttttttaagtagagacagggtttcaccgtgttagccaggatggcctcaatctcttgacttcatgatccacccacctcggcctcccaaagtgctgggattacaggcatgagccaccgcgcctggtctatctcaaccctcttatctggccttttgggtccccctccagtccagtcccctccaccagcttgccctccagccatgaccccaaagggtctttctacatctggagctggctgtgcccctcccctgctcaccaccctccatggatccttggcaccaccaggataaagtccagctcttcaaattcactttctttctttttttttcttttttttttttttttttgagacggagtctggctctgtagcccaggttggagtggagtggcgtgatctccgctcactgtaacctctgccttctgggttcaagagattctcctgcctcagcctcccaagcaattgggattacaggtgtgtgccaccacgcccagctaatttttgtaattttagtagagacggagtttcaccatgttggccaggctggtcttgaactcctgacctctagtgatccacccgcctcagcctcccaaagtgctgggattacaggcatgagttgcctggctccagcctcactttcaaggacaaaagtggcttcttcccttccagcccctctccctgggtctcccatgaccttgtcctagacgcagccagtgctgccattttccctcctgccatttcatgcttaggctattcctcccaccgcatatccaacgccattcccttccagccccgcttcctccttgaggccttctctgacctcccctgaccctcagtggtgtctgcctcccctacgagactggcagctccccgaggagctggtctgactccactctgggtctccagtactgcagggcccgacccacgggaggcctcaggaagctttgagggtgaattgaaatccttcttccccatatcttccaaattcatctttgtcctctgacactctgcccccacctcttctgggaggccccaacacctaacaggtgtctcccctgaatcccacagcacccattctgtctccattacagcgcagatgccccatacttgctgaggtctggcctgttcttttctccatctgggggtcttgaagatggggctcaggtcaggttctttctgtgacctcagcactgccccacctggggcctggtacacaggaggcctccgggaggttgtgctgaactgacttgaacccgtgatcactcctgaccacgttcttggctctgatacaagtacttcagggacgtcctcctgatccactccatccccctccctccccaccactgcagctccttctggccattccaggacattttcttggttcaggttcaatttggggcattggtaaaggacacgtggatctacccatgcccttgacactcagttctccaagcgtggtcaacgtttccccttgaaaccagggcacagtgaatctcccctttgcccctccctcagtcttgtctcaaagctctc

SEQ ID NO: 1560579 - DNA, 4001 bp, Homo sapiens
gtgtctccccagggtggagggatgtcctgcagagagtgctgtgcaatgacaggcaccccctcacatgcacacacattgagcttaaagtccttcctttttctgggtgctccccacccaccctcacggggtgtgttcagtagtgatgaggaagggctgaggcagagacccagagagaaagacaggcaaagagatgcagggtgagacacacggtgacagagatggccacagagagacccagagacagagacgggggagacacagacacagggagacagaaaagagagagggacatagagaccaaaacacagtcatacagacacaaccagagccagataccaagagacacagcgagatcagacacagagagaaacccaggcagccatggggagagtggtccagccccagctctgcctccgggtgcgacctgggccaggaccttccctctctcctttagtctgaagcctcacctgagaagtgaccctgggggaagcatcccgctgttattcctgtgggacacagccattccctccccagatcccagggtcctacttacttctttaggcaatgggcagctgtgagcacccactgggggtgcaccaggacacccccacagtgtgcccatccatgactgtacacagccacctgccagggttgggaatgcttctcacactcccagcctcccacaatccgagactggatgaggggcacggcacctgcggagggggtgctgggtcagggggatcagacccaaaagaattggataggggagggagctgagctgtgggtttgaagagacatgggggcagaggaccaggactgggagtccaggacacaagcaaggggtcctgggagggctggcaattctgtagctattccctgcgttagcgggttggtggctggaccaggtcgggaggcttcatgctctgagaacggagctgaccccagagatcagagtaggggacatgggaaacatctgaagcaggcatcgggttgggggttgggtcatttggagtgatttggggtcttacactgggagaagggacactgtggtggcagctgtgggttctaagagaataagaggttccagaaaccaaggataagtgcccagtggagaggtttagttgctgggagaggaaggttttggatggtttaccatgtccaaggttaagcaaacagttctgcctgagttgtttcttgctttgttttgttttgttttgtttttgaggttttgaaaagggtgcggatttagggaatcagagaactggccgttgtggttgggggtgctcgtgtttttcccatggaaaaagctagccattgaatgacgggtctggggcaaagagtcagggaaggaggagttctgaaagtcccagtgccagactcagggtgggaggcagcatttgttgtctcaggccagatagcctcggggggaagaaggaagtgtctggtggaatctgggtttcctgggacagggttggggagccaggtgtcaaggtccaggggacagggttgaatgctcacagctgaataggaaaagtcagtagactgtggtaggactgaggggctcaggaggcagcccagtgatagggtccaaggaaccagtggcatggagagaggtccttgaaaggttttgaaccccataaagagaaacacagagatgcccaggaacttgctctttagtaaagcagctgggagcagggatttggctgggcaatggagagaaaggtctgaggtaagtgggagggagcggggacctagtgtgggcatgaggactattgcaatgtggaagagtcaggggcacattgtctgggctgaactgtgggctgaagggacgaggctggggcactgggtgggaggaaaagggcttcagcataagagtcagaacccgccccccttcctttatccccccaatctcaccagtgcaccccacagacaaggcgatggagagaaccaggtcccacatgctgacacaggtgtccacggccaggtggtgagtttggggctggggggcctccctgaggagccctataaagccttcattctccaggaccccgcccttgccctgttggcacctagatgctgaccaaggccctccccatgctgctggaggctggacaaccccctcccacacccagagctgtggaaggggagggagagccagcacttgctgttccacacatactagatcagtctggaggcattcccacggtgtgaggtcagattgggcagggcctatggatcatggagatgtgatctagggaacaaagccagagaaggcaggctcaggatgaacagcaacaggggttgggatgatcactgattcttttttaaaaaaattctgagacagtctcactctgtttcccaggctggagtgcagcggcgtgatcgcagctccctgtagccttgaactcccagactcaaccgattctcctgtctcagcctccaggatagctgagaccacaagcatgcaccaccacatccagctaatttttaatttttttgtagagagagggtctggctatgttgcctaggctggtctccaactcctgggctcaagccatcctcccacttcggtctcccaaagtgatgagattacaggcgtgagccaccacggccagccccaatcattgattttcaatacaaagtctcatgtgcctaagtcccaagtacttcctttgcaccccaaacctaatatgccctgaaatatcagaatgatcggattgtgagacttcctggtccctatacccgtctgagcccagaagctggacctccaacttaccatgttcctgaaatagaagcgttggcattcagtactctctgattcttgcacttccacactcagaaaatggttccccacatacatttctccctcatcataaaaccttgtgataccacatattgtccaatccagaaatatgactctcccagaccaagttccctattatttcaaaatccaatgtccactaaacaatatggggttccggtggctcctcactcctcattctccatgcctgtacaacgtacaggtacagcggggattcctgttgacctgccctcctaggtcagaattgtcctcatgcaaaatccaatgcctccttctcactgaaatgtctagctatcaggagccaggtttatacactccaagattaagctgcaagccaggcacggtgagtggctcatgccagcaatcccagtgctttgggagtccaaggctgaagaatcacttgaagtcagaagttcaagatcagccagggcaacaaagtgagaccctttctctacaaaaaaaaaaaaaaaatttaattagccaggtgtggtggcaagcacctgtagccccatctactcaggaggctgaagcaggaggatcccttaagtccaggaggtcaagggttcagtgagctatgatcacaccactgcgctccagcctgagtgacagagcaaaagacccagactgtgtctcaaaaaaaaaaaaaaaaaaaaaaagaattagggtggcattgagaaatctcattttggtgtctcagaaaagaatcaagaataagagtcctggtgttaactcttattataagagtccactgttaactctataagatttctttgattttgaaaaaaaaaatgtgatttcatctgttcaataaaaccagagcagcttacgctgatccagacccagctgtgtctcaagaatttgacaaaatcttcccccatttccagctgaatgaccagatcaattccaagtacagtgaaggagacagaagtggacatagataatcacaattcaagaccaggatagagggatattcacagccagtggcctgatttcccccacacaaccactcgttccctggaatgaccgtctgaaaggaaatttgcctcagcttgaatgagaaccacctgaatccagtgtcccaagcatatcctcatccccatgataacctcaaccaaaacctgacccaaaccaatttaacacagcccaatccaaccacatcacccacaagcccaacccatca

SEQ ID NO: 1560580 - DNA, 4001 bp, Homo sapiens
gctgggattacaggtgtgagccaccgcgcccagccaaagcccttccttttctcagggtccccccaggcccatcccatgcgtgtgctcagtagggagaaggcacaggtgagacagagaccgagagacagagcctggcagagagatacagggtgagacacactggctagagagggaccagagaaggacagagagagggggagatatggagactgaagacagagaagagagggagagagagaacaaaatagtcacacggagagacacaaccgaagccagttaccaagagacataatgaaagcgacacaaagagacatagaggaacacagatggagacccaggcagccatggggagggtggtccagccccaaccctgcctccccatgtgacctgaaccagaactttccctctctcccccagtcccaaggctggccttagaggttatcctggggaaaatgcccagctgttattcctctgggacacagacacctgctccccagaccccaggcccctactcacttcctgatgcagtgggcagctgtgaggacccactgggggtgcaccagaacaccgccgcagactgccctgccacgagaggccacaagcacctgccagggttgggaatgcttctcgcactcccagcctcccacaatccgagacaggatgaggggtgcagcacctgcagagggggtgctagatcaggggaatcagggttgacaggaggaactgggggactcggataggagatggatttaggatgtgggtttgaaaagacacgggggcagagaaccaaggctgggagtcctgggacatgggcagggggagctgggaaaggctgggaattctgtcaatcttccctaggtttgcaggttggtggctggtgctggtggagaggcttcatgctctgggagcagagttgaacccagggatcagggtaggagacacaagacagcgcccagaccatatcttgagtctggggattgggtcctttgtggtgatttggggtcttggactgggagaagggaaacttggtacaagttgtggattctgaggggataagcggtgctaggaaccagggataagtgccttatggcgaggttcagttgctggaagaggaaggttttggaaagtttaggaagtcccaggttgagaaaacagttctggtctgagttggttttgttttatttgtttttctttttgtttttaggttttgaaaaggatgcagatttggggaatcagagagctggcagttgtggctggggatgctcatgtttttcctaaggaaaatgtgggccactgaatgaagagtctggggctaagagtcagggaatgaggagttctcagagtcccattgccagactgagggacccatttgttgtctcaggccagatagcctggctaggaagaaggaggtgtctggttggcatctgggtatcctagggcaagattgggaggccaagcatcaaggtctctgggatagggttgggcactcacagctgaatgggaaaagtcagtagactgtgataggattgaggggctcaggaggtggaccagtgatacggtccaaggaaccaatggcattgagagaggtccttggaggttttgagccccacaaagagaaacacggagatgcccaggaacttcccctttagtaaagcagctgggagcagggagctggctgggcaatggggagaaagttctggggtaagtgggagggagcggggacctggtgtgggagtgaggactgttgcaatatggaggggctgggggtatgggcttggagtggggctgggagagacagaaaagagcccagctccctgtctgggctggggtgctgggttgggggggaaagagcctcagcttgacagtcagggctggctccctctcctgcatccccccaaccatggcccctctcaccaatccacgtcacggacagggtgaggaagacaaccgggacccacatggtgacacagctctccgggtgcaggtggtaagcttggggctggggagcctcccccaggagccctataaaaccttcattccccaggactccgcccctgccctgctggcacccagaggctgaccaaggccctccccatgctgctggaggctggacaaccccctcccacacccagagctgtggaaggggagggagagctagcacttgctgttctgcaattactagatcaccctggatgcaccaggccctgtagctcatggagacttcatctaggggacaaaggcagaggagacacgcccaggatgaaacagaaacagggggtgggtacgatccccgattcttcatacaaagcctcacgtgcctagatcctttgcactccaagacccagtgtgccctaagacaccagcactcaggagattgtgagactccctgatccctgcaccactctgagaccagaaactagaacttttattcctcatgctcctgaaatagatgtcttggcatttagtacattcttttccttgcactcccaacccagaatccagctccacagatacattgctactgtcatcataaaaagatcttgtggtccacagatcctctagcccagaaatatgagtctcccaaagttccctagcatttcaaaatccaacgtgcagcaaacaatgtggaattccaataaccccccactccttgttctccagacctgtgcactctatctgtgcaacagagatgcctgctgacctgccctcccaggtcagaatcatcctcatgcaaaatccaatgccccttctccaacaaaatatttagcctttaggagccaggtttatgtacctcaagattaaacgacaggtcagtcatggtggctcacgcctgtaatcccaacactttccgaggccaaggtaggaggatcacttgaagccaggagttcaaggccaaccagagaaacaaagcaagatccatctctacaaaaaaaaaaaaaaaattttttttttttgagacagagtctcactctgtcacccaggctggagtgcagtggcgcaatctcggctcattgcaacctctgccttctgggttcaagtgattctcctgcctcagcctcctcagtagctgggattacaggtgccgtgtgccaccacgcccggctaatttttctattttttttttttttagtagagacagagtttcaccatgttggtcaggctggtctcaaactcctgacctcgtgatccacccatctcagcctcccatggtgttgggattacaggcgtgagccactgtgcccggccccccaaaaaatttaaaaattatctggatatggtggtggactactgtagtcttagctattgggagaccgaagcaggagaatctcttaaggccaggagttcaaggctacagtgagctgtgatcacgccattgaactccagcctgggaaatagaatgagactgaaacctcgatttaaaaaaaaaaaaaaaaagattaaggtggcatgcaaaatcacaatttgtagtctcagaagagaatcgggaactcttaagagccctggtacctccactgttaactccgtaagatttcatcaatttccaaaaagttggttatttcagctgttcaataaaaccagagtagctcacttgatccagcccgagctgtgtctcaagaatttgacaaaagtggctgggcgcggtggctgacgcctgtaatcccagcactttgggaggctgaggcaggtggatcaccaggtcaggagttcgaggccagcctggcaaacattggtgaaaccccatctctactaaaaatacaaaaattagctgggcatggtgctgcatgcctgtaatcccagcaactcaggaggctgaggcaggagaatcacttgaacctgggaggcagaggttgcagtgagccgagactgcgccactgcactccagcctgggcaacagagtgagactctgtctcaaaaaaaaaaaaaaaaaaaaaaagaatttgataaaatcttcccctgtttctagttgagtgatcaggtaaactccaagcacagtgagggag

SEQ ID NO: 1560581 - DNA, 4001 bp, Homo sapiens
gtgccgtacggagaggctggcctccaccatctggctccctggctcttggtcggcctcaagactgtgcaggcccagcccgatggtgtaggagctgtgggccacggagggcaggtcagttttgtggcaactacatccttacctccattctcatcttcaaccccattcccatccccatctcctaaccccaaccccaccctcttcgctaaacaccctaagagctacttaaccatggtctcaaatcctcattcacaaaaattcagggacaagaacttgccttagttcactagagactcagcactgggctgagatttcaagtcaggactctctgagtccttccgaagcaagattcccgcctcccagcccttccctctggggctccccggatccaggctcattccgtcctcctcccagagccttcaccgctgtttccccctgagcaccccaagatgagcctgatattaggccccgcccccggacccaggccctgcccactccccctacctctgcactcacttctggaaacagtgtgcggctgacagcacccactgcggatgcaccaggacgcccgagcagaacaattcgttttccatgaccagtgccgcctgccagggctgcgagtgcgggctgcagtcctcgccgtttatgatttggctgcagctaccagagacgagcgatcctgagggcggagtcagggatgggatcgggaccaggaggcgggcccagggttcctgggggtgggcttaccgagcaggggcgtggtcagaggttcaggagcagtcagggctcctcggggcggagtcagggctgggaacgggctcaggaggcgggcccagggctcttgggggaggggttaccgagcaggggcgtggtcagggcttcaggagcagtcaggactcttggggggccgagtcagggctgggggcgggcccagggggcggacccagggctcctgggggtggggttatggtgcaggggtcatgatcggagcttcaggggctggtccaggatataggcctagggctcccaggggcggtgatcacggtgcaggagcctggtcagggattcagggtagtcagggctcctgggaggagagtcagggcatgggggtgggctgagaaggcgggatcagtgctcctagggttggggttacagcgcaggggcgccatcaaggcttcaagagctgggttatggctagaggcagtctcagaaggtgggaccagggcttctggggcggagtcagggctctggggtgagctctggaggtgagactggtgccatcgcggtgcaaagccacggtcaggaggggttcaacagaggagtctaggctcatagcagtaggatcgggtccttcggggtgaattaaagctcagggggtggagttgttgctgggagcaaggatcgggtcacttgtctgcgcagactgatgctcaaagagtcggtcctgcgccgagtcactcctatcctctcccagccttgcccacagtcacaccaagccacaagcccatgcacaccaaaacaccgttttatagtcctgtgaggtgagttccttggggatgggagagggggatctcaggactgaagacccaggaagcaggcacagattcccagcaatggatcacgccccaggaagcacaatctcctgcaccctcggcttcccctgtccccatatcatcattacactgttgtcactccaccagatattcagaggcacaaactgtcagagtctcacaggtacaaccacacacccaggcacactgccacacacaaatttaccacgatacaaggagttgcaggggcacagccatgggggacggataacacggtaccgtctcacaggcagctttgcagtcacaagcaagaggacactgagtcacacctgaacattaacaaacactgtgcccccaagcacggacagacacacacacgcatactcagatacctgcgacaccaaggatgaggtaccccaggaaccagccccagggatttcctgctgtggccatcacgtcagcacctggggatgaggactgagacttagccgtgtctggggatcttcagcccaagtctctccatccctctctttgtccctccctttcttccctctgggacgttattaggtaggcaagagcctagaccatctaccccctctcccatccatggacccagaacctagagagacagatttagagactgagagagaaaaagagagagagagatgggaaaagagagagagagagagaactaggtagaaaggaaagtttagagaaagcatctagccatctgtgaatggggagagatggtgtctagccacccacaaacaagcatggagggaagacacacagagaatcagagccggagagacagagtgcttgagagatatcctcagagacagtctgagagttagacatggagatatagattcagagagacagagagacccctaactagagacagtgactcctaactagagacagtgagagatctgtctagagagatgtggagacagaaggcacagaggctgagaatccagcgacatggagctgtagggagagttggatcatgaacactgcaggcttttagtgggggaccaccaggcctcttacccggccacctctgggctcctggattccactgctgggctgagctccagcctgctgcctcccgcaggggcctccttggggcttataagcatcctcagcctgggctggcctgcccccaggggatgtgttccaggggtcaggtgctgcaaacttccagctcaactctctcaggctgcctcaactctgaccaggcagtggttgggggcccagaaggggctggcagcagggtctagggacccagggaggagacccctgcccagatcctagactccactctcctttttctttctctctctctctctcattctttctcttttcatgttcttattctctctcatgagatacctctctcttgcctgtatctctcattttctctttctcttcttctttctttctctcattctctctctcattatttttctcgtgttttctttcatttcctctcattctctcctgttctctctcatgttctttctctttttaaattaaatctctctctctctctcccctcctccttcatccctctctttctgtgcttctccagcaaatttccccaggttcgtatccagcctacatcacgaactatttttggaaccttgggcaagtgactgcacccctgtgagcctgtttttccaactgtaaaactggagtgaccattatgccccatttcccaagtggattcaaagaggtaattcagggaaaggcacacagtgccaggcacattgtaggctctcggtgagcgggagaactaaaaagtcttcgctcagtgaaaagcagctgagtgcctaccacactccgagctctgcggcaggtgctggggccacaggaggaaccagcaaagtcctcgtcactggggatcgcgtcctacccgggggcacagaccataaaggaaaactgcagggaccagcatataaggtggtggtcggggagactcagagaaggggaacatttaagctgagatcccagggaagaggaggaggagggtcgccgcagcaggggcggttgcggggtgcaggggagaacttggctccagccagaggagggcagggcgggtaggagggcagggcgggtaggagcgcagaccgggaaccgggcgggcctgcaggagtttacgtaccaggattaaggagcttgggttttacttaagtgcaatggattttaagcacgaggatggagtgacataatcttatttactttttaaaaacttccagcttggagagtgatggtgggggcggggcggggggcagtggcaacagcccaggtgggaggtgacggggtcaagggagaagagaggtgaatggacacggggtcccctctgcatgtggagccaagttactgcccgatggatggaaagtggggggccaggagcagaggggccaaggatggcgtggaggcttggtctgc

SEQ ID NO: 1560582 - DNA, 4001 bp, Homo sapiens
agggctcagcttagggggccacatggaggggaagagcaggcctaggtttctgaattctcagatgaaaacatgccttctcaatcctgtcaatctcctcctctcacacacagacctacagactacatgcatgccccactccatcatcagtcctcccgtgcccattcactggttcttacccttttttttttctttttttctttcgagacggagtttcgctcttgttgcccaggctggagtgcaatggcgcgatctcggctcaccgcaacctccacctcccgggttcaagcgatttttctgccccagtctcccgagtagctgggattacaggcacgcgccaccacaccagctaattttttgtatttttagtagagacggggttctccatgttggtcaggctggcctcgatctcccgacctcaggtgatccgcctgcctcggcctcccaaagggctgggattacaggcgtgagccaccgcgcccggcctggttcttacccttgctgatggccctggcaccaccatcattcacgaactcaccccaagaaccacgcgcacaacagcagtaacagccaagcacgcacgcagttctgcagacacgcccatgttgcctccacaggtgcagctaacatacagctctgtctccaggtacacacgctcccgggcagcctagcgggatcgcacaccctcatccacagtgtctcagtgccacgcacagatgccgtgtgtgcacagatgttcagactgccacatactcttctgcacacaggcacacactgcaagtcagtcacctggcacccatctcccagagatagctacccctgcaccctctatccctccaggcagagacagaaactccagacacacagctgcaccatcacacatacagtagcatttacacggcctcacacagacacacacagtcacatacagtcacccctacacagagcttcaggtagtcacacggtcacaaatacgggcatccataacgtcacactcagccacaatcacataatcgcctgcaagcagcacacagtcacagctttccatggtgatgaccacttttgttgcacgcaatcccgggacctcagggacaggaactgcagatacctgcagtcatatacaatgccaagtcaccacacacagccaaacacacagtgaacacccccagtgctacatgcattcacccacacagctgtggagccacacacaatcttaaatgcacacacaatcacaaaaccacacacacagcctcaaagggtcagtgccacctgccgcacagtcacctgatatgggaaaaggcatccccctccccgacacacaccgtggcagtcacagggccacatacgatcgcacaaccacaagtacagacagagactcacattcacccggtcccggagtcatgcccaggctcacacagttccccaggggacaggcgctctagtgccgcagagacagtcctcccaatcccacaaccctcccaccccagagttctggttacctgtgacccccagaagcaaggctgtgatcagagcacagagcacccacatccaggggggtcttgctgtagccatggccgctgcacctggatggggaatgtcagagggttgggaggcccaggcgatccggggagcccttaacccacttcccctccctcccctaccttatttccccaggtagagaggaaccacaaggacgggccaccatcggcactgcgctgagacccaggcactatagaattcagaagataggagtctagcagcctccagacagggcaaggaggggacagagaaagatgtgggtgcaggacgcacagacacctctccttccctgcctgctgagccaccctcaccaggtctcacttgccctgtcccccaggtagggggtgggggatttgctcccagctcagccgcagacttctcaggcctgtgccttcctggccactgcctcctcctgggctctgggcaccgggcctgagttataaccacccactgctccctggggcacattcccgggcaatgaggtgcctatcgggccttagcaatagctcctcctgctccccctatctccacccccagagcaccccccacccagtccggaatgtcactccctacctccctggcccggagaatggggaggggtctccggaagccaggccagccccttccctgcctcccccagccttaaggatctggcttctcaccaactctgggtcactattcttggcgcctggattgcttgctttcttctctgcattttgctcattccaccactgtctgttcaccctcgatactcctctttccatctttgtctctggttttttctcagagtcttcttccatctctctgtggttctccctcggctatctttctgagtctctctcaatatctcgtgtctctctccacccctctctctctttctatccctctcgcctctctgtctctctgtctctgtctctctctctctgtctttttctctgtctgtctctcactcactctctctctctctcctcctgtctgtcttaggagccttgttttgttctccttgggccacaggtgtttctgtctccctgttcctccctgtctttctatgcctctgtgattctttcttttttaaaggttctgaatgatttgtcaaatataccttagagttcttggcccatttattttcctttatttcacttctgctctatttgttgacagcattttttttttagatataactaaggtacaacaaactgcttgttcgtttgtttatttatttatttgagacagagtcttgctctgtcgcccaggctggagggcggtgatgtgatctcggcccactgcaacctccgcctccagggttcaagtgactctcgtgcctcagcctccagcatagctgggattacaggtgtgccccacgacacccggctgatttttttttttttttttttttttttagtaaagacagagtttcaccatgttggccaggctggtctcaaactcctggcctcaagtgattcacccacctctgcctcccaaagtgctggaattacaggcatgagccacggtgcctggcccaaactgcatatttaaagggtagagtctgatggctttaggtacttgtcacatcagcatagtcaagaagatgatcatggccgggcgcggtggctcacgcctgtaatcccagcactttgggaggccgaggcgggcggatcacgaggtcaggagatcgaggccatcccggctaaaacggtgaaaccccgtctctactaaaaatacaaaaaaattagccgggcgtagtggcgggcgcctgtagtcccagctacttgggaggctgaggcaggagaatggcgtgaacccgggaggcggagcttgcagtgagccgagatcccgccactgcactccagcctgggcgacagagcgagactccgtctcaaaaaaaaaaaaaaaaaaaaaaaaaaaagaagatgatcatagacaccaccctgaaaactgtgcttctgcccctttgcgtgtatctgggactctgttaatctctctttctttacacctctgtgtctccatttgtgtctttctctatcttctcttttctctctgactctgtgtgtccctgtgtcccaggctctctgtgtgttctctctgtgtttctgtagttgtgttattctgtctctctctctctctctctttcttccccaccccttcctccttccctgtctttctgcctccctctccctgcattttaggcaggggagactcaagccactttgcagagggagctctcaactccttctcttgccttcactctgggcccaggccgtggagcacaaagaggcagggacccagtctgggaatctgcaggtgccgtggcccggctggtgtggccaggcatgggtgagagagttgggcagggctacttgttattgggaaaatagatcaagaggccaggagaggggcagacggcttgggaaatgggcattgggtggggaacccgaaaggtggcttctccctctccactcctgagc

SEQ ID NO: 1560583 - DNA, 4001 bp, Homo sapiens
ctgtgtctcaaaaaacaaacaaacaacaaaaacaaaactgcccagtggcttcctactgtgctcagaattaaatccaaatgcccatcacgccctgcaggtccccaaatgatccaattcccccattagaaagtaagttcaggaaaacagcaattttgcttgtttttttttgttttcttttttttattttcttttccactgctatgcccgcagggcctggcacacattaagtactcaattaagcaacagccgaatgcacctggctatcagatggcctcgtgctgggatgggggggatgcctatgtcacctcctgcctgacatctataagacaccctcagggttcagtcgcatctgctgttcatttacagtgtagactcacggttttttgcagtgggcagctgtgaggacccacagtggatggataaggaccccaccacagagcaagtggcccgaggtgtagagggcagcttggtaggggtgagatgtcttgtcgcagggtccgccatgcaccaacttattctgctcctctgcccaggctgagggagagaagatctgagtcagagaggagttctggagaaaccaagcgcatccccctcaacatgaactccagtcaagattggtcaggtgcagtggcttatgcctgtaatcccagctgaggcaggaggatcgcttgagcccaggagtttgagaccagcctcggtaacacagtgagacctcatctccacacacacacacacacacacacacacacacacacacacaaattagcagggtatggtggcatacgcctgtagtcccagctacttgggaggctgaggtgggagggtcacttgagacccaagagttcaagtctgcagtgaactatggatcatgccactacactccagcctgggtgacagagtgagaccctgtctcaaaaaaaaaaagcttctctgtatttccactcccaaacttaccccattcccattacaaacccaactgtatcccctattcccgggctctctccaactttccaacctacctcctacctcttctatgtttagatccccatccctaaagccaaccccaccccaaaccctcatatcttcaaacccacctcccaccaccctccctatctgtattccccacccttagcctaatccccaacgtcttcctcatttcaaagctcccccaccccaaccctgtgcatatccccatccccaataccagcctcttctccatcaacaagcccaaccctgtctgcaagcctcccccatccaaatgccctttccccacctgcagcaatcagactcagcaccaccatcagcttcttcatggccgctcctgagaggggaagccacatggtccattagtcactgcctcgaccctccccccatccctctgtctgctccctctgcatcctctccttccttcctggcctgctatggtctcctgccttgacctctgtccttcccatctagcctcctgatttattcttcctcagcccacatcttccatcagaggatcccacgaaaacagtgccaaagagaattcagaactacgtccactggtccagtaacccatggtgagattctgattagatctttctactttcttgggcactgatttgccttcctgtcgacaggagagggttaccctagggggccctagcgttcttcctctgtatgggagttttcctcggagcctggctctgtgcgcaatggccacccaccccgcccacccggcaggttctgtgatgtctgtgatctcacctgctgcaggcctccgggctccggggattcttgagtcgggggaaggaacagctttgagacgaggaggcagaaagagttagaaatgcggggagccgtgaggagagaagacactcagatgcagtggcagagccaagcggaggacgcaggggccgcagagcccagggctgcagggactgccagacacacacccccagctcccaggcctccctggaagaggctggttctgtccccagatgcttctggaacgtccttttaacccctgtctctcaggtccctgagccaggagactggctacacccttttcctccttacccaggcctcccacacacattcctcccgcccccacgctctgctcttggtgacccctgaccaggcctccagggaagggagcactggtccctgagtgcagtgagggcctggactcctgggtctgagggaggaggggcttgggggcctggactcctgagtctgagggaggaggggctgggggcctggacccttgcgtctgagggaggaggggcttggggcctggactcctgggtctgagggaggaggtgagaacttggactcctgggtctgagggaggaggggctgggggcctggactcctgagtctgagggaggaggtgggaacttggactcctgggtctgagggaggaggggctaggacctaaactcctgggtctgagggaggaggggctggggcctgaatctgaggcagaggaagttctagtcggctcagtccttagacctccgggttttggagaaagaaagtgtctgaagacaaattccggcctctggggcaagcagatggtgccccaggcctccctgcacccccagcactctctgtgccacccagggacctgcaggccctcactccgggctctagagccctccggcactgggaagcagcctgcccaggttcagtgcggttggggtgactcacacacctgcccgtaggtccctctgtgtgctgcctgccgacctctgtgtccccaggagagagcgagccagccagccggggagacagctacagcgtgtgtcaccacactggcccccgcccctgccccgggctggggagcaggcccaggcgcgatggggaaagggcccaggaacaatcgggctttgtccgcccccagcaccccagtgccatgctcccagcagctccggcctcaacctctcttccggcgggcaggcgggagggcggttacatcaatggcttccttttgtccctgtctgacagtcctcctttgcagtctctgactgcccacctggccctgactggagatttcggcactccacatcctcctggtccttctcctccaagtctgcccacccctgaggtctcttgctccatctgtctccctggccatggaggggagggagcttccatctctctctctctcccatctcagtctctgtatttgtgtctctctccctctttttttctctctctcccttcctctctcccttcctctctcccttcctcccttccttccttccttctttctttccttccttcttttctttctttctttctttttttttgacggagtcttgctctgtcactcaggctggagtgcagtggtgtgatctcagttcactgcaacctccgcctcctgagttcaagcagttctcctgcctcagcttcccaagtagctgggattacaggcacccaccaccacgcccggctaaatgttttttgtatttttagtagggaagaggtttcaccatgttggccaggctggtctcaaactcctgacctcaggtgatccacccaccttggcctcccaaagtgctggattacaggtgtgagccactgtgcccggcctctctccctttctttccccttgattctctgactctccgtgcttatcttctcctgggtctcttcttagatttccccgggggtagcactgtgtgtgcccagaagggagtcagtttccccaggaagtagcggggatgattcccgagcgatgaggaagctagcaggatggaagaggacttgaggacttattgatgagatgcggacacacagcgagaggcatggagttaagcagaaatcggagagcacttgggaacgacgtggggctgtgataagatggtggtgctgggcagtagcagagggatctgggaagatttagggaggtgtctttgaacttgggcctagaaagctgagccaggcgtaggtcaggaggaaaggccgtgaaaatgcctggcctgggtgcacatgggaaaccacaggcagtggtt

SEQ ID NO: 1560584 - DNA, 4001 bp, Homo sapiens
cagcctgggtgacagagtgagaccctgtctcaaaaaaaaaaagcttctctgtatttccactcccaaacttaccccattcccattacaaacccaactgtatcccctattcccgggctctctccaactttccaacctacctcctacctcttctatgtttagatccccatccctaaagccaaccccaccccaaaccctcatatcttcaaacccacctcccaccaccctccctatctgtattccccacccttagcctaatccccaacgtcttcctcatttcaaagctcccccaccccaaccctgtgcatatccccatccccaataccagcctcttctccatcaacaagcccaaccctgtctgcaagcctcccccatccaaatgccctttccccacctgcagcaatcagactcagcaccaccatcagcttcttcatggccgctcctgagaggggaagccacatggtccattagtcactgcctcgaccctccccccatccctctgtctgctccctctgcatcctctccttccttcctggcctgctatggtctcctgccttgacctctgtccttcccatctagcctcctgatttattcttcctcagcccacatcttccatcagaggatcccacgaaaacagtgccaaagagaattcagaactacgtccactggtccagtaacccatggtgagattctgattagatctttctactttcttgggcactgatttgccttcctgtcgacaggagagggttaccctagggggccctagcgttcttcctctgtatgggagttttcctcggagcctggctctgtgcgcaatggccacccaccccgcccacccggcaggttctgtgatgtctgtgatctcacctgctgcaggcctccgggctccggggattcttgagtcgggggaaggaacagctttgagacgaggaggcagaaagagttagaaatgcggggagccgtgaggagagaagacactcagatgcagtggcagagccaagcggaggacgcaggggccgcagagcccagggctgcagggactgccagacacacacccccagctcccaggcctccctggaagaggctggttctgtccccagatgcttctggaacgtccttttaacccctgtctctcaggtccctgagccaggagactggctacacccttttcctccttacccaggcctcccacacacattcctcccgcccccacgctctgctcttggtgacccctgaccaggcctccagggaagggagcactggtccctgagtgcagtgagggcctggactcctgggtctgagggaggaggggcttgggggcctggactcctgagtctgagggaggaggggctgggggcctggacccttgcgtctgagggaggaggggcttggggcctggactcctgggtctgagggaggaggtgagaacttggactcctgggtctgagggaggaggggctgggggcctggactcctgagtctgagggaggaggtgggaacttggactcctgggtctgagggaggaggggctaggacctaaactcctgggtctgagggaggaggggctggggcctgaatctgaggcagaggaagttctagtcggctcagtccttagacctccgggttttggagaaagaaagtgtctgaagacaaattccggcctctggggcaagcagatggtgccccaggcctccctgcacccccagcactctctgtgccacccagggacctgcaggccctcactccgggctctagagccctccggcactgggaagcagcctgcccaggttcagtgcggttggggtgactcacacacctgcccgtaggtccctctgtgtgctgcctgccgacctctgtgtccccaggagagagcgagccagccagccggggagacagctacagcgtgtgtcaccacactggcccccgcccctgccccgggctggggagcaggcccaggcgcgatggggaaagggcccaggaacaatcgggctttgtccgcccccagcaccccagtgccatgctcccagcagctccggcctcaacctctcttccggcgggcaggcgggagggcggttacatcaatggcttccttttgtccctgtctgacagtcctcctttgcagtctctgactgcccacctggccctgactggagatttcggcactccacatcctcctggtccttctcctccaagtctgcccacccctgaggtctcttgctccatctgtctccctggccatggaggggagggagcttccatctctctctctctcccatctcagtctctgtatttgtgtctctctccctctttttttctctctctcccttcctctctcccttcctctctcccttcctcccttccttccttccttctttctttccttccttcttttctttctttctttctttttttttgacggagtcttgctctgtcactcaggctggagtgcagtggtgtgatctcagttcactgcaacctccgcctcctgagttcaagcagttctcctgcctcagcttcccaagtagctgggattacaggcacccaccaccacgcccggctaaatgttttttgtatttttagtagggaagaggtttcaccatgttggccaggctggtctcaaactcctgacctcaggtgatccacccaccttggcctcccaaagtgctggattacaggtgtgagccactgtgcccggcctctctccctttctttccccttgattctctgactctccgtgcttatcttctcctgggtctcttcttagatttccccgggggtagcactgtgtgtgcccagaagggagtcagtttccccaggaagtagcggggatgattcccgagcgatgaggaagctagcaggatggaagaggacttgaggacttattgatgagatgcggacacacagcgagaggcatggagttaagcagaaatcggagagcacttgggaacgacgtggggctgtgataagatggtggtgctgggcagtagcagagggatctgggaagatttagggaggtgtctttgaacttgggcctagaaagctgagccaggcgtaggtcaggaggaaaggccgtgaaaatgcctggcctgggtgcacatgggaaaccacaggcagtggttggggtggttggtatgggctggagggtgagggtgtgtgcgtggcagagtggagagaaatgaggagggggaagtcactgcgtaataaggacaatgataggaatgaagtctggctcagcacctgcttgggctgggcactacaggtaacttaaaaaaaaaagttcttttttcttttgagacaaggtcttgttctgtcgcctaggctggagtgcagtggcacgatccttgctcgtggcagcctcaaccctcctgggctcaagcgaccctcccgcctcagtcttcccaggagctgggaccataggcatgagccactgttcccagccaacccttttctttgtcttgcattgaatctaattgtcatcttgcattgtgcaccccccatcactccagggatgaagactacttcggtattcagtatactctccgggtgctccctctcacatttggtccccactgacctcagcaccttcttctcaggacgtgctatcttcacagacagcaagtctgatgttgcacaacccagtgaccaggccctatccctctgcctcctctctctggggggtcccttcctctctgtacccacaccctcaaccccaactcagagctgcacctctcccacctggaccaggatccctctgttctctgtatcccttgccccagagagaccttcctgtgccttgtgctgaccttgcccctcctctcacagacgtgccctgggtccccatctcccttgggaccaagtcccagccccccagcctggcatttgaggacctttagcatccagggaagtcctggccaatgaaatgtgatgccaagcacgcatgcacatttacattttccaatcaccatacttttttttttaagtcagaagattttttaagtgtc

SEQ ID NO: 1560585 - DNA, 4001 bp, Homo sapiens
acagaaggagcccactcagaaacccaggaggcgcatctcatctggggaaccacagagagaccctgagcacaggaggcagggcctggaggggacagagaccccctgagtcagcagaagcaggaagagcgggggcttcagccgacagtctggtcctcccaggatggaagctgtttgaggagggaagggttctgactcagggactccttggagagggtcagtgggggccctgaggtgaggtcagacttcccagtccagctttcaccttcttctcctgcagtttccaaggctaaggatagcagtaagatctgcaggggcaggagaagggatcttgccatggtgccctgctgagccgctcaggggctgccaggcgaggaagggcctctcctgctggagctgagaaggagaaagcattcaggcccagcccctccccactcagacccaggggtccaggccccagcccctccccccacagacccaggagtccaggccccagcccctcctccctcagacccaggggtccaggccccagcccctcctccctcagacctaggggtccagaaccccagcccctcctccctcagacccagaaattcctttctctggcctctccttccttacactcagaagtccagacccctaacctcctcctccctcatacccaagagtccagaccctagcaccttcctccctcagacccaggagtccaggcccccagcccctcctccctcagacctaggagtccaggcccccagctcctcctccctcagacctaggagtccaggtccaagtccctcctccctcaggctcaggagtccaggccccaacccctcctccctcagacccaggagtccaggcccccagccccgcctccctcagacctaggagtccaggcccccagctcctcctccctcagacctaggagtccaggtccaagtccctcctccctcaggctcaggagtccaggccccaacccctcctccctcagacccaggagtccaggccccagcccctcctccctcagacccaggagtccaggcccccagctcctcctccctcagacccaggagtccaggtcccagtccctcctccctcagacctaggagtccaggtctcagtccctcctccctcaggcccaggagtccaggccccagcccctcctccctcagacccaggagtccaggccccagcccctcctccctcagacccaggagtccaggccccagcccctcctccctcagacccaggagtccaggccccagcccctcctccctcagacccaggagtccaggccccagcccctcctccctcagacccaggagtccaggccccagctcctcctccctcagacctaggagtccaggtcccagcccctcctccctcagacccaggagtccaggcccccagcccctcctccctcagacccaggagtcgagacccccagcccctcctccctcagacccaggagtccaggcccccaggccctcctccctcagacccaggagtccagaaccccagcccctcctccctcagacccaaaattcctgttcttcagatccctagagacccaggaatctaggctccgatcttgcccttccctgtggaacccaaacttctgactctgtagttcgtttttccctaaaaggccccaaattgcagacttccaggccctcactgctcaggaccgggagtctaggctgcagcccctacctctcgagagcagagtcaggcttggagccagcatcaccctctcccctacaggtgcacccttgatgaagcctcttctcacctcgagaggatctgatgtgatccaagttccgacttgggctggcacacagctgggctccaaaatcttcatccctctgctgggccgtcctcttatatcaccccccgccccatgcccggccccagcgccctggggtgcaggcggagccgactctgggacacccccgcctgcatttgcggttctggttatctggaaccctgacgcagcgagagcaattggcaccactgcactctctctccaccctccctccgaaggacgggcggtgcccagctcctgcgcccccgcacattctggtcccacagtccctcctggctgctctcgggggagggacccggtgcgctgggtctgaggggcaggagcgggattcaagcagtcgctgagctcagagaataggctctggctcgggtccttctctggggcggttttctttctttcttccctcctccctccctcccttcctttcttttttttggatggagtctctctctatcgccaggctggagtgcggtggcgcgatctcggctcactgccagctccgcctcccaggttcaagtgattctcctgcctcagcctcccgagtacctgggattacaggcacgcaccaccactcccagctaatttttgtatttttagtagagaccgggtttcactatgttggccagaatggtctcgatctcctgacctcatgatgtgcccgcctcggccccgcaaagtgctgggattacaggcgtgagccactgcgcccggcttctggggccattttcttgccctcaccccctctcaggggtggcctagaccctacatcctaattctggcccgcctgggggaacttgtccaagctgatcccagtcgtgcctgtaattacgcctgaacccattcccaactctaacagagaggtgtaagttaaaaacaacgctttccctaaccccaccccactaatatttgccatgtttaggatctatgttcttatggtcattttaatcatgttatacatagatttctttgtatattatgtatttataacaaaaatgtctgtacttaacattatctaatagaacatttttgagggcttcatttattaatttataagcaaatatttatttttctttttttaacttttcagttcgggggtacatgtgcaggatgtgcaggtttgttgcgtaggtgaacgtgcgccatgggggtttgttatacagattatttaatcacccaggtattaagcctagtacccattagttatttttttctgatcctctccttcctcccactctccaccctctcataagccccagtgtgtgtacccaaaggaatataaatcattctgtttaaagacacatggacacgtacgttcattgtagaactattgacaacagcaaacacagggaatcaacctaaatgtccatcagtgatagactggattaagaaaatgtggtacgtatacacaattgaatactacgtagccataaaaaagaacacgatcatgtcctttgtagggacgtgaatggagctggaggccattacccttacaaactaaagcaggaacagaaaaccagatatggcatgttcctacttacaagtggtagctaaatgatgagactgcatggacacatagaggagagaagaatctttcttatttttttttttttttgatggactctggctctgtcacccaggctggagtgcaatggcacgatctcggctcactgcaacctccactcccccgtgttcaagtgattctcctgcctcagagtcctgagtagctggattacaggcgtgcaccaccatgcccaactaatttttgtatttttagtagagatggggtttcaccatgttggtcaggctgctctccaactcctgacctcaggtgatccaccggcctcggcctcccaaagtactgcgattataggcctgagccaccgcgcccagccaaggatttttgctaaatgagtagattatagctgctcttgccacaggggaggaaaatgggtaactatgtgagatgatggacatgttcatttgttcagctatagtaatcattgtcctatgtatatacatcgcatatgatcatattgtacactttaaatatacacaataacatttattttttaaaaagaggaaaacttttccctctttgtacatttagattacttttccttcctttataatggttgtgtaatattccatactatacttgtatcatgatgcatgtcatctgcct

SEQ ID NO: 1560586 - DNA, 4001 bp, Homo sapiens
cgcctccgcagtggagctgattgccactgagcagggccacctgccatgggtgggagcctcttgcacatggggcgccatcaataatcttgtcaccctgggctggatggagacatggaggagcacgtgggtagctagcattaggggaaggctgaggctgcacctcagggattcccagagtcagagatggacagagacagatgaaaatgtgtggagaaatacagagaaagcaagagatagggatagagacagacagaaggagcccactcagaaacccaggaggcgcatctcatctggggaaccacagagagaccctgagcacaggaggcagggcctggaggggacagagaccccctgagtcagcagaagcaggaagagcgggggcttcagccgacagtctggtcctcccaggatggaagctgtttgaggagggaagggttctgactcagggactccttggagagggtcagtgggggccctgaggtgaggtcagacttcccagtccagctttcaccttcttctcctgcagtttccaaggctaaggatagcagtaagatctgcaggggcaggagaagggatcttgccatggtgccctgctgagccgctcaggggctgccaggcgaggaagggcctctcctgctggagctgagaaggagaaagcattcaggcccagcccctccccactcagacccaggggtccaggccccagcccctccccccacagacccaggagtccaggccccagcccctcctccctcagacccaggggtccaggccccagcccctcctccctcagacctaggggtccagaaccccagcccctcctccctcagacccagaaattcctttctctggcctctccttccttacactcagaagtccagacccctaacctcctcctccctcatacccaagagtccagaccctagcaccttcctccctcagacccaggagtccaggcccccagcccctcctccctcagacctaggagtccaggcccccagctcctcctccctcagacctaggagtccaggtccaagtccctcctccctcaggctcaggagtccaggccccaacccctcctccctcagacccaggagtccaggcccccagccccgcctccctcagacctaggagtccaggcccccagctcctcctccctcagacctaggagtccaggtccaagtccctcctccctcaggctcaggagtccaggccccaacccctcctccctcagacccaggagtccaggccccagcccctcctccctcagacccaggagtccaggcccccagctcctcctccctcagacccaggagtccaggtcccagtccctcctccctcagacctaggagtccaggtctcagtccctcctccctcaggcccaggagtccaggccccagcccctcctccctcagacccaggagtccaggccccagcccctcctccctcagacccaggagtccaggccccagcccctcctccctcagacccaggagtccaggccccagcccctcctccctcagacccaggagtccaggccccagcccctcctccctcagacccaggagtccaggccccagctcctcctccctcagacctaggagtccaggtcccagcccctcctccctcagacccaggagtccaggcccccagcccctcctccctcagacccaggagtcgagacccccagcccctcctccctcagacccaggagtccaggcccccaggccctcctccctcagacccaggagtccagaaccccagcccctcctccctcagacccaaaattcctgttcttcagatccctagagacccaggaatctaggctccgatcttgcccttccctgtggaacccaaacttctgactctgtagttcgtttttccctaaaaggccccaaattgcagacttccaggccctcactgctcaggaccgggagtctaggctgcagcccctacctctcgagagcagagtcaggcttggagccagcatcaccctctcccctacaggtgcacccttgatgaagcctcttctcacctcgagaggatctgatgtgatccaagttccgacttgggctggcacacagctgggctccaaaatcttcatccctctgctgggccgtcctcttatatcaccccccgccccatgcccggccccagcgccctggggtgcaggcggagccgactctgggacacccccgcctgcatttgcggttctggttatctggaaccctgacgcagcgagagcaattggcaccactgcactctctctccaccctccctccgaaggacgggcggtgcccagctcctgcgcccccgcacattctggtcccacagtccctcctggctgctctcgggggagggacccggtgcgctgggtctgaggggcaggagcgggattcaagcagtcgctgagctcagagaataggctctggctcgggtccttctctggggcggttttctttctttcttccctcctccctccctcccttcctttcttttttttggatggagtctctctctatcgccaggctggagtgcggtggcgcgatctcggctcactgccagctccgcctcccaggttcaagtgattctcctgcctcagcctcccgagtacctgggattacaggcacgcaccaccactcccagctaatttttgtatttttagtagagaccgggtttcactatgttggccagaatggtctcgatctcctgacctcatgatgtgcccgcctcggccccgcaaagtgctgggattacaggcgtgagccactgcgcccggcttctggggccattttcttgccctcaccccctctcaggggtggcctagaccctacatcctaattctggcccgcctgggggaacttgtccaagctgatcccagtcgtgcctgtaattacgcctgaacccattcccaactctaacagagaggtgtaagttaaaaacaacgctttccctaaccccaccccactaatatttgccatgtttaggatctatgttcttatggtcattttaatcatgttatacatagatttctttgtatattatgtatttataacaaaaatgtctgtacttaacattatctaatagaacatttttgagggcttcatttattaatttataagcaaatatttatttttctttttttaacttttcagttcgggggtacatgtgcaggatgtgcaggtttgttgcgtaggtgaacgtgcgccatgggggtttgttatacagattatttaatcacccaggtattaagcctagtacccattagttatttttttctgatcctctccttcctcccactctccaccctctcataagccccagtgtgtgtacccaaaggaatataaatcattctgtttaaagacacatggacacgtacgttcattgtagaactattgacaacagcaaacacagggaatcaacctaaatgtccatcagtgatagactggattaagaaaatgtggtacgtatacacaattgaatactacgtagccataaaaaagaacacgatcatgtcctttgtagggacgtgaatggagctggaggccattacccttacaaactaaagcaggaacagaaaaccagatatggcatgttcctacttacaagtggtagctaaatgatgagactgcatggacacatagaggagagaagaatctttcttatttttttttttttttgatggactctggctctgtcacccaggctggagtgcaatggcacgatctcggctcactgcaacctccactcccccgtgttcaagtgattctcctgcctcagagtcctgagtagctggattacaggcgtgcaccaccatgcccaactaatttttgtatttttagtagagatggggtttcaccatgttggtcaggctgctctccaactcctgacctcaggtgatccaccggcctcggcctcccaaagtactgcgattataggcctgagccaccgcgcccagccaaggatttttgctaaatgagtagattatagctgctcttgcc

SEQ ID NO: 1560587 - DNA, 4001 bp, Homo sapiens
agattatataaaatcctatacaaccaaaggtcccatagggtagtgctctccgccatacaggatgggcttttctggccctgcttaacaatctgctagttggttctttctctcaccactcttgttagtagtcagatcttcgaggcttctcatatgactcctgcttgtgaatctcaacatcatgatcactttcccttctttgtctccctctgggggaccaagctttgccaatagcttgggttccactgggccaaccagctcctcctctccctcccattagtggacaagcccactacctcggggactggtgacagtgccccagcctgagacggtgcacttctggccaggctgggtgcaatgatctgccaggctgatgggcttcactttggaccccagggatgcctggtcacgcagttgaagaagcatcagatcatggttgtggtcctccacatcgctgctgttgtagcaggggtgtgggatggactgaaccacaggtatttcttgctctgggccatctttattctgtaggctgtggtctcccaggcgtactgtgtatttcctgtaatggtggggatagtttgggacccaggcaggggtattgcccccagccccctcctccttcagacccaggagtccagtcctcagctctctccttcctgagtcgaaaccccagccccctctttccttaagccccagctgacctctgcccccatcatccactcacggttttttacagtgggcagctgtaaggacccagttgccacctacaaggacaccgccacagagtagttgctggccctggaacaaggccgcctgccaaggctgcgaatggggttggcactcatgaccccccagcaccttgtcctcctgtgccctggagtgtcctgcagcaggagggagagggttggatcgccaccctctggggcagtgcgagggctgggaaggccactgtgggttcaaatggacacacggcaagttctccgcatacaacttagtgaggaggtccaggcttccacacgctgccacacggggacactcatttcagtccatgtgtcatcatacaagagtcacacacccaagaatgcccccacatgcttccacatgagtctacaggccccgagtactcccaggtgaatctatgcccccaagcaagcagcccccaaaggctgtagctattcagacaatttacagcatcacggaacctactcctacctgctgctacctgtttcttgcctctgtccaccctgaggaaagcccacagaggctcctgcaccgtatcgcactcttcacatccgtgcacacgcacccacataacccccgcggcattcccacagactccccagcgccactgctgccttcagatccctcccctccggaggcctccgcaaccctcctcacctgcccaggctccccccagcaagagcaggaacatccacgtcttggccgcacgaggtcgggggcgtcccatggtgaggtctgggaaatggagagggcggggccggtaaacaggaaggaggagcctgagctcccagttctggatttgggcactggggaggcagccgagagtatctggggctgttctgggcttctctggaggaaggaggaggctgggggactggattcctacattccaagggaggggggagtcctcgatgtctgggtctgaggggacagggagctgggagctgggactcctaaattagggagaggaggaagccggggtccagactgctggatctcgacagagaagggcatctgaggctggggtcctggaatctggagaaggagggtccggggcctgatgtctgtatctgagtacctctgcacctcaccttccagaatccaggggcggggtcacctactgattcggacccagtggaggaggccccagtacttcagttctctgcctggtacacgattctggagccttttaactgggaatctccacctcctgctcctcctccttctcctcctgcactagagcctggggagcttctgggaactggaacactgggtgtgagtgagaaggggcggaggggattgaacgtgaaatcttgagggaggaggggctggaatctcagactcctgaggctagggagaggagggactcggtgctgagactctacgatctgaaacataaagggctgggggccaagattttagttctgagaggggaggaggctgggggcctggattcctgggtctgagggaggagaggctgggggcctggactcctaaatctaagggaggagggactgggacctgggatttaggtctgaccgaggaggggctgggggcccagactcctgggtctgagggaggagggggctgctaggggccaggactcctgggtctgagggaggaggggctaggggcctggattcctgggtgtgagggaggagagagctgggggctgaattctaagtacttttaaaaggagaagcttggaacctgatcttttgtgggaggagggggctgctgccagtaaccgggaaccgaagaaaggcaggtcttctagggtcagaaaccagagggtggatcaggccccgcccgctgtcccctgagaggtccgggatctgggagggcaggtttgggaggcactgtgacctggtttccccttcccctggaggcggcaagaccaacccaagcagaacccaggagtcttgctgcaatagggctgatggacagagactttaggcaaaacttactaggggtttaagggggagttgcaaggcggtaccggttccctcatctgcccttcaccgcccacccgtttgctctccactcatctcacagctcaggcagaaagaaggtgaggtttcccgcgtttactgaaaaatcatccgttgcattggctctaaaggtatccagaccctccctcaatttccccccaggtctccgccaggattcaaacccagcacacgcccaggacggggccacaaggggctgagctctacaccgcccgagctccacgtgggcggagctactgcgcccctgacatcacgaggggcgagatctctggtgaaggaggcggggccacaaggggtggagtcccgaggggaagtcccactgggcaaagttccgaggggcggagctattttgtgtaagtggttccttggggcggagccacaggctgtgctgttccaagaaggaggtgatggctgtcggtgacgtcatagagacgggctctgaagggcgtgtccctgctccgttccgagggggcgcgactgtgtcttgcttgacctcgtgagggggcggagcctcaggggcggagtcttagtgtccagaggggagtcagggcagctggaggtccagggcgggaaccattgaggctgggaccctacgagaaccccctaccccgtgcccttcggcctctcttggtcttccaaggtgcccccgtggcgcgcgggctcagttctccatgatttcttggatccagtcaaggtagtggcatacgctggtgtagactgcggggcgccggggtctggagcagggctcagcacccccagacaccacgcctgccaaggttccattgcaaaccagggggcccccagagtcaccctgtacgcgagagaagggcagaggaactgttaggccactctgttcatgacaattacacgggccacttcctccctcccagaaaggccccagccccttcctcctccaacatccgagagtcctccatctccagcctcttcttcctcagacccaggagtaaaagctcagagggcccacctccccgcaggacctaacctcctcctccccgaggactcagactctggacgcccagcccactcctcctgtagatccagaagtctggacctccagaccttttctcttttacactaaggagtccaggccctggtcccgtcctctcccaggaaccaggtatcccagtctccttctcattttgacccaggaaggctgggggccgacccctctgctcccctaaatcctagaaaacttggcaggacagcctcattttccccagagtaaggtctcac

SEQ ID NO: 1560588 - DNA, 4001 bp, Homo sapiens
ctgatgtataggcttaagttaaaggaggttccatcatggagcaatgcatgatgggaaattcccacacagcatctcttaccacaatcagtgctttactcatggagggaagaaaattggaacagtatggatggtcacttttcagaggcaatggagagaggattcctgcatcaggtggattccaggatactattagaatgcccagaacctaagattctagaattctcagattccgacacactattatccatgattctagaatctagaggctcaaggtttagagttttatgaatccaagattctaacattccagattcccctggatcaaaaaaactccaggattctaacattatctgaattaaatctaagatttgaacatagaattttaatgttctaggacaaaaagactagaattttggctgggcgcggtggctcacgcctgtaatcccagcactttgggaggccgaggcgggcagatcacaaggtcaggagttcaagaccagcctggccaatatggtgaaacccccgtctctactaaaaaaaaaaaaaaaaaaaaaatagcctggcatggtggtgcatacctgtaatcccagctactcaggaggctgaggcaggagaattgcttgaacccgagaggcagaggttgcagtgagctgagattgtgccactgcactccagcctgggagatagagggagactctgtctcaaaaaaaaaaaaaaaaaaaaaaaagaaagactagaatgtcatcattctataaatctataaccttagaaatttaagagtctgggattcaaatagtttaagactacagaattatctgaatctcaatattctaggatactgtgaatcaaagattctagtactgtgagtttcaatattcaatgaatctagaaagctctgaatttaagattctaggatcacactagccattatggctattgaacacttgaaatgtggctagtccattttgtaacaggctatgtgtgtaaaatacagaacagatttcaaaggcttagtaccaaaacaaaagtaaactgtatcgttcatacgtatttaaaaattgattacatgtcaaaataagtttttgggtatgtcaagttaaatctattagaattaattttactcattccttattttttaaatgtgtccaccagaaatttaaacttacacatgtggctggcatcataattcctctgggcagtgctgacccagactgctaagattctaatagtctgcgaatctatgattctaaaatttgctgaggctattgcagaatttcataaattcaagattttaggattctacgattctggatttctctgggtcagtctcggattcgaagagcctaagtttcgaatcttagacttctcaaatgagatattgctggtctctagaattttaggatttgggaggctacccttcctacttctaagagttgaacttgtggtatcagaagtggaggctccgcacttctggcctaaagcacccctcaccctctcctgacccccagcctctgtccctccccagcatggccagcctgggtcactcacggcttgcggcagtgggcagctgtgagcagccagcggtcactgatgagggtcgccccacagaagagccgagtaaggtggaagaggccggcctgccaaggctgggagttggggcgacattcctcggccccgatggcacgggtgtctgcccagccatgccctggggtggggatgagggacaaaggggtcagcgaagagcaggctgggagggcagggagaggatgctgagaagcctagagggcaggaggcagaagcctgggatgggagggaagagcaaggtgaccttagtacagccgtgaaggggcagccagcctgggagcctcacctgccagcagagagagcagagcacagaggagtcccagcttcatgacccctgggcacctggatcctggaacgtgcacccggcgtccagtgcttctttatggtaagccatgccatctccttcctcctccatggggccgcccctgtgattaatcggggttgggaaatgtacctgggggagggggaagccctggggctgtgacaggggccttgggagaggaggtaagtgcagggggaccccccttttgggatgaactggcggcttgctgggccagagcttgactgaatggaggaggagtgctgggggtgtggagaggttgtgggcacctcctctggggtcttcagagtgggagacctcattcctcatcaccttaggctacaagatacagaatcttttgtgtcctggaaaaggagggagatccttgaagcctaaggtcctggggtgcagcaggtttattttggataaagcagtggtgtgcagagaccaacctcccacggcaggctggagggatgtgcagggggaccacccagaaaggaggcgaggggtggaagacagagtcaggactcagacacaagagcaaaagatacaaagagagggaggtacaggcacagaaggacccaagatgagaggaggagtgggaggaggagacagaacacgggaaagattgagggaaatccaggtggagtgaggcagagaccacaggcagctgcacaggtttacacaccttgcagaaccttccctgccctggggatttgggcctcttcccacaaggacaaggccctctcctagaatgttgagaaatctggttccatctggattaacccactcttgtcataacctgcccccttccccacggctccaccacccaaggacccaggtgcccaaccttccaggtagcaagtgccctgtgctctctcttaatacatcctgatctttgccaaatcctgagaacatttgctatatatttttttcatccatctccctgccccccaccccattgtcccttccatcaccccatcctccctgcctctctcctcatcattccttctcaccaggtggacagcttctggagggctgggcccaggtctgactcatctctgtgtcccagcatcaccccgttccaggcggaacagggcttgcagaagtcctcaggagatgttcattgaatgagtgaatgtctttctccatatccttcttttcctggtgaactcccactcatccttcaacacccaacctcaattctccctcctccaggaaatctctgagatcctcaggcagagtccatctttgcctcccctgggcacttacgatcccttccactttctcctgctcacaggcctggttatgaagctgggtctgggctccccttgaatgttctctcactgtgtcgtcatggtttggagcatggactctggaactgaaccatgtgtgtccaaatctcaatgattaggtgtgattagtgatgaggtgtgtgactttgggcaagtcacaagacctctctcagttgctccatctgttttttgtttgtttgtttgtttgtttgttttccaaaacggagtattgctctgacacccaggctgaagtacagtggcgcgatctcagctcactgcaacctctgcctcctgggttcaagcaattctcctgcctcgacctcccaagtagctgggactaaaggcgtgcgccaagacacctggctaatttctgtacttttagtagagacggggtttcaccatgttggccagtctggtctccaactcttgacttcgtgatccgcctgcctcagcctcccaaagtgctgggattacaggcgtgagccaccgcacctggcctgctccatctgttaagtagcagtaataacgagggtcgttggggggattaagcaaatttacacacatgaagcacaacagtgtctgacacatggtaaatgttcaatgtctcttcatcccctgcagaaacctgtggtgcctttatcatagctcatttcacccttgcctgcagttgtctcactccctttccagacagggaagtccttgagatcagggactgggtatccactatgtgctaagtgccaccttaactgctattaagagcattttagaccaagcgcggtggctcacgcctgtaatctcagcac

SEQ ID NO: 1560589 - DNA, 4001 bp, Homo sapiens
tgggggccgtccccgagaccgccggggggtggagggctcacatgcccggctccggggtgcttggggtgcctgggcccgccggagaagttcagtcagtgcctgcaccatccgttctgtgccttcctcaccccgtttccgggcaggggtctttgggggggtaggagccacatctgctaggcgaggaggaggaaggggggtcgtcttatgcttgcgaccccgacctcggggcgctcgacctaaaaggagaatagttgtggggagatggatcaagccagccctacacacagaggaaggcgctccaggagggcagggactaagtcttgcttgtgtgtttcccccgctgcccagactagcttggactctgaacacagaacacattcggcaactgacagaggctagttgaacagggaagagctgacacgaagggcgaggataaattcctgtgacgctaaagaggtggagttcccccgtcactcacctcgctgggatcggagcgcagagcgcagggaactgggggccacatcttcatctgaatgaaaaccctgaaactcctgatttaggggaccggggtggaggggagaaacagcagtcagtgccaaagccctcgttccatctgaggtatcgaggaatatccccagttcccacttagcatacccctgcctatttaaaaagaacgaaaaagactcaaaggtcgcgggtagtggaagagagggtctctccctagggatggaggcgccaggtatttcgaactccgatccccagtgccggaccacaccagcacagccaaagccatggttcactggcccaagagagaagacgacagggtctcctcaggaaaggcagcaggccccatactcagattccttcagagtccaattcagaccaaagtgggacctccactgacaccctttcgggccacaatttatttctgcattaagttgggaacaggggcccgcaagtgaaggggcggggagggcatcagatggctttcgtacaggctccactgcgagctctcaggttgttattaaccgtccagggcaacgcaacccacaccttcctgcctgttctgaaaggctgggggagaaatcctgagctgagctctgacctgctagagtgcccagtcccggccttcatcccactcctgttcaacccgagccccaagaggaagccctccaccactctacctgagatgccaagagaaactggggccctggagaaaccaggaggttgcgaggcccggcggggcggcccacaggtaagagcccagacagctccaacctgtctgccaaggccacgctgccgctgtcaaccacgactggctggacatgcagtccccactgcctcctcgcccaaacctccaccgccctagctttgccagctgccgaaaaggatcggcccaagacacttcagcgggaccgacatcgggcgcgagtgcctggctgcagccggggcttctctacccacttccagaggccctttcccccggaagctgcatgcagccgccctccctccgtgccccgtctctccgaaggaaccctgaggacccggcctgcccacgccgcccccgggacaacccagacccctggaagccccggcctccgccccacccggcgccggggacgcctccaaccgcctcacctcctcgtcggattccccgtcactgctctcctcctccggcacgcagcctcgactcgggccccagccccggccccgaccccgtccccggccccgctggacccgcgggccggcccacaggcggcggagccggcgcaggccccggcggagccccagcaaacggagcagggccgtgtcctccccgggctcggctccgcccggccccgtcgcgccaccgccgcgccgcagagctacccgcactctttcggccccgttgccccgtccgccgcggcccccgcccccgccggcgccccgcggccggcccgggaagcggccccgcgcggagccaggcccggggcaactgccgccgcccgccgccgccgccatcttggcaccgtgagaggggccggggaggcggggggaggggcggcccgtgcgcagggccggggggaggggagagagcgggggcggggcggggcggccgcggcgcacgacaacaaccagcgccgccgcgggagaccgggggccgggccggccacgcgcagggcaccacgggagagggagtccgcggccggccggcgccctcggaccgcacctggggagcacagacccccgcgtcgcggccgcagaggggcgaaccgcgggggcctccgggaaatgtagtccggacgcctcgcttcttccgccggcagccagggcgcgagggccgggacggcggggttcccggccaggacccggaaagcgggttgccgggtctccgggaggtgtggtcctagccccaggctcctcccattgttcttggctaggccggcggcccgcgtggactaccactcccagggtgccgcgggctcgggccccgggacccccgaggccctgggaaatgcagttcgcggctgcaggaggcgtgggctggagaaggagcggtggaaagcatagtcagtctccgttccaggcgcgacctggcggcggcttggcacggtgtggagggaagacgccggagaggccgcggtctcggggtccgtgtgctcccggagaggaggcgggtggccgaaagcagggtcggagcacgcgttcctctctctcccgggccgagcgttcccagatcagactccgcgcgccgtggattgcagtggaaggggcgagtgacttgcggtcgcacagcccccaccagtccaggaccggcatgccgcaaggtgtgcccggacaccgagtcctcggggccggctgcctcctggggaggacggggcgcctcgggggtggaagaagtgtccatcccgctggacagcggacgcagggccaccaggggccgctacaggacaaggggcgtgggcgggggtgtgcacagactaaactcggctttctagtcctgaagggagggcacaggaaactctttattatggtgatgagatcgacaatctcccctactgttaaccttcgctcctgcacacttcagtgtcctcactctgtagggctcgctggcctgggcttctgcgacccgcgatcgtccaggagagggcactcggcgcccttcctggggcgcttctggggcggaatttgctaggccgccgtagcagcggtgccaggtcagaagccgagccggcccgcttttcgttctttaattggactcttggctaagacgctaccgacaccccgtcaggtggtggaggaagaaggacaacagggagaggtcgagggccgagacggcctcgaggaggagtagaggaaggtggagcggatggtccatccgggcgggagttggctgggcgagtgaccgcgcatgtgcgcctgcatggaggccaggctgggacagccggccccgcacagggagcagcggtacggagcggccccgtgtgtccgcaggtgcttggtcatggccgagaagtcccgggagcgctgaggacaaaggctacaggagaagggcttctctcctagagcggtcggaaggggaggccggtgaaggaaggaagaaggcggcgaaagctggccaagttaggggtggatcgggccacggggctaggggattgcgcgggaaccgggcacacaggtggagactcaggagcggagttgggaagaaagccgacagttcacacagggcagggcgcccatacctgtgtggactcggtagtgcgtctccatctgatgcttgagtgaaaacctctttccacagacagagcacgcatagggccgagaccgagcaggaggggccgggggagggtgcgggcgaggtgggcagcctgccttgtcctcatgacccgcacaggttgcaagtgcgcctgtggggacagagaaggcaaaggagggcagggccaggaatcccagcgccaactcactgtaccattcaggcaggaaatcaagggctacagtggggctgaggcacgagtgccccc

SEQ ID NO: 1560590 - DNA, 4001 bp, Homo sapiens
gatcacctgaggtcaggagttcgagactagcctggccaacatggcaaaaacctatctatactaaaaatacaaaaattagccgggcatggtggtgtgagcctgtaatcctagctactcaggaggctgaggcagtagaatcacttgaaccagggaggtagaggttgcagagatcgagccactgcactccagcctggcaacagagcgagcatctatctcaaaaaaaaaaaaaaagaaagaaaaaaaaagtgcaatgctttaaaaaacaaatgtagaatctgattgtctatggacaagttcgtggtctccagttagctacagctttccaacctcagctgcatatgtgtgtgtgcacatgtgctccctgttatattacatttgtgctttccattctcacatgacctctctggtccccaaaggcattttagtttaatttcattttattttatttatttatttttgagacagagtttcgctcttgtcacccaggttggagtgctgtggtgcaatcttggctcactgcaacctccgcctcccgggttcaagtgattctcctgcctcagcctcctgagtaggctgggattacaggcacacaccaccatgcccagctaatttttgtatttttagtagagacggggtttcgccatgttggccaggctggtctcaaactcctgacctcaggtgatccgtctgcctcagcctctcaaagtgctgggattacaggtgtgagccaccgtgcccggctggcattttagttttcaatccctaatctagtacaacctctttattttccagaaggggaaacagactacaggggtctgtaagtaaagaaggggttcgagaagccagggtttctacatttacagtggagtgggcgtcgatgcgcaggggacactcactccgcatggcacagctggaacggagtgaactggagctccaggttcaggcagctctctgtaggcagggcacaggcaggttagcatgggggacctgctggggactctctccctcctcccgtccacgcctcactcacgggcaatagagtcaaggttgtactcagagccgggctcgtagtcgcagtaaatgttcaggaaggggctgcccttgtcccctgaatcctggcggaggacacggggttcaggggagggcaggggtggcaggagggatccggggcggctcagtggaactcaccatgtgtgtaaggaggagggcgaagggaggtggagggggctctaggtaccttgatgaacgtgatccccacaaccagaccccgcttggggggtgacttgttgaaagtgtcgatggagacaatctccgcatccactgggaggggagagttctaagttcagtgtcaggcagactcatgcttccaatctccccaacatggtgagctctggctaccgcaatgatcatgccctctggtctgagtcctgaccaccatcacctgatctctgttccctgggtactagggatcctgacctgtaagtctgaagaatcctgaaaccctaggctcatccgggccccaactatgcctgcccgctgatcccagtgacccccttaaaaccacctgatcccattcttccagcacggtgacccggctcagacagagcctcagaagccttctcaacaccacgttccaggcccccgccccccagcaccatagcgccacccaccgggaatgtagttgaactgcagctccttggccactggccggattttctgtcggaggtcttggtagcggaagccgagcaccttgcctttaagggtggcggccagcagctccccgcgcccgccggcgccgcctgccagcccgtacacattgctctgcgacgagaagcgcgtgaagctgtcctcgcgcaacggacaaggccccgcggccacggccgcctcccccatcatgcccctcagttaagcaccctctccgcagcccccgccccaacccgcactacccaacctacgactctctaagcgacctgaaccgccgggtgcccggccgttgcgcgggctgatgacgtacggaagctgccggcgttgccctctcccaagatggcggccaggtcgcctgctcgggcctcccaggcgactttgccccactgcgcccgcgctctcttctcctttccatttctggaccaaggggctgccataaggagtctgtgactagagatgggaggtggtggccacggcctctcgctgtatgctgtgtggaaggtcgaatcatcatcatcataaaacttaatattgcccttatgtgccaggaactactgtaagtgcattccatctaatactttattaaaaattcgcaagggggtggaggtaggtacttaaatccattttagagatgaaggaattgaggcacagaggggtaaagtaacttgcctaagatcacacagctagtaacgagcggtcagtactggaaaccaaacaaggtaactccacagttcactattttttttttttttttttttgagacggagtcttgctctgtcaccctggagtgcagtggtgcgatctcggctcactgcaacctctgcctcctgggttcaagcgattctcctgcctcagcctcccagcagctgggattacaggcgccaccacacctggctagtttttctatttttagtagagatggggtttcgccatgttgcccaggctggtctggacctcctgacctcaggtgatccgcccacctcggcctcccaaagtgctaggattataggcgtgagcccccttgcccggcctatagttcataatcttaacagtatcacctttaaaataattaatacattcttcttgcccccaaggaaaaatgatccagctataataaccacctcctttatcgaacacctacttggtgacagtcatgctggctctgataatctgattccttacaactgttctgcaagggcctactgttaccctccctgccggttcacttattcaggattcattgagcttttactatgtgcccggacgtcctttgcaaatctgtctcactaatctttgcaagaaagaaacctctacaaagaggtttattatcccagtttagagagaatcaaatggaggctcagaaagagtaagtccactgactgatatgctagcaagtggtggggacaggatgtaaaccaggtgtttccgactctggggccttcaggggttcctgtctgtgctgctttgtccctagaaggccatggaggtttgggtactatgtgcacatctgtgtatcatttccagaagacatgggttggccagctgtcctggacacctcgagcacacacagactgcaagctccatgaaggcagcaggctgatctcccttgatcacggccttatcgcctgtacctggaacacaaggcctgacacaaagcaggcattcagaaaatatgtgtcaaaaatcacaaactatgtgctgagcatgtaagagacagctcttacatgatggaaagttctcaaaggcagactggataacggaggtggcaaggaatttgtgatgattccagatttctggatgtggagagtagaagttcctggagggcagtctgggaatgccgtcagtgctgctgtattcccagggcctggcatgcagcaggtgcttagtgaatattcgctgagggagtggcacgtgggtctagtgccacttcagcagtgcgtttccttcaggcgtcttcccgccctagtaacctataagccacatgttgagcggatgaatgaaaaaatgaagttacaggttaggaaggaatcatcctgttaagaggtttccaatcctagctgcacacttgaactgcctatgaagttttaacaaaacaaaccaaaacaggccgggcctggtggctcatgcctgtaattccagaactttggaagctgaggcaggcggatcaactgaggtcaggagtttgagaccagcctggccaacatggtgaaacgctgtctctgctaaaaatacaaaaattagctgggcgtggtggcgcacgcttgtaatcccagctactcgggagactgaggcaggag

SEQ ID NO: 1560591 - DNA, 4001 bp, Homo sapiens
tcccagctactccggaggctgaggcaggagaatcggttgaaccggggaggcggaggttgcagtgagcccagatcatgccattgcactccagcttgggcaacaagagcaaaactccgtctcaaaaaaaaaaaaagaaaaaagaaagaaaggctggctgggcgcagtggctcacgcctgtaatcccagcactttgggaggccagggtgggcggatcacctgaagttgggagttcgagaccagcctggccaacatggagaaaccctgtctctactaaaaatcccaaattagctgggcgtggtggcgcgtgcctgtaattccagctactcaggaggctgaggcaggagaatcgcttgaacctgggagacggaggttgcagtgagctgagatcgtcccattgcaacccagcctgggcaacaagagtgaaactccatttcaaaaaaaaaaaaagagaaatggggtcttgctatgttggccaaactggtctcaaactcctggcctcaattgaccctcccacctcagcctcccaaagtgctgggattagatgcttgaaccacctgcccagcctggtggagttggaatcattcagtcagcaattcccaccttgaatagtgccaaggacacagtcattaactccaccaccaggtaataacctaggctctgctaaggacttgtgacttgtgaagcaattcattcaatagtcaaaacagatgaactgtgtaaactgggtaaatcccaatctatccttaaaacagccctgaggggagatgctaccgttagatatactttacagacaggaaaagaggctcagagaagtcaagtcacttctctgaatccacagtcaggaaaggaccccggattctgctccagaggaaggagaggtttagacaggagtggccccggacctgttctgttatagaaggtggcatctttctgataaatgcgggggtccttcttcttcaacaaggagagcgttttgtaaaagtcccgctcctgctggggatcaaattcctagggcaggaaaagggttggggatagatttcagaagggagataataagagccctggcgccagcaggtgagctcagcgtagggattaggatggaggggggtggatctggctggggaggtcaaacaggtggtcaaacagcaggagggagaggggccctcttggggtgggcaggggcaggccacaggtaggtacaggatatgggtagaggaaggtgaggggcaaggagaaggtaattcctggggaagacaaagacttgacaaggggcaggtgggctgagggcacaagagagacagcggggaggggctgggccaggccgcacagtggggccaggatcagggctgatgtgagaagttgggcgccccacgtggcgcaaggagtacactaaaaaatggctagactcttgaggatgaaagaggaaagggggggttcttgggggacagagtcgccccacacatcagagtgggcaggtggggatcgtggcaggggagagaaaataacggggatttggctcccctggggagagggggggcactgtctgtccctcatgggatggggagcggaggatgggacgctcccgcagggcgctctggggttgggggttcccccccgtctacatcggggtcggggtgcagaggggggcttggacgcctccgcacgtccaggacggggcggggacgcgcaccacgcgctcgtcgcttgagtccgactcggagctggagtcgctgctgctgtctcggtccccgtagcgatccttcactgcgggacacagacgggatgcccccccccaggtcagccggcggggccactcgactccccacttcccaaccggccggcgcgcgcaggctcccgcgcgcatgcgccccgcactcacgccgctgcagttcctcgcgctcccggtagcggttgtaccgcgcggcaaacgccgcgttcacccgcagctgcgacgacccgcgcggttccggcatggcggttctgtggcccattgcgcacgcgcattgaggaagccctggacggggcggggccgccctcagtcccgcccgcatccacttgtaaacgaggcgtaccgctgctaaccccgcccctggcttttccgggatccctttcgcctcatcaccgcagtcaccgcccacggctacgcccctgcggggaaggccgcggccaccgcccacccgccccaccccctgtgctccgggcacccagctgacatctgggggccctttctccactcgcggtttcctgcttcccttccgttccgacagcgaaaaccgctgccccacccagctcactcaccctggcgccctgggaattactattctctcccctcacccaccacatccacgatccgcgacccccgtcctcatccccatcaacatccgggatgtgtaactctccatcccagactcaaaaatcagaagccacccgtgctgtgatcatgcacaagtcttaatttaatgggtaaaaacattaaattattacaacattttttccaataaagcataataaatagaatccatttcttttaaaacgctgtacaagagactggaaaacaagcttccaacagaatatgaataactcataactcattctaccttcttattgatttgggacgctccccccaccccccatgcctgaagcaacgtgcacacttcaggtctctgagcacagccggccaaggccaccagcttctaggctccctggaggtcatgacttcactcttaaatgctctgcccttgggtctcgtctgaggccccagcagcctgaggcgcagaagaaactgaaccgtttaggtggctgtggcctgcaggagcccttctctgtccaacacaccaaaaggagtgagaaaaacaaatgagaaacgtcccccaaacactcacacccccaaaaccaacacctataagccacaaactgtgctcctcccctactgcagcagtgggcaggagaaacaagaagagaaagtgtttcttcccctctcttctgatacataaccccacggggttctcttgctggagagggtgaccccagatcacagcggggccaccatgtggccctgcaggatgtccacgaggtcctgagcccctctctgcagtgccagctccaagggtgtgagacccctggcgtccctgcgatggagatcagattcagctgccagaaagctgaccacagcagtgtgaccctcttgaactgccagatggattggaagtgccccggtgccatcaggcacgttgacatcagccccgtgctccactaggaccttcagggtgtccaggaatccagtgcgggctgcgtcatggactggactggtaccggaggtgtcctggacattggggctggcaccttgcttcagcagctccagggcgatggcggtgctgccaaacatcatgacctgtgtgagggacagaggatcaggaggtcctcaagggaggaggttccacaaaaggggtcactggaaagagaagggtcatccagaaagaggcatctcccagaaacaggaaatgctagaggaggggtcctctagtgaacggagaagctgcataagcccccaggaaagttcttctgggaatagggaccccccccaaaagctggtcactcccttaagaatgagaccccccaacccagagaacagccccccatggaaactttcaaggaacctaagactctcccccaagggaccaaagacgcccccagatatgggcaatcaccaggaaacagaaaatcccctccaggaaatgggcccccagagatggagaactacccccaaagaattgatagtcctcataagggaaaaaagatgtcaaaggaaagcgaaccccttctccaggaaatagcctcctcctacataatggtgatgtcacctcagagtacctgagagctcctttcaagaagcgggattccaaaagtaataataaaagagaaacgagacttccctgtaaaatgtctcccagggaatatagggatgtcttgcaatctgacattgttcctccattggggccccc

SEQ ID NO: 1560592 - DNA, 4001 bp, Homo sapiens
ccagagcttagcccccagccctctggagaaggtgaaggaaccgtggcagctttgcaagctctctaccaaggcgtttatcccctctgtgatgagggtattcgtgggggtagcaccagagaagcgtactcacagatcgcaatttgtcgatgttcaggaacggggtgttaaaggcctaggcagaaacgcagggtgttaggaaagttgctaagaagcaaaaagagagagaggacagactcgtggctggagggccggggaaaacagacggcttacctcgggtcgtgacgcataattctcaatggtgctttcttcctggaaaaggagagggagaaaaggcggcagggggtcacgtgatgccagggcccttgcccacatccctgtctgccagctctgccttcatccacagcccagtccccgaaagaacgcaacccattccccaccatggtctccgttccagtcgcgcacatggttggcggatgtgcagggtgaggagggggaattggagaatggtacatgtaagcagtgtcaccatgggcagcaggcagaaagcctggagccgagcattcctctccggaaaagctagctagtgctgtcctgcagttgacttaagtctaagaggtggggtgttctggagacacccacgctcagtccgtatagctggatgggaaagatttgcgagcaggtgggagcccagctgctgaggtgacccgcctgcctctcactgatcgaggttgctttgctttgtggatttattgccaccactgttggaggttccataatccccctccatggggaccccaccccaggcctcagtgtgtcccatcgtgtcttccccatgacagagcccaacacggagcccgcaggctggatccagatgcttagatctcataaaaatttggtcatttgttttttggtttgaattagacattttgaattagtaagaattcataaattcatccagatttctagtttcccctgaaaaatgtaaaactctaggcacatcttcccaatccatggcgtcaggtggggtgaaagctgccctttcagactgggaaagttggccccatttcacctcaggccctgacagcccccccagctcagtgacaccactggcttggtccttagcagctgagcctgtgcccctgtcttagacttttaaatccggaataggcatcaggattcctctctggctgaggactggatggtaaagattctcactgtggcctatgctccagagacagcagggagccacccgtcacctgggcaccactcccaggggcacaaatgaagcaaagaggagctaagcaggggtgtctccagaacaccccagccccactcctctttgagttaagtcagctgcaggcagaactagctagttttttgctttgcttcaccctctccacctgctgcccatgtggatgcaggcctgggtttggagctgctctgcctcacattgccgttctccagttccccctcttcccctgcacgtccccaggcatgtgtgcagctggaacggaatgggtgaacactcttgagagcccatggtggagatagtctgaacccagaccacccactcagtcccaaggttcagtacacgagcctccccaacacacttcaccatcccttccagaaagaggagcatctctgtcccaaatgtctccccagggatgctctgttccctcctcccttcctcagagccccagtttcttcagcccccatcagaatccaaaactaagagccacttatccaggaatggacaggaggtagagagatggaggggtaggtgggtaacacgtataagaataaaaatgcaggtgacgtgctcacctcaggaccacccagggtggctccctgggcagagtggagcaccaggagggagaggagcaccacggcaggaaggaccgggatcttcatggcgtcaagtttggggtgctctgaggcggggcctcagtgcttgctctttatattgccaaggaggcagatgagcacagaaatggggtccccaccccactgactcacccccagatcttgtcgcccacccccggggctctgggagggggaggcatggactgttcctcatttgcctcggatttctcaattcgcattctgccccaggcacgtggaaggtaacactgcaatgggtctcttcatgcagatggggctgggacagagacaggttggacctgtccctccaagggattggcagtggtacccaagcaacctctccttttgtctttgtctcttttcgttatatccctcattcctctcttagaattcaggctttttcttttcttttcttttctttttttttgacaggctctcactcgttgcccagactggagtgcagtggtgtgatcacagctcactgcagccttgacctcccaggctcaagcaatcctcccacctcagtctccctagtagctgggactagaggcacgcatcacctcacctagctaacttttttattttcttgtagagatgttgcagctttttttttttttaattttctcgtagagatgaaaatgtctcgccatgttgcccaagctggcctcaaactcctggactcaaggggtccgcctgccttgacctcccaaaggactataggtgtgagcctgcgctccatgctcattcaggccttttcttccaccctaccaaaatctatgtaaactctttagcttggcattgaaggtggtccatgctctgaactcaacccacctttataacttcttcctttactagctttgtacatacctcacattctggccaaattagaccccttaccaactatatccttctttttccctcttcaaagcatccggccatgctgttccttattcctaacatggccttctctcatctccagttctcagaacccaacactcatcttggatgaagcttcccagatttttcctgcaatgcccagtccttctctccacacctttcctttcacagaattcccatattcattcgtttgtatgtctctggcattgtatctaagtaagtcatgttctcgccttgtttcccttttagagtatcaagttccttgaggtcaggagctgtatcttgatcagctttacatccccctagaaccatggctcacacagaacccaggtagagtcagcattggtcagatatgatacgttagacttagtattcaggcatccttcagccacagtgtacattttcctttcatggggctgaacctttccattttccaactgcccgtcttttactcttgggtcttcagagaaatgactgtcttgagctaagatgacaaggaacagggaacaaaaaacagctcttagggtgcccagttggagatgggatccaggtaccctgaacctggagtgcccactccatgtcattgccctaacccaccttgccccacccccagtttggaagttggatcacctcactgtgacacaatgtcctagtcaagcagccttctccacagtgaggttcaggtggccaaaccggctcctgctgtaacagggaggggctgggacatggaccggcgctgtcagggaaaagcaagaccttatcaacacaacctgatgcaatgcacggtggcggtggccctgggtgggagggctggacggcatccatgaacaacctttacgaaccccagaagctgggcacctcagctccatcctcacgctgcccccacaccccagtcccagacatcctcttcagcctcctctgattttataatggcagcttcccctttgcagagctacctgagggaacactgcttagagaacactcccttagcccagatggccacacagtagtggatgtcacagagttggtgctcctggaggggacgagttagagaatgactgaggtgggtggagcacctcccaaaaggttttctggaggacacaagttctgtgtaatgaatccttgctaattaacgaacagtgactgaaaaagctcattagccaccattccatccgcatagggtcgactccagggagtgaagaatcagacaaaagagaactgat

SEQ ID NO: 1560593 - DNA, 4001 bp, Homo sapiens
atgagaaaactgaggctcagggacactgagaaactgggccactgtcacacagccagtgaacctaagtcacaacaaacggccacagcccacgggtctcacaaaggtgtgaatctgaacaggtgcacaatatccagctgtgacaggacagtggcttcttacagcagctgatttctgcctgacttctgatgtttctccaggaaaaaggaaacagggattttttttttctgggaaattgcctcattgacaaatgtcagcaatcaatacttttttccaagatatcatggaggccaagagcatctatttgtgatctgtatctggtcagtggtttgcagcaccttctagaaataaggtgccacacccagcaaaacccccttccctctaataataactatggttattgaactcctatgacatgccatgcagagacacccagtctccacattcccaaagaagcatgatcttgtataaagaggatacctggaccgggtgctcatgcctgtaatctcagcactttgggaagccaaggctggtggatcacctgaggtcatgagttcaagactagcctggtgaacatggtgaaacccccgtctctactaaaaatacaaaaattagccaggcatgatggcgggcacctgtagtcccagctactcaggaggctgaggcaggagaatcgcttgaacccgggaggcagaggttgcaatgagccaaaatcaagccactgcattctagtgtgggctacagagggagacttcatctcaactgaaaaaaaaaaaaaaaaaaaaaaaaagacacctggagagggaggcccatagctagtaccagtgagacacagtactgggaccttctgggatacactcctccttcaaaacaggactcttttctgtctctggctcccagatgtgagggctgaggggttcctggcacctccctcccgtccccccgcaacttcctctcccaagaagccttccctgattactgctagtctggcccacatacacagtgaaattgacccagcaagagctctgatcccaactccaaatgtagatttattgaagaaacgcagagaggtaggctgtttgaccatgggagagccacttcacccttctgaatcagttttttcaaccataaaatgaaaataaggtagaatgaagatctcacagtgctgtctgtggcaactgaaaccaaaggtgataacgactggagctcaggacaggctgtttctccaagaggagtgtgaagaagtcccgggaatcaacattttgagagcatcccaggggcctctaagaatatattacgggcaaacacttgtagagcacttcatttcatcctcaatcaccgttacgaggcagacacaatcatctccgagtgaaactgaggctcacaggggcgggctccgttgccgaaactcacagggagaggcagagaagcaccacggttctatatccaggttatttaacagaatttaactcagccatccaagctctgaaaaaccccaagtggggaggggctcaaatatcccctcacgccccgtcccctacaatacagggaaactgaggcacaaaccgggcaacgcccagctccaggttacacgacacacccagaacacaggaggccccaattcctatgcccctgatccggatccagatccagcccgtagcgccgcctgcgtatccattgagcagacggggaaactgaggcctgtgcgcagcaggaatgaccagatgtggccagtggcgcaccccaccccaccgcagcccgggggccgcgcccgacccggaccggttccccgcggccctggagtccccagccccaccccaaactcggccccggcgtcggtagcggcggcacctgcacatctggcggccttgctcgcgcttccgggatggcgcccgcgccggcgaaacgtcaccacgcaccgatcctgcgagcgcgcgtggcggggacgtaccctggagccgcttgcgtgcgttaagtcacgacaggaaagggcggggcttagacggagcttcagctcgtgggtgcatcacaatgaatagccaatcaaacaattcatctcgcgcctgcgtatttccagaagcccaggcttgaaagcggcccggaagaaggaaggctgagagaagtgtcccattttgtagatagtgtgactgaggtcccagagtggtaaccctccccaaggtcgtaaatgctacagtggtcagaggccaaaccacactcaggtgtcctgctttccaagcagggaattagactcatctgtgttcagacatccctgctccacttttgctgatttttttggtccaagtttcctttttttttttttttttttttttttgagacagagtttcgctcttgttgcccaggctggagtacaatggcgtgatctcggctcaccgcaacctccgcttcccaggttcaagcgattcatctgcctcagccttccggagtagctggaattacaggcatgtgccaccatgcccggcaagttttgtgtttttagtagagacagggtttctccatgttggtcaggcgggtcccgatctcccgacctcaggtgatctgcccgcctcggcctcccaaagtgctgggattacaggcatgagccaccgcgcccagccctggtttccatttacacttccacgttgttttggagtaatgcgctggggaattttttcaaaagggtttacaggctgggcgcggtggctcacatcctgtcattgtaatccgagcactttgggaggccgaggcgggcggatcacgagatcaggagttcgagaccagcctgaccaacatggtgaaaccttgtctctactaaaaataaaaaaaattagtcgggagtggtggcgggagcctgtaatcccagctactcaggaggctgaggcaggagaatcgcttgaacccaggaggcagaggctgcagtaagccaagatcgcaccactgcactccagcttgggcgatagagcaagaccacgtctcaaaaaaaaaaaagaaggtcaagctaaaaaatgaagaaaatgtattttaagttcatgttagtttgtgtatacgagtaccaagtttttgtaataaaatgcctcacagctacaattggaaaaaaaaaaaaaaacgggcctgtggcccgagcctgtggtcccagtttctcaagaggctgaggtaggagtatcgtttgaggccaggaggcagaagttgcagtgaacgaagaccccactccagcctgggcaacagagtgagacccagtctcaaaaaacaaacaggcccggcgcagtggctcacgcctgtaaccccagcactttgggatgccaggcgtgtggatcacctgaggtcgggagtttgagaccagactggccaacatggtgaaaccccgtctctactaaaaatccaaaaaaaaaaaaaaaaaattagcctggcgtggtggcaggtgctataatcatagctactcaggaggatgaggcatgagaatctcttgaacctgggaggcggagattgcagtgagccgagattgtgccactgcactccagcctgggtgacagaatgagactttgtctcaaaaagcaacaacaacaacaacaacaaaaatcgctataaactgatgtggattaataaatccacatcattataattataattatttcctttcctgcccctttaaattagctcctggctgggtgcagtggctcacgcctgtaatcccagcactttgggaggccgaggcgggcggatcatgaggtcaggagattgagaccatcctggctaacatggtgaaaccctatctctactaaaaatacaaaaaattagccaggcgtggtggcaggtgcctgtggtcctagctactcgggaggctgaggcaggagaatggtgcaaacccgggaggcgaagcttgcagtgagcagagatcgagccactgcactccagcctgggcgacagagcaagactccgtctcaataaataaataaataaataataaataagctcctgtgtccttttaatatgtcgccaccattctctga

SEQ ID NO: 1560594 - DNA, 4001 bp, Homo sapiens
tgcttttgcaaatcgccagtccctggggtcaggaagggagcaggcagcagtggcatggacaggctgaggccggcctcggggagccacggaggggagaggggctgtcacctgggggtgatgcaggaaaagtcgatgaagagagagggaaagatgagaaaaatttagagtgaaatcaccaggactgggtgacatggtgcatccaggaggatggagaagaggatgagtgttcagagtctgccctttgtgactgtcatgttccccgccaagaagctgccgagtgaagtgtgggctcgtctggggaaaagtgccgggctcagccttggttgtgttgggtttgaattctcattgtggaaatcggtgtgcggagctgacgcctgcactcccagggtgaccgcagcactactcacagccgccaagacctggcaagaacctgagtgcccaccgccaaatgaatggatgaggagaatgtgctgtgtatatgcaatggaatattattcagccctaaaaaaggaaggacattctgtcattcgcaacaacatggatgaaccagaggacgttaggctaagtgaaataagccgggcacagaaagacaattactgcgcgttctcacttatctgtggaatctaagaaaagttgatcacccggaagcagagtagaatggtggttattggaggctgcaggtgcggggcatgggagagacactgatcaaatgatacaaagtttcgagtagccaggacgagtgaatttttcagatctatggcacagcagaatgacagtagttcataataatttattgtatatttcaaaattgctaaaaggagatttaaaatattctcatcacaataagtatgtgatggggctgatatgttaatcagctttatttaatctttccacaatgtgtacatacgtcataatatcacactgtaccccgcaaattgcaattatttgtcaattaaaaataaaatttttgaaaataagaaaagcaaaataagacaggtggaggatgcgagagagaactgggtgagggttggttatgcattttacatttggaagagtttgcaatctagggtatatttaaagggatctctccaggccctctaagaatcaacatcactcccacccagcactgcccttggggtgacagaggggactgggaagatgggacgaaggcatgacttaccctcctgcgtgtggatggtctgggccaggcagagcactggaagagaagccccagtgagaaaaatgcccagtgcccagtctccttacggggctgctgtcaaaagggggctcgatggagctggggggcattcagcatttcataacgaccaagccaaccctcctcgacatcactgtctccatgtaatccttcttgctgcaaaatggtttcaagataaatcccaaagtctcctcctccaaaaaggctcctgctcccccagcccttcttaaagctgacctcatccccacacccgggcccctgtttttaggacaagatcttctctgatcagacttaggccccagggagagcagcagggcagtcttgggaggaggaggacactttcctccccagaatcttctggactagagtcaggcttgagcagggaattttccagacctcccgaccccctttccagcctcccggctgcctccaggactcacctaggcccaggagggcggtggggtggggagacatggcccaggtcccagcagtgcagcctggcctgaggcgcaccaatgcaaggacagaactctgcagcagacacaagcagacaggatgtgctgcccgggggcctcctgcctatggggcttccacagcaactgcctcacacaagaggaagagctttctgtcctgttctttccacccttcccactagtgagacgagagggagggccttggtttctgaaaaatgtcgcttaccctaaatgtcgcttagaggcagatgaccgtaaactagttaccagatgtgtcagcctctttctaaatctatgggacaaggcagaataaaggtcgggcaaccaattgacttggacgccgtcccaactccacaagttaacggtcgcagctcttgggcaagacgttacaaaactagaagctgacatttccttgtattacaaatgggagccatagaaatccttccccaagtttttaatattgtgatctatgctaaaatcccgacaaggtatttaacacgttaaaaatatcctacaaagcatattatttttttaaggagactattggtgaggatgtggagaaactggatccctcgcataccacagtaggaattaaaaattgggcaatcactatagagaacagtggggaggttcctcaaaaaattaaaaatagagctaccatatggtccagcaatcccacttctgggtctgtatttaaaagaaacaggccaggcgcagtggctcacagctgtaatcccagcacttcgggaggccggggtgggtggatcacctgaggccataaattcgagaccagcctggccaacatagtgaaaccctgtctctactaaaaatacaaaaaattagctgggtgtggtggtgggcacagctacttggaaggttgaggcaggagaatcgcttgaacccagaaggcaggggttgcagtgagctgagattgcaccattgccctccagcctgggcaacaacagcaagactctgtctaaaaaaaaaaaaaaaatcagtatgtcaaagagccgtctgaactcccctgatcactgcagcactattcgcaatagctaagacgtgaaaaccatctaaatgtccattgatagaataattgatatagaaaatgtggtgcacacacaggggaatactattcagccttaaacaaggaagaaaattctgccatgggcgacaacacggacgaaacctgaggacatcacgccaagcgacgcagaggcagagaccaagtactgcatgatgtcacttacaggagatctgcaaagtcaccagagtcacaacatcacagcagggaatggtggttacgggggctgggaggagggggaaatggggagttattaacaaacaggcctagagatctgctgcaccacatacgacccatcgtcagcaataacgtcttgttcacttgaaatttgttaacggaatagacctcatgttatttggagggcccggaggaagacaggaagagaagggaatgtttgaaacttcttagagatggattaaatggttgtgaccaaaatgctgatagtgatgtgaacagcgaagtccaggctgacaaggtctcagctggaaataaggatcttacttggaactagagcgaaagccacctttgttacgccttagcaaacaacgtggctgcattctgtccatgccctagagataccacgccagggtgtctggcggaagaaatttcttttctttttttttaaacggagtctcgctctgttgcccaggctggagtgaagcagtgcgatctcggctccctgcaacctctgcctcccagattcaagccattctcctgcctcagcctcccgattagctgggactacaggcacccaccaccacgcccggctaattttttgtatttttagcagagtcggggtttcaccgtgttagccaggatggtctcgatctcctgacctcgtgatccacccgcctcggcctcccaaagtgctgggattacaggcgtgaaccaccaagcctggccaagtcagaagaaatttctaagcaacaaagtgttcaagtggcatggcttcttgtaccaacctaggctcagatgtgggagcaaagaaattacctaaaggtagagtttatatttaaaagagaagcaaagtgtaaaagttcgaaaaatttgcggactagccacatggtagaaaagaaaagtccgttttcaggggaggaattcaagtaggctgctgggcaacgacttgctggagaaatttgcataactaagagggagtcacgtgctgtaccaaaacatctcatctaccccataaatatatacacctactatgtatacacaaaaattaaaaatt

SEQ ID NO: 1560595 - DNA, 4001 bp, Homo sapiens
ttcagtgaattctgacagctgtgaaaccaccaacatatccaagattttcttcactgctcagaagattcctcatgctcctttgcctccatgtggccactggttcctttttgatatgtatttgttgactgatttatttatttatttatttatttatatatttattttgagactgagtttcactcttgttgcccaggctggagtgtaatggtgcaatcttggctcccgggttcaagcgattctcctgtctcggcctcctgagtagctgggattacaggtgcgcaccaccatgcccagctaattttgtatttttagtagagacggggtttctccatgttggtcaagctggtctcgaactcccgacctcaggtgatccgcccaccttggcatcccaaagtgctgagattacaggcgtgagccactgcacccggccgactaattcattttttaaacacacttcttacctgggaataaatttaaacttgcaaaagagttgcagaggtacagagagttcccatatgcccttcatccaggtccctctaatgttcatgctttacacgaccccagcacatccgccaaaaaaaaaaaaaaattaacactggtacaataattaactgacaggctttctttggatttcatcatctttccactaacgttctttgcctgtgctgggatccaatgcaggggcaccgtcctgcatttacttccctctctgttaactgcagagaagggtttctgttttcctggttggaccctgattaatattcccctagtatctgaactccaggtgcccaggaaggttggggggcaaggatgtgctgcccactggggaaggagtggctggcagaatcgacatccgtctgttcctccacaatccaaggtcacagaacacatgggcagttattctgggtttttccataagaagggtgatacagagctgtcgttgttccatattatgaggacccctccacctttgcattcctctaagacctttcctctgagactctcctccaagctggagaagacaagctacatgcttatgtccaaggcatgctgcagattcagcatggcacagctccctcactcaaaaacgttacttgatgtgggatgcacaggcatagagtagtgattctcacactagactcagatacatacacaatatttgcaacttaaattaaacaccaattaaatgtcaagtggaaagacaacatctacagaaataaaatgacacaagatgcaatgtgaaatgtcattaaaagaagagtttgcattagaatagttcaaatatttcaaaactattccagcacgtcactgcgttgctgacctatcttcctcctgagatgtggtcgccgtaatgatctcaagcttggacctcgtggacagactggggaactcaagctaaaccccggtcctcacagttcagcacgttgcaatcctgtgtcgttccgtccaatctaatccaatctcaaggaccccagttcctgagcaaccctggcttggctcggccaaagggaagcgtctacagaatctgagtctagaatgcccggaggtctgtacttcttgctgttttcaggagattcaactgcaaagccctccccaagtcatccacattggctcacgtttctgtgccccacccttcctgcctgggaggacccttcttgttcagccaaaaaagcaacctgagggtggtgtggtagcagggactcacccatttctctttccatcttctgtcgcggatgcaaccctggaaggaagacctcaggacgatgatcatcttcataggattcccgacctgtgcctggctttgtcctgaatattagccttggcagcctggcctgggctccgatggtggatgaacttggctttccacgggctgccacctccagcctgcgctgtggagagaccaggtcctcggaacagtattttaaccttgtcctcctttcccttccagggtttaccaagacatagcgggtgtcatagatgtgaaaaagcttctgctataccagggtcaggaacggagcaaaactgaaaaccgcacaggatgtggtctgccaggtgccagcatcacagctcaaatccttaagaagctccagccgcaggcacggaaataaacagcttctccctgccctgtatacgtctccgattttacccaggatggggctgaggaagcaacacagattcccaaacgttacttttttttttttattttgcttgagagccaaggcaatattagacaagccttactccctaattagtgcctgacaagaaccatatctctgtcccaatccttctattcaaagtaggcacaatttgcttttaccaaatgtaaaactcatgtcaaagccatgctgtgagtatttacaccagagaaatcggcaaatgctacacgtcggggttgttttttgtttttctttttgctttttttttcagagagctgattgtcaagactttaccagcacactgctggtaaatttccaaaggccaatttaaagaaatttttttaacagaacatgtaaaaaaaaatcaacgtgaagtcaacatgctccagggaaatcagacaattgataaagcatgtctatttctgtagtgtatactccagcctgtttccccctcctacctcaggtaccgtaaccagcatctgaagtcttatattcaaatttcccttgcacttttgtaaatatagtgttctctcatcgatgtacctatttggtgtgtatgtatatgtgtgtgtatatatatatatgctatcatttaaaaattgtatttatttatttaaggtgggtcaccgaggctggagtgcaatggtgcaatctcagctcactgcagcctccacttcccaggctccagcgatcctcctgcctcagccttctgagtagctgggattataagggtgtgaccccatacccagctaatttttgtatgtttagtagagatggggtttcgccatgttgaccaggctggtcttgaactcctgccctcaggtgatctgcccgcctcagcctcccaaagtgctggaattacaggcatgagctactgtgcccagcctcgtttttaattttagtgcaaagtatagttttcaaaacaatgtttgcaatgtcatcaaatatagaatgagcacgcatcaatgtcttcttaattcattaatgatgaaatcatcattcaaaattcctgtctttacccaaatatttagcttcttctgttgctcttcatttgttcctgcgtttctccatttccactgggatgatttcctcttgtccaagccttttattctggcaaccaatgaactttacactctttctatagttttgccttttccagaatgtcacatagttggaatcagacagtggatacgccatttgggcgggcttatttcgtgtagtgatatacattgaactctcctccacatcttttcatgacttgagagcttgtgtcttcttagcatgggataatattccattgtctggacacatagttaatccactcacttactgaagggcatcttggttgcttccaagtttgggcgattatgaataaagctactgtaaagatccatatgaccgtatgttttcagctcccttcggtaaatatcaaggaatgcaattgctggattacatggcaaagctatatttagttttagaagaaattgccgcactgtctcccaaagtggctgtaccatttggcaatcccaccagcaatgaatgagagttcccgttgctccacatcctcgccagtaggccagtatgtggtattgtctgcgttttagaatttggccactctaataggtgtgtcgtggtaacttggttcctaagatactgatagaggtgcagaacaccagctgggaagtcagccagaatgagcttctcctgtgacttcctgtcccacagcctcagagaactttgacaagccacttcccctataaacttgtctttctttctttctttttttttttttttttgagatgaagtctcactctgtcacccaggctggagtgcaatggcatgatc

SEQ ID NO: 1560596 - DNA, 4001 bp, Homo sapiens
tctctactaaaaacacaaaaattagctgggcgtggtggcatgcacctgtaatcccagctactcgagaggctgaggcaggagaatcgcttgaacttgagaagttgagtttgcggtgaaccgagattgtgccattgcactccagcctgggtgacagagtgagactccatcccaaaacaaacaaacaaacaaaaaaggtcatctcacagagttagagattagaatgatgctattaaagtcgggaaatggggggcttgggagagacactgatcaaatggtacaaagtttcggttaaacaggaggagtaagtttttgagatctattgcatagcaggctgactatagttaataataacttattatatatttcaaaattgctaaaagtaggttttaaatgttctcatcacaataagtatgtgatgtgattgatatgttatttagccttatttaatctttccacaatgtttacatacgttgtaacatcacatcgtgccccacaaacatatacaattatttgtcgattaaaaataagatttttggctgggcacagtggctcatgcctgtaatcccagcactgtgggaggctgaggcgggcggatcataaggtaaggagttcgagaccagcctggccaatatggtgaaaccccatctcttctaaaaatacaaaaaaaaaaaaaattagccaggggtggtggtgggtgcctgtaatcccagctactcaggaggccgaggcaggagaatcgcttgaaactgggagcagaggttgcagtgagccgagattatgccactgcattctagcctgggtgatggagtgagactccatctcaaaaataaaaataaaataaaatataggatttttgaaaataagaaaagcaaaacatgacaggtggagaatgaaggagagaaaggggtgagggttatgcattttacatttggaatagtttgcaatctagggtatatttaaagggatctctccaggccctctaagaatcaacatcactcccacccagcactgcctttggggtgacagaggggactgggaagacgggacgaaggcatgacttaccctcctgcgtgtggatggtctgggccaggcagagcactggaagagaagccccagtgagaaaaatgcccactgcccagtctccttacagggctgctgtcaaaagggggcttgacggagctggggggcattcagcatttcataacgaccaagccaaccctcctcgacatcactgtctccatgtaatccttcttgctgcaaaatggtttcaagataaatcccaaagtctcctcttccaaaaaggctcctgctcccccagcccttctttttggtgttgttggagacggagttttgttcttgtcgcccacgctagagtgcagtggcgcgatcttagctcactgcaacctccacctcccgggttcaagcaattctcctgcctcagcctcccgagtagctgggattacaggtgcccgccaccatgcccggctaatttttgtattagtagagatggagtttcaccacgttggccaggctggtctcaaactcctgacctcaggtgatccacctgcctcagcctcccaaagtgctaggattacaggtgtgagcaccgcgcctggccccccagcccttcttaaagctgacctcatccccacacccgggcccctgtttttaggacaaggttgtctctgatcagacttaggccccagggagagcagtagggcagtcttggggggaggaggacactttcctccccagaatcttctggactagagtcaggcttgagcagggaactttccagacctcccgaccccctttccagtccttcccgctccctccaggactcacctaggcccaggagagcagtgaggtgtggagacatggccccggtcccagaactctgcagcagacacaagcagacaggatgtgctggccgggggcctcctgcccgtggggcttccacagcaactgcctcacacaagagggagagctttctgttctgttctttccacccttcccactagtgagatgagagggagggccttggtttctgaaaaatgtcgcttacccgcatgatcagatgaccttaaactagttacccgatgtgtcagcctctttctaaatctatgggacaagacagaataaaggtcgtgcaaccaactgacttggatgtcatcccaactccacacgttaacgaccaccgctcttgggcaagatgttacaaaactagaagtcgacatgtcctcgtatttaaaataagagtcatagaaatccttccccaagtttttaatattgtgatctctgctaaaatctcagcaaggtatataatgcattaaaaaagatcctacagtgcgccgggcgcggtggctcacgcctgtgatcccagcactttgggaggctgaaaaattgtgcactcactatagagaacagtggggaggttcctcaaaaaactaaacatagagctaccgtatggtccaacaatgccacttctgggtctatatttaaaagaaacaaattcagtatgcaaagagccgtctgaactcccctgatcactgcagcactattcgcaatagctaagacgtgaaaatcatctaaatgtccattgatagaagaattgatatagaaaatgtggtgcacacacaggggaatactattcagccttaaacaaggaagaaaattctgccatgggcgacaacacagacgaaacctgaggacatcacgccaagcgacgcagatgcagagaccaagtactgcatgatgtcacttacaggagatctgcaaagtcaccagagtcacaacatcacagcagggaatggtggttacgggggctgggaggagggggaaatggggagttattaacaaacaggcctagagatctgctgcaccacatacgacccatcgtcagcaataacgtcttgttcacttgaaatttgttaagaggacagagctcatgttaagtgttctaacaatgatacataataataaatattatatataaataattataattattacatctaataataatataattaatataatattattagttaaaattgtttatctattttatacagtcattacatatataattgtttatatataataatacagcaaatactatatatatgcaagtttatatataattgttaatatatataaactattataattatacatatacaattaacaatttgtgtgtgtgtgtgtgtgtgtgtatgtgtgtgtggagatggagtcgtactctgttgcccaggctggagtgcagtggtgcaatcttggctcactgcaacctccgcctcccaggctcaagcaattctcttgcctcagcctgctgagtagccgggactacaggcgcacgccaccatgcccggctaatttttgtattttagtagagacggggtttcaccatgttggccaggctggtcttgaactcctgacctcatgtgatctgcccgtctcagcctcccaaagtgctgtgattacaggtgtgagccaccgcgcccggccccattaacaatgttgtaattatatatattatgtataatacacacacacattcacacacacacacacacacacacacacacacactctactagcataagttctcttcccctcctcctacagtgtcatttggctccaggtgggagtgaggtggtccaacagcacatgcaaaatcccgaaggggttgaagggtcaggagacagtgcttagaacctcgcgttgaggtctggggtcagatgggcactcagccgggtgtggaatgaggagcaggaccaggaccagcagtgcatttcggcatcacggagctgagggggacagagcccaccctatcatggattctcatctccgctgctcctgaggacactggggagcttgtctccaggtgtaaccgtcgcaggcattgacgagggtctacaccgcagccgttgctcacttcttccttactgaccaaaagccagttctgtttgagtggttgtgctccaagcccagggagcaag

SEQ ID NO: 1560597 - DNA, 4001 bp, Homo sapiens
catccgtatttcattacaccctccctccctctctggcctcccagaggaaactggtgtgttagttacagcgtgaatttcaaggcagttcaaagctctccatccagtcaaagccaacccccttgccaattaaaaaaaaagtttcctgcaatccttgtgttcatcaggcaatcccaatccttttctaggctaggctggttctcaggagggaaagggccatgtagctgttgtctagggcgaggctgtctctctgcaactaatttaaagccacctaaaaagctctaactcaggatcatgcactaaccagcctcttgtggaaatctaaaatctaatccatttcacccagaggaaaaatcgccgcttggacagctgaaccgaagccattcacagcctctgaagaagcgaggccaccccagggggtcggtcccgggggatagctgccccaccgtggctgaagatctcggctgcagaccaaggaggggcggggagattctgaggcaacgtttcaacctcgtaaggaaccgaggccttgagggtggccgggggcccctctgtgaacttgatcggggctggtggggcgagggcgccccccaggacaaggtggggacggaggtgtcgccacagagcacagcggaaaccggggacttcgccaggagggcccaggataacggagggcgactcgtgtatgtcgcggaggcggctccggggacccgggacttgtcgtcgcctttgtgacaggaaccgcggaggaacgccaggcctcccctgcatccgcctcgccccggacaaggtgaggctcagacttccgcgccagccccgccccgctcgtacacaagccccgtcctcccgacgcccgcctccgcctccaccgcctcacattggacaaggggagtggctcgagggtggcctgttggactacacccaatggaattcggggggcgggccaaaggggcgggggcaggggcgggagggggtggcccccgtcccggagcacgcggcggaatcccgggactgcacccaactcaggatggcagtggcgccctggggtcgcgcaaagcggatcgggacccctgagcccgcggtgacctccaggctggacatccgggtctccagtcgccctcgcccccagaaggacttaaggcgggggtgggagtgatcccttgttttaggactggaggtccccacacccagctccgagttagaagagagggtcccggccgggcgcggtggctgacgcctgtaatcccagcacttttgggcagatcacctgaggtcggggttcgagaccagcctggccaaaatggtgaaaacccgtctctactaaaaatacaaaaattaggcgggcgtggtggttgggcgcctgtaatcccagctattcgggaggctgagagaggagactcgcttaaacccgggaggcggaggttgcagtgagctgagatcgtgccactgcactccatcctgggcgacagagctagactccgtctcaaagaagatgcggtccctcaccctgtggagacttgggggacagcggtgccccgtttcccttaaatccctcagactcctcccgaccctcgcgctcccctcagcgcccccctccagcgccccctccagccgtttgggaaggaccccgtgccattaccccacaagtctcccagggatggagtgattatttgtacccaaaaaaataaattcccaagggccccccgggggctccctctcaacctattctggcgcctggagcaagccttacctgcagtccccgccgcggcgaggagcaaggcgacggtccagcgcaatttccagccccagggccccatgctcgcagcctctgccaggcagtgtcccgacccggatcacgacctgctgtgtcctagctggaaaccctggcttcccgcgattgcactcggggcccacgtcatttacagcatttcaatgtgaggtttctagcagggggaggagtttgcagtggggtgattttcaaatgtcttcacctcactgcaagaggaggagtttcgaacggccgatgtgacatcggctttttaacccgtgaagctctgattcccactccagtccttcgaaagtgtcgccagggcaggcgacttgatttgttgtatttgggtctccggtgaagagctgacgccccctcaaaattggaaacgcatcttctgaaagatcctcctgaaatttctcgatgtttaactgttaacattttgctgttgttgtccacagaaggataacaacagcctttcaagatcctccaatagcctaatgccattgtcctctctgcctcaaaaggaaaacactaaaaatgttgggaacttccgccactttctatatttgccttttcctttctaggaattgtgtatagatttttagcttcctttcgttgtatattgtttttacattgttattccaaatcacctaatagacactgatcaatcaggaatttaaataaaatcttcacaaaagtacagccaaaaaaatattttttgttttgtgggatcccgcctttggctgagtataaacatctgaaaaatcaattgtacggatacctggagtctggacgtaaatattgatttctccccttaggagaaggagttgaacaaacagaagggcggtttcctctccctcaaagcaaaatcaaaacaaaacagggctttcacagttgaacttgaacccctaagccacagagagctggtggagaccaacttttagaattgagtctctttggggactcatggggttgccagaggcctcttgccaaaaaggcacatgtgagaaacttgcctgaaccccacacagggctgggcagtcttggcggttcccccaggaataagctggatttctctgggattttgcaaactgactttggcaggcagtgctaacctctcagcaggattttagggaaacctaggagaccaggcagaaaagggacaaattgaactctcagaaggacaaaaaaaaagattaatcagggaaaataattttttaattatttttattataattttttaaataattatttattatttatttatcattatttccagctgtcactcaggctggactgcagtggcgtgatcacagctctctgcagcgtcaaccctgggctcaaggaatcctcccacctcagcctcctgaatagctaggaccacaggagtgcaccaccatgcccaactaatttttaatttttttttatagatggggtctcactatgttgcccaggctggtcccaaactcctagcttcactcaatcctcttcctcttgcatcatgatgcctctcaaattgctggctttacaggcatgagccactgtgcccaacccagaagaagaaattgatgataagaatttttggcagttaagactcagtttcagaattcggccttggacagataaattagctttcccaacctgtaaaggggccatcaaaatgcttgaacctacttggcaggctcagtgtcaaggtcaaattgaaataattagcgggctgggcatggtggctcacgcctgtaatcccagcactttgggaggctgaggcaggtggatcacgaggtcaggagatcaagaccatcctggataacacagtgaaaccccacctctactaaaaaaaaatacaaaaaattagccgggcgtggtggcgggtgcctgtagtcccagctactcgggaggctgaggcaggagaatggcgtgaacccgggaggtggagtttgcagtgagacgagattgcgccactgtactccagcctgggcgacagagtgagactccgtctcaaaaaaaaaaaaaaaaaaagaagtaattagcaatcacctagagaagtttacaaggataggcaagttctaggagctgctgcaacgtttataaatgtgtccccattgaatcccattccttatgccatttgcgacattaaacaaaaaagtgaagtctggatgtggtggctcatgcctgtaatcccagcactttgggagggtgaggcggggggatcacttgagcctaggagttcaga

SEQ ID NO: 1560598 - DNA, 4001 bp, Homo sapiens
gagatggggtctcgctctgtcacccaggctggagtgcagtggcgcaatctcggcttactgcagcttccacctcctgggtcaagcgattctcctgcttcagcctccctgggattacaggcgcgcaccaccatgcccggctaattttttttgtatttttagagataccatgttgaccaggctggtcttgaactcctgacctcaggtgatccacccgcctcagcctcccaaggtggtgggattacaggcgtgagccacagccggctgatttaaatttttaaaagcccatcaggtttgagactcctccagtttggagaactgagcggtttgcccagcagctggggacctctagcatctacctccaacccctgtgggcgcccagacggcaatagccaacgctttttgagtgtcatgccttggtatggtcctaaattctgtgtgttcactcttgtttgaccttggtcacaaccaatggctaaagtgccccctccctccaactcgattcatggcccctctgatgaagtgggtgaggccagcttactttctcctgtcgcttttcttccttgtactctttattgcctctgatcactcctttcccttcctccagcagctcccgaaacaggtccacagggccagaacctggggctcccgcctctgctgcttcaagctcaggcagtgagttctgatgtctggctttcttccgtaggaattctgtacgggcctggggagaaagttataggcaggacattcagaacctagaggtaattcaagaactgtgagtctggtgcccaccacagaaaatggcagtccagggtgctggggttatgagaaagggagcactaggcgcctaaaagaggcacctgtcctagctgggggtgagggtaggcagatgaggcaacgcctgggttttgtaaactccctttcaaatagtaaaccacgggtcatcaaggatgtatgggaggaggtccctggcctaaaccaaaggggttcctaacctcaagtgagacaattaaaacagccataaaggtatgcattaggccagacgatctgaattctagccatggctccaagtgactaccccaagtctgctgaagccctgtcccctgccttcaggacgcggatttcaaacagcgctcagcagcctactgagattctaaaaacctagactacctcccacccacggcggaggatcagactagctaaggaaatgaaagttgggtgtacaccaaacagatttaaagagccatacggaaagcccgtgtttgtgtgtatgtgtctagggggcggtgcacgaaagggctcgcccgatggcgtggagcctggctgtccgcctctccttaaaatgtgccttcccctcactgaagccatctcacttcgtgcaacagagatgacagtgcccctctaagaacgaacagtgcttattggggattccgcaagtcaggtgcacggcatgtagttagcatacagtagatgctcaataaataggctgtgcaggcaaactaaaaagtgatccgaatttccttgaactgtccaagggttcacggattcattaaatgttaagcttctcttttgtgctagacactgttccagccatgtgaaatacatcagtgggggaaaaactaagacgagggcgagatcaaggaaggtttcgtggaagtgggcacaaggtttgcggggcaacgtcctcgaaagtgggatcggcgcctggtcccgaatttcacacggggcacattgagcctgcgcaacgcctccgcttccggcccccaaccgcggcgcctgcgcgctgggccccggagcgccgccctgccggcttccgagcttacctcttgctgagccagcagcaccctccgctcacgctccttctcctcctcccgggcctgggcctcgtcacgccgcacgcgggcgacattgtccttgttccggacgtgccagctcttcttgggcaagatattcatggcgtcgtagctgtccagggactggcacgcccgcctctttgcacttccgattggcgagaggatgcccccctttttcttgtccctacttcgaccgcggattggttccgaattagttggtacggccccctggcctgtagcgacaggtgattggctgagacgccctttatcacagcgaatgctaggcgttcggctcgtggtatcccctagcaaccgcctcttgtcacagatctgaaccaatcataagttggcccgcccctgatgctaccagatgcggccgtcgattggccgacatgaccgacaagtctccttgcggaagagcgctctgcaccgacaaacatgcccgtacatttgattggctcctgccccgctgtagccctgcccccaccttcaggacgcagatttcaaagcgcgctcagcaacctcggctgtatttattgatacaaggaagatcacccgagagtcagggacgtggcggcgaggggccctggaaatctccagataccaaagctggaagggcgtggagtcttctccagttctcctagtttacagatgttgtgacctaggcttacaatgggcctggggtctgaaagcgggacgtgggctgcgggggtcaaagagccggtttggtggaggtcagcgccacagcgcgccgtgccaggaagactttattctgcgcctcctggggcaaagagaggtggaggtgagacaatcctcttccccaacccctttccatgttccccaggggccctctcagggacccgcctggctcaccgtctctctctgacgtttgagctcagagatgaggcgtccgtaggagttagccagagccacagtgtacgccatcaggatgctgaaggagacaggaacggaagccactcctgacacgctcttccattatatccaaacgtctggctccttcgaagccagggatgtggacgcctaagcccctcctcgtctgggctcaaggagttcagtctcccagcccctccgccttcagatccaggagtcctacgtcccgcccacctcctccttcggacccagcagtccaggagcctaggcctcctccctcagactcagtacgttgcctgctcccacgcccaagcctctcctctcttggacgcaggtggtggcccccagatcacacgcattcaaacccagacccagaagtctgggccgtctcacctggagatcagcagaaggggcacagcaaaagcctgggtccccaggaagaagaggaaattctgggtggtctcagggaggctggaaatagactcagggatctgggcccagatggacgactgcccccggaatggaccacacagcttagaaggcgggatcctgaagtcaagacaggctgggctcacatagtgccaggagtctgaacactgaatggggagagagggagggagagaggcgggagcctctcgcacttacaggaagatgctgtaaagcaggggaacgctggagatggccagacccaggagaaggaccaaggggaaaaagaaattcgccgcggaggcccggaaggtgcgggcagccggggagcaggtggagaagagggtaagctggtgggggaaggcacggagaaaagggctctgaaacacaagagtctgtgcctccatttttttttttttttttttttgagacagagtctcgctctgtcgcccaggcttttttttttgagacagagtctcgctctgtcgcccaggctggagtgcagtggctctcactgcagcctcccctcccgggttcaagctattctcgtgtctcagcctcccgagtagctgggattacaggtgtgcaccaccactcccggctaatttgttttgctgttgttgttgtttgtttgttttctctttttgagacggagtctcgctctgtcgcccaggctggagtgcagtggcacgatcttggctcacttcgaccttcacctccctggttcaagcaattcccctgcctcagcctcctgagtagctgggattacaggcgcctgccactaagcccggctaattttttttgtatttttagtagagacggggttttgccatg

SEQ ID NO: 1560599 - DNA, 4001 bp, Homo sapiens
ggggtcaaggatctgaagagttctgggtgtggactagaaaggctggagtgaggggaagcccctggcccctttgtagagctccaggtggaaaacgaaggatttggaaacagggaagccagagcagacttcccaaagggaaggagaagggtctgaaacccatgtgagcaaagagaggctgtgatgaaaggtccagagggtaggggtgcctccatcaaggggaaaaggtctacaaaaaattctaggggccaggcgcggtggctcacgcctgtaatcccagcactttgagaggccaaggcgggcaggtcacctgaggtcgggagttcgagaccagcctaaccaacatggagtaaccacgtctctactaaaaataccaaattagctgggcatggtggcatatgcctgtaatcccagctactagggaggccgaggcaggagaatcgcttgaacacgggaggcggagggcggtaagctgagactgcgccattgctctccagcctgggcaacaagagcgaaactctgtctcaaaaaaaaaaaaaaaaaaaaagctagggagtacgggttgtgaaaggaacctgaaccaagaggatggatgctataatgagaagagtctgagggaacccttaaggctgagagggtggaaaggtttccgagaactctgtgaaaagggaggcctttcagggagcatcgagggggctggaagaatattggagaagagaagaaaattttgagaggaaaaggggattttccggaagttaaccctggaagcaagtggtcgttgagcgttcctgagaatgccaacgtgaaccccaacgtgaagaaatgggttcttagcactgacagactgatttcaaaaaggtctccgaagggcagtaaagagacctacgtgggagtcctcagtgggactacccctgcctgcttccacgggaggttcccggaagcaggggtagggctgggagagaaaagggatcaccgtggttgggtgtctggacataaagctttgggaatgccaaagaagacccaaaacatgttcaacgaattaagagtggggtacagagagaattggaagaaaagtggagtgtctccggagcaaggattcaggagcctaaactcccgagagggagtaactgataagtaggataattaatcccgcaggagaaccggaattcccacgagttgacgggataggaacgggagtctggagctggggaaaagccctagaaacgcaaaggcttaacttaaacaggacacagggcgtgggtggagacgagggatcgtggcggggacacaggaagaggagccccagggcagaagggagattagaggtaaggtcaggagttgggggctggacagaggactcccggacgggtctcaagaacagagacaggcatcagacgcgaggcctgaggtcccgggagcacctggccgtcccgcaggctgggcgaaggcaaaggaggacgccgggtggaggaggccgctcggatccccacgactagccacggagccactgcccaggccgcgcctgcgcaccacgccccagaaagacgcgcaggagccgcccgtcgcccggggcaacacccggtcaacggcgagtgaggggcgccccggggccccgagaactccaagggagaggaacggaaattagaagacgacggcgcacgcgcgctagtgcccgaacgcgcggccccaggcccggtgcgcaggcgcagtggctgcccctgcgccgccacaccctgtcgacgctcgcgcgcggcgtctgctgctgcgacggccgagaaggcctcggggctcgcggggcgcaagaccaaaaggagatgctatccccgcccgcctgctcgcctgccgctccccttaccaaccaggatccttcgctgcagggacacgccaacaaccacccaggcgatcagcaacacggccacgacaccgctgtgccacccggctggctctggtcttctttggcttcgacgtcctgaccgcggcgtcctgacgtcacgcggcggccttgcaccgcctccctcggccctgcacagccaatgaacgccacgagctgcgcttgagcccgccttcctgcccacgcacttacgcatgaacattttaaggcagaccggaagtctgggtggggacggtggccccgaggagacaagcgtggccgcattagctctttctgcctcccacgcagccttattttttttattgttgttttcttgttgctgttgttgttgttctcggagacggagtcttgctcttgctctgtcgtcgcccacgatagagtacagtggcgtgatctctgctcactgcaacctccgcctcctgggttcaaacaattctgcctcagcctccggagtagctgggattacaggcgcgcgccactatgcccggctaatttttgtgtttttagtaaagacggggtttcaccatgtcggccaggctgttctcgaactcctgacctcgtgatccctccgtctcggcttcccaaagtgctgggattacgggcgtgagccaccgtgcccggccgcagccttgttttgactgagtcagtgggagccattactgttcctaaatgtaaactggcgtgacaggagttccgggattgtccacagcacggtgatgtggaagccctggggagagaatgataaagaaaggggatgaggaacagctccacccggaagagcgggcttccctagcaaatgaatctggaagggcgcaggggagggggcacggcgagttcagatggaccgaggctggaagctgacgcggttggagggggatgggtgtagctgttggcagtggcgctggggtggaagtgtgtggggtcacagatgtgtaagggtgggcgcggagcagacccccgaaggtccctgaggtcaggctgaggcattggaccaaatccgtacataggcatttctctgaactgcgcgccaccttttgagtgccatctgtttccgtccaggactctgatacaactatccagtccgctgcagggaccggtcactgtgtcacagtaagtggtgggatttaagaggcagttttcctcctcatgttctaccattatgaacgtctagcttgaaaaatacataccattttcataactacgtattattttgttagtgctagcatagtagatctttttccgttattttactctgtgggggggggggggtttgttttgtttttgtttttgttttctttttggtactaagctttttgttctggaataattttggatttattcaaaacgttgcaaagaccgggcgcgctggctcacgcctgtaatcccaacactttgggaggccgagatgggtggatcacctggggtcaggagttcaagatcagcctggccaacatggtgaagtcccgtctctactaaaaatacagaaattagctgggcgtggtggcgcgtgcacctgtaatcccggctactcgggaggctgaggcaggagaatcgcttgaacccaggaggccaaggttgcagtgagccgaggttacaccattgcactccagcctgggcaacaagagtgaaattcttgtctcaaaaaaaaaaaaaagaaaagttgcaaagatcataagcagtccaccatgttttatgcccactttcttctgatgctgtcatcacaagcaccaacaaaagtggtttgttgtagatactgacatgatgcattactgtaactaaaacccagactttactgggatttcaccaccttttcctccaatgttttctttacatgccagggtacaagccaggacccacgttccatttagcttccttttacctgttgtatttagggtgggtttcttgtagatagcatgtagttggatcttgcttttttttgcccaagcgaacagtctctgccttttaaaagaggtgtttataactgtacttttattttttatgtcttattctttagcattctgtacacagatacagcgataaaatgaaatgactggaacttaaatgtgaaaactctttacaagtaagcccacaattagatacatttatcttacat

SEQ ID NO: 1560600 - DNA, 4001 bp, Homo sapiens
gatcaccagctcacgtcatgttgccttctcttttctttgtgtgtgtgtttatttaagttatttttcttcctcctctcccttttctttttggccctccctccctccctcttctgccatgtaactggaggatgtgctatgagtttgcaaacagctggactgtcaggctgctttttttccagatgttcctcctctgcctccccttcccctcctctcccctccttttccttccttccttcctttccttggagcactgagcaccatttggaagcttgagagaaaccaaaattaaagagagaaagagagagcgtgcacgctcctgctttgtctttcctgtgtgggctgtttgcatccattgtctcctccagaggtctgggggtgtcactccagggggatctcagccaggggctggaaaggcccccctgtcctccctatacggcacagccagagtgtctgcaggggctggcaccccacttcctggctgagggtgaactccagcttggggaggtggacctgggaaccatggggcaccttggccacggtgaggtgggggtgcagctgccctggagactgtagtgtactcagcccctcggcttccagcctctggctcagcacttgtgccatgctttccagtgtgggagagggtggggcacacagcacatgcgggcccaggaggaccagctttctaaagctcagccgagggggtgcatttagccccggggccaagagggcccgtctcagagctccaatggcagcggcctcctccccagcgcctgccagtcgcagcagggccagggtcaggtgtaggttctgagagggcactaggaagttggcgcagtgtggggccacgtggaccaggtattcctgggccttggtcacttctgcttgtagcccaggctcggtcaccatgagggccacaaaatgtgtggggcgcggttggcaaggggctgcaacactaaggcgggcccttttgtcctcgggccaggccgcaggaccccactcggcttctgtcgtctcagcggagccccccgggactcccagggcctgtgcttccttgccccccagcaatgtggtcctggtggctgctgttggcttcagtgcctcagtcactccggcgaggcgtcctcttggggccagtgttcccaaatcagcagctgtgcccagcgccctctcctgggccgcctccagctctccgggttcctccacgcctggttcctggtgccctgtgcagagcggccttgtgctccctcgcttgggggcagcctgggcctcctgacctgtccccgccagtgtccactcggcaccctctgccccgtgggcgccctcggtgttcggtgcgtccaggatggtgggcccgcgtcccgccgccgagccagagccaaagacgaggtcggtgcgcgaggcgcggtcccacacaaggcggccacggaagcggaagaagcgcacgcggtgctggggcactgccagcacgcccggcccgagcgccgccagcggctggtcccagcaaaaggcgctgaagggctcctcgcgcacacccagaaagcggtcgacgtagcccaccgagaagtcggcggggtcgaggcgcgggtcccagcggatgcgctggatgacgtccgcggctgtgcgcagcggcggcttcttggccccggcctccggctgcgcctcgcggccaggcggcgccggcgccccagggtggggctggcggcagcgggcgccgaagcggcagcggccttccaggaagaagcggcaggccggcgggggcgcgggttccgtggcgggggcttcctgcggcaactccggctctctggccgctgccatgggtgcggggaactggcacgcccgccgcgcagacgaggtcgccccgcacggagggcggctccccttggatgcaccgagcctcacccgacagtggcgtcagcggcccgcgctccggcctagctctggggaccacgccgcgtgccctcgcgaggactctggcccagtccctccttggtggagagcctgacaccgctgctctgggacttcccggctgcgccctcccccagcgccaggaaagcaagctgcgtaaaggctgcggcagtctcggtctcccggagctcttgggagcctggccccgcccctttcccggtgattgatgtgtgctgcctctttctgggtgatttacatgtaatgccccgcccctttcgggatgattacgtgtgcctcgacctttaggtgatttacatgtagtgccccgccccgttcccggtgatttacatgtggtgccccgcccctttcctggtgatttacgagtgccccaccccttttaggtgatttttttttttttttatgtgtgcctctccccttcccaagtgatttacatatgttccccgctcctttcagggtaatttacatgtaatgccccgcccctttccgggtgatttacgagtgcctctccccttctcaagtgatttacatgtgtcccgccccgttccgggtgatttacatgcgtgccctggccctttcccagtgatacttttgtgctgcctctttccgggtgatttacgtgtgtgcctctccccaagtgatttacatgtgtgccctgtccgttttaaggtgatttacatgtggtgccccgcccctttccgggtgatttacctgtgtcccatccctttcccggtgatttacatgtggtgccccgcccctttcccggtgatacctgtgtgccccgcccatgaggggacgtctttaaagaacctggacccgccctcagtccaagtgatttacatttgcggccccgcccctctgggaaacttacgagaacctggcccctcagtccaaatcatttgcatgttcggccccatccctcgggggccttaaagaaccaagatgcctgcggacccttcccccacggagaccaggcccctactgctctaaaagtgttctcagacacttccctctgcagccgctcccagagtaaacggcggctccgccgggtcggagtccacctgaggcgttcagggccagaaagactcctggggctgcagcactctgcagccccgcctcggctggccccgcggtggctgagtctggcccggccccaggaccacgtccggccggcggtggcgcacagtatttgacgaatgggactgcgggagccgccgcctctgcaaggggcaccgcctggccacgccctcgggctctcttaaaggagccgcacccccaccccagggcaatcatcggacccggaccaggcctccgggtgacacatccggctctcagaggcgccaggaccctatcattcatccctttccacgtgcaaagtgaaaagtcagagcccgggcacacaccttggccgtttatgtatacagaagtggggtgccgggcgggaagggcgcggggaatgagggaacctagaggccgatgacgtcgttcagctcgaggtccgcgttggggcggcagcgggcctgggggggctgcgtcccggggcggggttccgcgtcgggcttggcggcagccgcctccgggcgcgccgcgtccatgacgcccagcaccgcgtccagcatggagggccccagatccaggtggaaggacagcagcgggtcggcaggcgagggcgctgcggactgcgggacggcgggcggcggcggggagcgcggggcccccgcggggggcgcccggggctcggggggcggcccgccgccgtggcggctcaggaacgaggtgtccccgaaggcgtcgccgccgcgccccacgtgcagcgtgtgccggaagtcgccgagcggcgcggagatggacagggcgccgcgatcaggccgcttcttgggctgcgcggggcccagctgcttcagcacgggcatctgcgaggggcacgggagggtcagcgcggccccagcccggggctcgcagccacgcgactgctcaaaggacgatgggggacggttcccgttttttgttttttgatttttgtttttgagacggagtctcgcccatgctggagttcaatggcgccatcccggctcacc

SEQ ID NO: 1560601 - DNA, 4001 bp, Homo sapiens
gttcaaaaatgtcacttgggatcaatgagtaaataaacaaggcgctgagagaaaaataagttggtaagatgattcaaactggaaggtgaaggaggtgccctgtgcgtggacggcttccagtgagacccggagtgcagcaggaggcatcctgctaggagtttgggatgatgggagttaagcccttcacccgcccatctcggttcaacctcttccagttgagacagcaatggatgacagtgaagaacttggcagagcctaaaccataggggatcttgtatcttctcttgagtatggatttgggggcagctggggagcccataacgagttttcagcaaggaaacttaaaatataaattgcattaaaagaatcatgcttctttctttcctctgagcatccctctctctgtccctctgttactcatttactccacctttcaggcaccttattaactcatttatttattcctccccctaacgttcttctccatgatgggtcttatttgtggggtgagtgtaattcactagacagatctagtctctatccatgagatatggcctccccacactcaatgtggacccaagctttctgaagcagagatgggactctggtcttggcccatcttatactacccctcaactctgtcctctcccgcaacctccacacccccaccaggttggtttggaaaagtcttggactagcgaaagaactctgtctctgggaacattgcaggtagcctgaaggccaaatgattgaaggacccatctgtatctttttacgttttgttttagggtctcactctgttgcccagactagagtgcagtggtgccatcatagctcactgcagccttcaactcctgggctcaagagatcgtccagccttggcctgccaaagtgctagtgagccattgcacctggccccatctatgtcttttacaggaataaaattcaggaacacttctaacacagtcaagggtagaaactcccaaatcctatcggaaaggataaagtgggcctcaaattttccgtttaaatgttagaatcagtccctggagttgccctatgacactaatgaggatggaaagagagtgatatattcaaagggtatgacctccccaatagcagggaattttgcagaacttaacgttaaaacacccctgacacttcttcatttgtttgcttaattatttgaatgcctgctctgctaagatttgttccagtgactaggaaattgggatttacaaaaatagaactcactgccgccttcccaagtgctggcattctagggagggaagcaggaaataaaaaaggaaacaagacaatacgcagttctgattatgatactactggtgttatgaatgccaccaacagcactgattcagaggatgtgcagtagttttaaggtaaggtaagatgtctctgaggaagtatcattttcactgaaggagagggaagagtgttctaagcaaagggaacatcaagtgcaaaggcccagagacatgaaaaaccttttcatgtctgaggtgcagataagaggccactgtagttgaggtgtgttgtgggagaggaatatcgggaaaagctcaaactggaaaggccaaccaaggtcggggcaaggtgaagaagtttgaattttattccaagtgaaggacaaagccattcaaggggccttgggagacacagaacactcagttcactttctttcccttttttctttctttttttgagatggggtctcgctctatcacccaggcagtggtgtgatctcggctcagtgcaacctccgcctcccaggctcaagggatcctcccgcctcagcctcccaagcagctgggactacaggaatgagcaactgcacccagtctcagctcacttttcttaccacaagctacttgagaaatgaaagaaaaaaatcgcctcaccttgagaaagttgcttgagattccaggtgcccgcctgacaggcaggttccacggaggcatgaggctgaaaaccgtgtgcagttacagtttctctttttgttgcatttgtttggagcacaccctccccttactttcagaggcctcattccctactttctcatcaaaggcttctctcatacgccccaggccaggtcagaacttctgtgtggtgcggcagcactcccggagcttcaccatacctcgctatgtttatttgcgtgggttttctgggaatgttggtctccatgagggaggttgtgggtctttccctgtgatcctcagagccctgcacaggacctggcccatggtagttgctcattataagagtttaggagacatgaataaaatattggactctccctgggggaaagtggctgtagttgaccttgctactgtgagatttcaaatgtaaataaaatatttgcctattttggcatgcactgaagtattaggaacatgtttctacagcacttaggatgggacacggtggtacaggatgctgtccactagcctgatccaggcatgcctagcatgtgaaccgtaattccattttcttattctaagttgcacatacatgcagaaaagttcatgagtgattagtgtaacaccagcgattttaagcccccatgtagccagcacccagatccagaaacagaatatttccagcatcccacaagcttctttccatctctgcctatgcaatggtaccaacttgcctgactatgtcatcgcagatcagtaatgccagcttttgaacttcatatacatggattataaagacttttttctcttttatttttaattgacatggaataattgtacatattatatttatagaatacagaggtttttttttttttttttgagacagggtctcactctgtcacccatgctggagtgcagtggcaccatctcagctcactgcagctttgacctcctgggctcaagcaagcctcccgcctcagcccctgagtctataggcatggtgacaaaggagactaaagaagcataacaatgaaaggcatgaaatctgattggatgatggattttaaaacagctataaaggacatgcttttggacaactggggaaatttaaatagtactgtgaattagatgctaacttttaagagatggcagagtagaacctaacagtcttgtggagctgaatgtacaaaaatggtaggttggtgcctgccaagtgcgagagggaatattaggcttttatttattattattactttgaatttttgttttaaaacaattcttcatcttttctgttgtattcttctcagactgctttcaggagctaccagaaaataacacgcaaagtttgagactctggaagattttgctttaactaagtcacactgatgtattaaatttatcattttagcattccctgtagatcttgtcattccttacaaatgacaccctttgtcctggagaagaatactaagttagagctggtgggtttctagtttaggagagtagctcgaaaatataatctttaacaagttgaaaaataaaatatgaaataagagggtgctttctctttttgtgctcacctgtattaagcaatttcctttcacagatagctccctcaaagggaaatccttttaatttaattttctttttggatgatgattattcaaagtctatgtatttatttattcaattaattaaatttgtttttttgaggtggagtttcaccctttcacccaggctggagtgcagtggcgtgatcttggctcactgcaacctccacctcctgggttcaagagattttcctgccttagccccccaggtagctgggactacaggtgtctgccaagacgcccagctagttttttgtgtttttagtagagactgggtttcgccatgttggccaggctggtagcaaactcctgacctcaggtgatccacccacctcagcctcccaaagtgctgtgattacaggtgtgagccactgtgcccggcctatttatttatgtttaaatatttgtttcaataggtttttggggagcaggtggtttttcgttacaa

SEQ ID NO: 1560602 - DNA, 4001 bp, Homo sapiens
ggtgcaggaggttggagatgaaagggcagactctgtggactctcctctttaaccctaccgcattcagggccccatattcctgaagatatggcggacccataagttagagcaagggttcaggagccaggatgcctggattccagtcctcattctgccttttactagcagtgcagtcttagatttgctacttgaactctccctcattttccctaggacaacgaggattatcaggaatttctactttgtaggatgttctccgtaatagggagttaatacatgtaaaagtgttaccctaatccctgtcatgcgtagggcctcttagggtgacctaacaggacaggagagtcctcttgaaagactgacctgccttcattttcaactctgaaaattaaaacaagacttgtaaatgtaagaatttaaacattcactccagtgagaaacaacacttgttgaaagggagagggaaatgatgaaagaacaggaaacccctgtgtgtgggatgcacatgcatcactatcatcaagggccatggacatccttccaagaaggggcacacactactgagagcacagccccagtacttgcacaaatgaagcttgtgggtcagggacataactggagggaatgattgatttctatgatgactacaagtagatgagatgatttttctgtacttttgagataggttcttgctctgtcacccaggctgacatgcagggatgcaatcatggttcactgaaacctcagactcctgggctgcagtgaatctcacacatctgctccctcttgaatagctgggaagaaaggtacctgcctctctgccagtcaaatatttaaagttttttaaagaaagggtctcactctgatacccagactggtctcaaacttctggcctcgttatcctctcatctttgcctccaaaattggtgggattatagccataagccagtgaacccagctgcttggttgattaatatccactgtaagctccttctgaactgagacttaacttgttctttcatgggtgtagaacaagtttagtctcagttcagacagagcttacagtggatattttgtgtgattcagtctctgaaatcacggcctctaatgtccttccctaacaaaccagtatctgcacaccctcctgtcacacagtgggaagaactggatgggctagggacaggcaagctgagcctgggaggcaagagacagtggtcactctgtgcagaccccacctgaggaaccatcacccccatagtctgcattcctcttccccactcttactgggaagagacatctactgatcatacattctgctctcacaagtgatctgaaataagtccttggtaactcacaatccccaagatccccaccagttaagccacatgggattcacatcagaggtgctgctgtgtggggagaaacattcacatgtgaagaaagccacatgcatgatcccacttcaacatacagtcacatcccagcacacacactcacagtcacacagagccacaccactcactgcgtcacacacacctgctcactgtgcacataacgatgctcatgcactggtctggctgtgctcacacacatactcacatcatagacaggaaacaaagccgactcacccctttactctccattcacacacctgctcgtcctggtgggtaatccacctcccacttaaagtcacattatctccgcagagtttatgctcatcagacaccacctcacactcaccgaaggttacactggtccagggtccacaccgcaatccccacaagcatctcagataccatagcctcagggtttctattccacacctcaatagctctaagtaaagcattcacagcaaaaatgctcatattttcatctcataaaatctcccatttctttcttggtttgtgtgacacgaaatttttgaaggctgtgccttttcaactcacgggtaaagaagacattgttctctccttcttggcgaccttcagaattgagtccagtcttctgagtgaatctctgagttgcagcatttaaatgacccacttcagccttgccctcgggcttcattccagattccaagctcctcccagcaagatttccttgcagctttagacaggtttagttgttaggaagaaactcagtcacaaccatagctatttgcaggtctgtatctgtaatgcagcagaagtgacagtgggggagttaccaggctgtggattgggttaccagggaaatgcatagataaagatgatggagtgagcggtagtggttgtaaagcccagcctttatgcctctcaagccttttctcatctatgcagaatatacccagaaagtgtacattttcccaatttgtacaacggctgaaaagaaaaaagttggagattttggggaaatacattagccctagaaggtaatgattctctctgcttttgaacgttctgggagagcactgaccttgatcctcaggaggatctgtggagagaagcagagaaatttcttgcatgaacctattccacactaggctgcttggctctgccaggtaagggccactctcacctgactgtcacacacctgggctctagctacaccctctcctttctcttggtgtccatgtaaataaaagtttcagagacactgtttctcctgcagattctgggaggaaggtgagattgttgtttttatttgatttttctttcattttattttaggttcggggtacatatgcagataaagtcgtgtcatgggatttgtggtgtatatgatttcttcacctggttactaagtgtagtactcaaaagttattttttttctcctcttccacctttcatcctccaccctcaaggaggccccagtgtgtgttgtttccctcttgatgtccatgagcctcctcatttagttcacgctgataagtgagaacatgcagtatttggttttctgttcctgcattagtttgctaagaataatggcctccagttccatccatgttcctgcaaaagacataatatcattcttttttaggactgcatagtatttcattgtgtacatgtaccacattttctgtaaccgatctgtcattgattggcatttgggttcattctgtgtcttcgctattgtgcatagtgttgcaatgaacattcatgtgcatatgtctttatggcagaatgatttcttttcttctgggtatacacccagtgatgggattgctgggttgaatggtagatctattgttagctctttgaggaatcaccacactgctttccacaatgggtgaactaatttacactgtcaccaacaatgtgtgagttctcccttttctccacaaccttgaagcatctgtccttttttgactttttaataacagccattctgactggtgtgagatggtatctcactgtggttttgatttgcatttctctaatgttcagtgatattgagcttttttatatgttttttggccacctgtatccttacttttgaaaagtgtctgttcgtgtcctttgctcaacttttttgttgttgttttaaaacaggtctcactctgacattcaggctggagtgatgtggcaccatcttggctcactgtaacctctggctccggggctcaggtgatttttctaagctcagtctcctgagtagctgggactacaggtgcatgtctccatgctaggctattttttttttctatttttagtagagatgggtttttgccatgttacccagcctgttctcaaattcctgggctcaagtgatccaccagccttggttgcccaaagcgctgggattacaggcatgagccactgtgtcaagctctttacccacttttttatgggtttgtttgtttctttctcgtgaagttgttgaaatttcttataaatgctcggatattagaccttcttcagatacatagtttgagaacattttctcccattccttaggctgtctgtttactctcttgatagtttccttcactgtacagaagctctttagtttaattagattct

SEQ ID NO: 1560603 - DNA, 4001 bp, Homo sapiens
caaggaggactatcaggaattcctactttgtagggtgttctcagtaatagaggagttaatataggtaaaacttttaccctaatccctggcatgtatagggtcaattaggggtgacctaacagaacaggggagtcctcctgaaacactgacctgccttattttcaactcagaaaatgaaaacaagacttgagggtgaaagaatttaaaaattcactccagtgagaaacaacacttgttgaaagagaaagggaaatgacgaaagaacaggaaacccctgtgtgtgggatgtacacgcaccacaatcatcaagggcaatggacgtccttcccagaagcggcacacattactgacagcacagccccagtacttgcacaaatgaagcctgtgggtcagggacataactggagggaatgattgatttctacgacgactgcaagtggttgatgatttttctgtatttttgagatagggtcttgctctgtcacccaggctgatatgcagtggtgcaatcacagctcactgaaacatcgaactcctggactgcagtgatcctcacacatctgccccctcttgtgtagctggggtgaaaggtgtctgccactctgccagtcagatatttaaagatttttaaagaaagcatatcactatgatgcctagaccggtctcaaatttctggcctcaagttaccctcccatctttgcctcccaaattggtgggattatagtcatgaaccagtgaacccagctgctttgttgagtaatgtccacagtaagcactgtctgaattcagacagcttgttctttcatgagtggaggaacaagtttagtctcagttcagacagagcttacagtggatattttgtttgattccgtctctttaaccacggcctctaatattcttccctggcaaatcagtatcttcacactcgcctgttccacaatgggaagaacaggctgggctagcgacagggaagctgagcctgggaggcaaaagccagtgatcactctgtgcagtccccacctgaggaaccatctctcccataatctgcgttccttttcctcactcttactgggaagagatatctactgatgatatatttcgctctcataagtgatctgaaacgagtccttggtaactcacaatccccaagatccccaccagttaagccacttgggatccacattgccacacatgaaaagacacacaggtgcttcatcagaggtgctgctgtgtggggaggaaccttcacatgcacagaaggccacgtgcatgttttcccttcaatacccagtcacatcccagcacacacacccatagtcacacagagccatgccactcactgagttacacacacctgctcactgtgcacataaagatgaccatgcactggtctggctgtgcccacacacactcacatcacagacaggaagacaaagcacactcacccccttacactcactcacacacttgccggtcctggtgggtcatccacctcccacctaaagtcacttaatctcagcagagttcactctcatcagacaccaccacaccctcacagagggttacactggtccagggtccacagcctacacccacaatcatctcagataccacagcctcagggtttctcttctacacacccacaactctcggtaatgcattcacagtaggaatgctcatattttcaactcagaaaacctcccctgtttctttcttggtttatgtgacttgagattattgaaggctgtgacttttcaactcacgggtagtgatgacattgttctctccttctgggcagctcttcggaattgtgtccagtcttctgtgtgaatctctgagtgggatcatttaaatgctgcaactcagagatgccctttggcttcatgccagattccaagcccctcccagcaagctttccgtgcagcaggagaaagactcaggtgtcagaaagaaactctgtcacaaccatagatgtttgcaggtctgtgtctgtaatgcagcagaaatgacagtgggggaggtaccaggctgtggattgggttaccagggaaatgcatagataaggatgatggagtgaggggtagggattgtaaagcccagcctttgtgcctctcaagctttttctccagtatgcagaatctagccagaaggtgtacatttcctcaatttgtacaatgactaaaaataaaaaattgggaattttggaaaaagacgttagacctagaaggtaattcttctctttgcctttaaaggttctgggagggcctttaagggtcagatccttttgaccttgatcctcaggaggatctgggaagagaagtagagatagttcttgcatgaacctgcctcacactaggccccttggatctgccaggtgagggtcactctcatctgtctgtcacatacctgggctctagctgcattctctgctttgtcttggagtccatgtaaaacaaagtttcagagatattgtttctcctgcagattctgggagaaagatgagattttttttcttttttctttttttttacttttattataggttcaggggtacatatgcagataaagtcatgtcatgaggtttgtggtacatatgatttcttcacctgggtactaagcgtagtacccaatagttattttctctgctcctatctcacctttcaccctccaacctcaagtaggcttctgtgtgtgttgttcccctattggtgtccatgagtctcatcatttagttcacaattataagtgagaacatgcagtatttggttttctgttcctgcattagtttgctaaaaataatggcctccagctccatccatgttcctgcaaaagacatgaactcattcttttttagggcttcatagtattccattgtgtatatgtatcacattatctgtatccaatctgtccttgatggcatttgggttcattctgtgtctttgctattgtgcacagtgttgcaatgaacattcatatgcatatgtctttaaggcagaataatttctattcttctgtgtatacagtagtgtatacaccattcccagtaatgggattgcggggtttaatggtagttctgttataagctctttgaggaatcaccacactgctttccacaatgggtgagctaatttacaccaccgccaataatctgtaagtgctcctttttctccacacccttgccagcatctgtccttttttgactttttaagaagagccattctgactggtgtgagatggtatctcattgtagttttgatttgcatttctctaatgttcagtgatattgagcttttattatatacttgttggccacctgtatgtgtacttttgagaagcgtcccctgtctctactaaaaatacaaaatattagccgggccggtggcgggcgcctatagtcccagctactcaggaggctgaggcaggagaatggcatgaatgcgggagggagagcttgcagtgagccaagatcatgccactgcattccagcctgggggacagagtgagacttcatctcaaaaaaaaaagaaaagaaaagaaaagaaaagtatctgttctctgttcttgtcttttctcgccttttgttgttgttttaagacaggtctcactctgacattcaggctggagtggtgtggctccatcttggctcactgcaacctctggctcctgggctcaggtgatcctcccagctcagtatcctgagtagctggtactgcataccagctgtgcagacctcacctaagggaccagtacccccgtagtctgtattcctcttccccacacttattggaaagagacacctacagatcatacattctgcctttaaattgttctttttgcctttaaagattctgggacagcactgcccttgatcctcaggatgatccgggggggaggtagagaacgtccttgcatgaacctgccccatgctaagccctttggctctaccaggtgagggctgctctcatctgtctgtcccacacctggactctagcaatactctc

SEQ ID NO: 1560604 - DNA, 4001 bp, Homo sapiens
tttgtatggcacctgccagggtattgagaataagtgagaggtgcagggtcaggtgcagtctcccttcctgtaacatattcccatggtgcaggaggttagagatcacagggcaggctctgtggactctccccattcactctaccacagtcagggccccacattcctgaaggtatggtggacccataggtaagagcaagggttcaggagccaagaagcctggattccagtcctcattctgcctcttactagcagtgcaatcttagatcggttacttgacttcctcagtttccctaaaacaaggaggattatcatgaattcctactgtgtaggaagttctccataatagagcagttaatacatgtaaaacttttaccctaatccctggcatgtgtagggcctgttaggggtgacctaacagaacaggggagtcctcctgaaacactgatctgccttattttcaactctcacaatcatcaagggcaatggacgtccttccaagaagtggcacacattactgacagcacagccccagtacttgcacaagtgaagcctgtgggtcagggacataactggagggaatgattgatttctacaatgactacaagtggttgatgatttttctgtatttttgagatagggtcttgctctgttgcccaggctgacatgcagtggtgcgatcatagctcattgaaacgttgaactcctgggctgcagtgatcctcacacatctgccccctcttgtgtagctggggcaaaaggtgcctgccactctggcagtctgatatttaaagttttttaaagaaagggtctcactatgatacccagactggcctcaaacttctggcctcaagttatcctctcatctttgtctctcagattggtgggattatagccgtgagccagtgaacccagctgctttgttgattaatatccactgtaagctctgtctgaactgagactagacttgttccttcatgggtggaggaacaagtttagactcagttgagacatagcttacagtggatattttacgtgattcagtctctgaaaccatggcctctaatatccttctctagcaaacctcctgtcccacaatgaaaaggacaggataggctggggacagggaagctgagcctgggaggcaagagacagtggtcactctgtgcagaccccacctgaggatccatcacccccatagtctccattcctcttccccactcttactgggaagagacatctactgatcatacattctgctctcataagtgatctgaaacaagtccttggtaactcacaatctccaagatccctaccagttaagccacctgggatccacattgccacacatgaaaagacacacagttccttcatcagaagtgctgttgtgtggggaggaaccttcacatgcacagaaggccacatgcgtgttttcccttcaatactcagtcacatcccagcacacacacccacagtcacacagagccatgccactcactgagttacacacacctgctcactgcgcacataaagatgaccatgcactggtctggctgtgctaacacacactcacatcacaaagaggaagacaaagtacaatcaccccccttacactcacacaaacacctgcttgacctggtgtgccatccacctcccacctaaagtcacatcatctcatcagagttcactctcatcagataccacctcatgctcacagagggttacatttgtccaggatccacaacccacatgctacaagcatctcagatacccagcctcagtgtttctcttccacacacccacaactctcagtaaagcattcacagtaggaatgctcatattttcatctcataaaataccccacatctttcttggttttgtgtgacttgagattattgaaggctgtgccttttcaactcacagttagaaatgacattgtcctctccttctgggcgaccttcggaattgtgtccagtcttctgagtgaatctctgagttgcagcacttaaatgacccctttcagctttgccctctggcatcattccagattccatgctcctcccagcaagctttccttgcagcatgagaaagggtcaggtgtcacgaagaaactcagtcacaaccataactatttgcaagtctgtgtctgtaatgcagcagaaatgacattggggaaggtaccagactgtggattgggttaccagggaaatgcatagataaggatgatggagtgaggggtagtgattgtaaagcccagcctttgtgcctctcaagccttttctccactatgcagaatctacccagaaggtgtacattttcccaattttgtacaatggctaaacaagaaaaaaaaagttggagattttgggggaaacaagttagccctaaaaggtaattcttctctctgcctttaaatgttctgggagagcactgaccttgatcctgaggaggatctgcagagagaagtagagaaatttcttgcatgaacctgccccacactaagccacttggctttgctaggtaagggccactttcatctgactgtcacacacttgggctctagctacaccctctgttggtgtccatgtaaatcaaagtttgagggagactgtttcttctgcagattctgggagaaaggtgagatttaaaaaaaattattattatactttaagttccagggtacatgtgcacaatgtgcaggtttgttacacaggtatacatgtgccatgtttgtttgctgcacccattaactcgtcatttacattatttatcctgatgctatccatccccctgccccccaccccatgatagtcccccatgtgtgatgttccctgccatgtgtccaagtgctctcattgtacaattcccacctatgagtgagaacatgcggtatttggttttctgtgctagtgatagtttgttcagaatgatggtttccagcttcatccatctccctgcaaaggacatgaactcatccttttttatggctgcatagaattccatggtgtatatgtgccacattttcttaattcagtctatcattgaaggatttggtttggttccaagtctttgctattgtgaacagtgctgcaataaacatacgtgtgcatgtgtctttatagtagcatgatttataatcctttgggtatatacccagtaatgggatgctgggtcaaatgatatttctagttctagatcctggaggaatggccacactgtcttccataatggttgagctcgtttacactcccaccaacagtgtaaaagcgttcctatttctccatatcctccccagcatctgttgtttcctgactttttaatgatcgccattctaactggtgtgagatggtatctcaatgtagttttgatttgcatttctctaatgaccagtgatgataagcattttttcctgtgtttgttggctgcataaatgtcttcttttgagaagtgtctgttcatatcctttgcccactttttgatggggttgtttgtttttttcttgtaaatttgtttaagttctttgtagattctggatattagccctttgtcaaatgggtagattgcaaaaattttctcccatactgtaggttgcctattcactctgacggtagtttcttttgctgtgcagaagctctttagtttaattagatccatttgtcaattttggcttttgttgccattgcttttggtgttttagtcatgaagtccttgcctatgcctacatcctaaatgatattgcctaggttttcttctagggttttcatggttttaggtctaacatttaagtctttaatccatcttgaattaatttttgtataaggtgtaaggaaggggtccaatttcagctttctacatatggctagccagttttcccagcaccatttattaaatagggaatcctttcctcatttcttgtttttgtcaggtttatcaaagatcagatggttatagatgtgtggtgttatttctgagggctccattctgttccattggtctatatatct

SEQ ID NO: 1560605 - DNA, 4001 bp, Homo sapiens
attttggtcaggctggtcttgaactcccgatctcaggtgatctgcctgcctaggcctcctaaagtgctgggattacaggcctgagctaccgcgcccggcctggacttattttttatgtttcccctactaggacatcagctccacgagggcaggggtctctgtcctgttcactcctccatccctagtgccaggacacagaataggcactcagtgaagaagtaaacaataaataaataaacaacaggctgggcagagtggctcataccagtgcctgatcctcccagcactttaggaggccgaggctagaggatcgcttgagcacaggagttcaagaccagcctgggcaacataacaagactttgtctctacaaaacaaataataataataaataaaaattaaaaattaaattagttgggcatggtggcacatgtctgtagtcccatctgcttggaaagatgaggtaggaggatcactttagcccaggagttggaggccgaagtgagctataatattgtgccactgcactccagcttgggcaacagagcaagaccctatctctaaggaaaaaaaaagtcctatgaggccaatcattatcaacgtgttaaggccctttttaaaaagctaagactgggccaggcgcagtggctcacgcctgtaatcccagcactttgggaggccgagatgggaggatcacttgaggtcaggagttcgagaccagcctgaccaacatggtgaaaccccatctctactaaaaatacaaaaattagccagtgtgctggcacatgcctgtaatcccagctactcaagaggctgaggcaggagaatcgcttgaacctgggagacagaggttgcagtgagccaagatcatgccattgcactccagcctgggcgacaagagcaaaactccatctcaaaacaaaaaaaaaaacaaaaaaaacaaaaacagaaaagaaaagaaaatgaagcacagagaggtatagtcactttcactctttcaccaacacagagctggggagtggcagagctgggattttaactcggggacccggctctgagcctgtgatctgaattcctgccattgcacccatcagcttcagtctaatgtccaactcagggactgcctctcacggtgagccctccctgaaccttctggcccccacgtccccactcctgatctgccccagattcatctctggctattgggtggggcagaaaaagagtcccctctccaccagggtggggtaagggcagaaagcccccaacagccaggcccagagcacccagttggaagtcccctgccagcccggcctggcttggggagggtcttaccgcttcatgtgctcgctggccactccttggatgtaaacagacattcccacgttgagcccgcccgggatgggctggtagtaaggcagcgtctggagaagaggcctggtgaggggactcacaagccatctgcctgttgcagcctttacccctcccagaaaagccccccagtcccttaagcaggagagaggaaaccatgggggaggaccaggttgaagatgacgagggccaacagttagacgtggacacagacagcctgaggtcagggtaggagtaaatcgagggtcggggtcagctttgggtaaatcagaccacagagtcagatggggccccccaggatcagagtggggaaaattggtgtgagggcttatggacggagctgcgggcggagtggggcctgagctggcatctcaccgggttgtaggtgggctggtagcccggtgcggggacataggccatcgctcgaggctgcgctagtggctggtcctgtgagaagagctgcaggagtgggagatggtggcggatggcaggcggtggtggctcttatacccagggtaagggagtggctggcaggggagggtccacagggctcctcttctgggactctcaggctgtcggcttctcctagagcgcaccctagtctcccttcccttgccagcttccctggtgaccagccaggacccaaatcacctgggtcccctcccctacgccctcctgcaaagaggaagtgctcatgaacttcggccctgccagggccttatcagagcccataaaaccctgcccagacttctgttggcagagggagggtgagaccaggcagggcagggcaggctgcaggaatgacccaggacaggtgggcagcggaggaggagaacgcggaggaactgcaaattcctgcctctcccagcaactgtgaagggacctacgttgattgcgtgcccaccacacatctttaccacgtatgttgtattgtagggagagtggtttagattactagtgtgtggagccagaggttctaggttcaaatcctgcctttgccacttctcagctgtatgatcatgggtcagtgccttaccctcaatttgcccatgtgctcatctgtaaaatggggatatagtagtatcggctgggtgcagtggctcatgcctgtaatcccagcactttgactggccgaggtggatggatcacctgagggcaggagttcgagaccagcctggcaaaatcccagtctctactaaaaatacaaaaattagccaggcatggtggtgggtgcctataatcccatctacttggaggctgaggcaggagaatcacttgaacctgagtggaggagagtgcagtgagccaaggtcacgccactgcactccagcttggatgacagatggagactctgtttcaaaaaaaaaaaaaaaaaaaaaggaattcataagagaggaaacaagtattgaatagctatcaaaatattttaaaaatgaatttgtgatccagtaatgcctgtatgttattaatctgccaaataagttctagctgtgggtccaactgccactcagaaaaataaataaataaagaaaagagtagtatcaaccttaggctgggtgtggtggcttgtgcctacaatcccagcaatttgggaagctgaagcaggaggactgcttgagcccaggagttcaagaccagcctgggcaacatagtgagacccccatctctacaaaaataaaataaaaattagctgggcatggtagcacacatctgtattcctagctactcagaggctgaggcaggaggatcgcttgaacccaggagttaaggttacagtgagctatgatcatgccactgcactccagcctgggtgacagactaagagtccgtctctaaaaatagcaacaataatagtcataataataataatcataatagtatcaacttcatagagtccttgatcattaagataataaatgctcagaacaggacatagcatatagaagtcattaacttaatgcttggtctcttgcagtcattccaaacataaatccggaagattgggatgatatatggataaaaaatcccaaagttttgtttgctcatttttgagacagagtcttgctctatcacccaggctgcagtgcagtggcaccatctcagctcactgcaacctccacctcccaggttcaagggattctcctgcctcagccttctgaatagctgggattacaggcttactccacgcctggctaatttttgtatttttagtagagaccaggttttgccatgttggccaggctggtctcaaactcctgacctcaagtgatccacctgcctcaacctcccaaagtgctggaattacaggcatgagccactgcacccggccagaaaccccaaagtccttttttgttttgttttttctttttttgagacagagtctcactctgtcacccaggctggactgcagcagcatgatctcagctcactgcaaactcacctcctgggttcaaggattctcctgcctcagcctcccgagtagctgggactagaggcacctgccaccacacctagctaatttttgtatttttagtagagactgggtttcaacatgttgactaggctggttgcaaactcctgagctcaggcaatccacctgcgtcagcctccaaaagtgctgggattacaggtgtga

SEQ ID NO: 1560606 - DNA, 4001 bp, Homo sapiens
atgaactgggagtagggtctgggatggcgagtctgggccacgccttcccgctaggacgcccaccccttggacacttggctggtgctcgcctcgtcctgaccctgctgtctctctgtccctcggacccaagtgggagttgtttaggcgagagagagggtcgaaggacacccttctccgccttggccacgacttccctacccccctcaccccgccccgaacctccctgccttccaccaatagcctggctttgcccaaccctctgctccagggacctaagtcttggcgtccacgcccctgtcgcagagacgcaccttgaagccgtcgtctgacgcgatgatgagcacctcgaagggctgcccgcgctggaaaggaacgcccggcccgcgctcctcgcggccccaggagccttgctccttgctgttgaagaccacctccgacgtgtccagccgggggttgaaatgcagcgcggcatcggagccctgctcctccccgcacagcaggtttacatggaacctggaagaggaggatggtggccgtcagggctcagaaaccacccagaccaagaaatgttgagggtgaggaataccgatgtctacaatttactttgaatgaataagtaaatgaaatgttggctgggtgcagtggctcaccctgtaatcccagcactctgggaggtggagaagggaggatcgcttgggcccggaagttaaagaccagcctgggcaacatagcgagaccccaccttacaaaaaaacgaaagaacaaacaaaacataaaccgcccagaccaaagtgaaggtcttatggactggcactccccattcccagagtacccccaaattaacagggacctgaagacaggcacacaccgcagaaggagaggtaggcgactaatgaccagggagcttagattcccaaggcagccaaaatatcatgaggcccttggcagaaacctacccagaccaaactcactacgcttagggcagggtgccctcatttccaaagagcctgggagctgcccaggaggtctgggtgatagccagggtgctcctgatgctcagggaaccctcagcttctacaggacaaagaataataccaggaaccccagtatttccagggtacctcagaatccagaaggcccgaagttccttagccaggaagtcaaaggatggcttggcaaggactcccagggtccagggtgtctccaggacttggagtatttccagagttccctgggactcagacatggaagtcataggactatatctaggaaccctgagattacccagggacctcaaatgcttagggaaacttagggaccccagccacaaaggcacgggggcaaatacgaatacatcagatttgaggtcagaaatggcctcggactcctagcctggtggatacaggtggcctcgggcccctacttctggactgcaaaaattgggagtcagctgatcctgagacctgtaccctttacccctagggcctggggcctcacctgctggcattgggaggaaccaagccgcgaattctcagcaccgtgccagggcggatgccctcgggcagtgaggacttgtgggggacgttctgcaagagtggggtgcaggggccactgtgagccggtgagaccgaaggagggaggcagaaggtgggtcacccctcagaggagccgaccagggctgagactggcagaaatcagtggaagaggaaagggtggcggagaggcaggaaagagaccagaaacagacagggaaacagatggggagagcaacaaagacaaacagaaagatcctcaaagagggccccagaggaagccacaaagaggtagaggggacagtcgggatgggggttacccggaggccacagcccaggccagtccgtggcacactcactgcccacttgctcctttgaaagaggagcccccagccccctccctgcttggccccgccccgggcccctggagcactcacggacatggctgggaccgggttgggcagccgtggtggtggggcctgctggggaccttaaataaaagcagggcggggctggccctgatgactcaccccaccccttcccacccaccacccacacctggcacggaccctggccctggggcaagcccggcgaagcgggagtggcacctcttcttgggggccctgatccccccatcacccagggcccgggtgcactgcccctctcctaggagctgataataagagggaatgtttaatagtaataaactcacagcagagaaggctccttgtgccactgcccctccacccctgtcttcccgctgcctggcacacggagagcctctatctcatttcatgtatttatttgttagtaatttctcttattttatacacagacatattaggtcctgggaggccaatctgggtgggaactccagacccttctctccagctgagaacctcctgcctggactgatccgtgctgaaatctaagcttctgcctctgtaatggaacagcggccacaataggagcactagtgactgacagggtggcttcatgggttcacagggggcctgcctgatcccctcagcgctgcacccctgggtcctggagtgtgcccagttcatggaagtcctcagtcaggaggggtgaaaggaggggatccactaggactatgcctgtcatttccaaggcccctcggctgcccaggagatgcaggaaatcactgattgggaccccatcattccaacagggaggagtatgggtcacccccattgtacagaggaggaggctgaagctgggatgggaagcgatttgccaaaggcaggagcgtgcaggacccgttgccctgacctctggctctcctcacctctgctcgcacctctcctgtgggttctgtctctggggctggctgtctcactctgtccgtctctgcccctaactctgtctaccacatattcctgtcccacttctctccttcaagtctctcttcttcctccttccaggactgctaccatcatgccaccaagtttgtaggtcaggatgaggtgggttttggggtggtgggtggcctagcattccatcaccacctagatcaaaagcagagcaaggcggggaccctcccgccaggcccgaaacagcccccttgggcctaagactctgcaagagaactcagggttggggaattggcttggtggaggggcgggtagggctgaaagatgcttctgaaaggcagggatggtgtgggagctgagcagaaaccactcctagcagcccagcagccctcctggaccttttccactcgccactccagctcctgccccacccagcaggctgctgagaggcctgggcagaggcaggctggcagtggaaagtttgggtggagacagcagacccagaaccatcctccaccctctgcgtcccaggcccccagcctctcgccccctccccacacactccaaggcaccaagctcagggaccagttcttgggaacatgagctcagagagggaggctagcagctgcatttcagtaggggctgcaagcacccccattctgcagaggacaaaactgaggcttagacaggggccacctctcagtcaaggaagaggccagcccctcagctccagaggggtctttgtgccaaggacatgtcatgggcacggacagagaggatagcagggtgtccggtgatcataccaccagcccagctcagttagttcccgagaatgttcccctgaatggtggactccattgttctaacattattgaccattctaaagaagacactctcgcctgggcaacacagcaagacctcatcactacaaaaaataaaaataaaataaaatagcccagtgggttggcgcacatctgcctgtaattccagctacttgggaggctgaggcaggagaattgcttgagcccaggagatcagaggctgcagggagctatgatcacaccacagctctccagcctgggcaacacagtgagacctcagtccacaaaaagaaaagacactccttacattactt

SEQ ID NO: 1560607 - DNA, 4001 bp, Homo sapiens
caggaaggaatgaactgggagtagggtctgggatggcgagtctgggccacgccttcccgctaggacgcccaccccttggacacttggctggtgctcgcctcgtcctgaccctgctgtctctctgtccctcggacccaagtgggagttgtttaggcgagagagagggtcgaaggacacccttctccgccttggccacgacttccctacccccctcaccccgccccgaacctccctgccttccaccaatagcctggctttgcccaaccctctgctccagggacctaagtcttggcgtccacgcccctgtcgcagagacgcaccttgaagccgtcgtctgacgcgatgatgagcacctcgaagggctgcccgcgctggaaaggaacgcccggcccgcgctcctcgcggccccaggagccttgctccttgctgttgaagaccacctccgacgtgtccagccgggggttgaaatgcagggcggcatcggagccctgctcctccccgcacagcaggtttacatggaacctggaagagggggatggtggccgtcagggctcagaaaccacccagaccaagaaatgttgagggtgaggaataccgatgtctacaatttactttgaatgaataagtaaatgaaatgttggctgggtgcagtggctcaccctgtaatcccagcactctgggaggtggagaagggaggatcgcttgggcccggaagttaaagaccagcctgggcaacatagcgagaccccaccttacaaaaaaacgaaagaacaaacaaaacataaaccgcccagaccaaagtgaaggtcttatgggctggcactccccattcccagagtacccccaaattaacagggacctgaagacaggcacacaccgcagaaggagaggtgggcgactaatgaccagggagcttagattcccaaggcagccaaaatatcatgaggcccttggcagaaacctacccagaccaaactcactacgcttagggcagggtgccctcatttccaaagagcctgggagctgcccaggaggtctgggtgatagccagggtgctcctgatgctcagggaaccctcagcttctacaggacaaagaataataccaggaaccccagtatttccagggtacctcagaatccagaaggcccgaagttccttagccaggaagtcaaaggatggcttggcaaggactcccagggtccagggtgtctccaggacttggagtatttccagagttccctgggactcagacatggaagtcataggactatatctaggaaccctgagattacccagggacctcaaatgcttagggaaacttagggaccccagccacaaaggcacgggggcaaatacgaatacatcagatttgaggtcagaaatggcctcggactcctagcctggtggatacaggtggcctcgggcccctacttctggactgcaaaaattgggagtcagctgatcctgagacctgtaccctttacccctagggcctggggcctcacctgctggcattgggaggaaccaagccgcgaattctcagcaccgtgccagggcggatgccctcgggcagtgaggacttgtgggggacgttctgcaagagtggggtgcaggggccactgtgagccggtgagaccgaaggagggaggcagaaggtgggtcacccctcagaggagccgaccagggctgagactggcagaaatcagtggaagaggaaagggtggcggagaggcaggaaagagaccagaaacagacagggaaacagatggggagagcaacaaagacaaacagaaagatcctcaaagagggccccagaggaagccacaaagaggtagaggggacagtcgggatgggggttacccggaggccacagcccaggccagtccgtggcacactcactgcccacttgctcctttgaaagaggagcccccagccccctccctgcttggccccgccccgggcccctggagcactcacggacatggctgggaccgggttgggcagccgtggtggtggggcctgctggggaccttaaataaaagcagggcggggctggccctgatgactcaccccaccccttcccacccaccacccacacctggcacggaccctggccctggggcaagcctggcgaagtgggagtggcgcctcttcttgggggccctgatccccccatcacccagagcccgggtgcactgcccctctcctaggagctgataataagagccaccgcccctccacccctgtcttcccactgcctggcacacaggagagtctctcatgctcattttatccacagacatgttgggtcctgagaagccaagcccagcgggaactctagacccttctctccagctgagaacctcctgcctagactggaaatgtctgcgctgaaatccctgcttctaagtctccagtggaacagcagccacaacaacgacgatagtgccagacagggggacttcacagggtcggagggcggcctggttggctcagtgctgcacccctgggtcctggagtgtgccgggttcatgggaagtcctcagtcaggaggggtgaaaggaggggatccactaggactacgcttgtcatttcccaggcccttgggctgcccaggatatgcaggaaatcactgattgggaccccaccattccaacagagagaagcatgggtcacccccattgtacagagaaggaggctgaggctgggatgggaagtgattttccacaagccgggcaggacccattgccccaacctctgcctttcctcacctctgggcgtgcctctcctgtgggttctgtctctggggctggctgtctggctctgtttgtctctgtctataactgtctaccgcgtattcctgtcccacttctctccttcaagtctctcttgttcctccttccaggactgttaccatcttcccaccaattttgcaggtcaggatgaggtgggttttagggtggtgggtggcctagcattccatcaccacctagatcaaaagcagagcaaggtggggaccctcccgccagccccaatatagcccgcttgggcccaagactctagaagagaatccagggttggggaagtagactgggggaggcgggggggggggggggggcgggcaggactgaaatctgtttctgaaaggcagggatggtgtgggagctgaacagaaaccactcctggctgggcatggtagctcacgcctgtaatcccagcactttgggaggccaaggtaggtggatcacttgaggtcaggagttcaagaccagcctggccaacatggtgaaaccccttctctatagaaaatacaaaaaattggccaggtgtggtggtggacacctgtaatcccagctacctgggaggctgaggcaggagaattgcttgagctggggaggcggacgttgtagtgagccgagatcacaccactgcactgcagcctgggcgacagagctagactctgtctcaaaaaataaaaataaagcctgtaatcccagcactttgggaggccgacgcgggtggatcacgaggtcaggagatcgagaccatactggctaacacggtgaaaccccgtctctactaaaaatacaaaacaaaattagccgggcatggtggcgggcacctgtagtcccagctactcgggaggctgaggcaggagaatggcatgaacccgggaggcagagcttgcagtgagccgagatcgcgccactgcactccagcctgggcaacagagcaagactccatctcaaaaataaataaacaaacaaacaaataaataaataaaaataaaccactcctagcaatgcagcagccctcctggaccttttccactccccacccaactcctgcactcctgccccacccagcaggctgctgagaggcctgggcagaggcaggctggcagtggaaagtttgggtggagacaccagacccagaaccatcctccaccctctttgtcccaggcccccagcctcttgccccctccccacacactccaagg

SEQ ID NO: 1560608 - DNA, 4001 bp, Homo sapiens
gtcagcaccaccctcaacaccaccacagtatcaccaccactacctaattcagagttgtttcctggtcatttgaaacgtttcttgtctctgacttctgtacacccttcctgggtttctatgagtcagggagagccagaatcaggctctggttatccgggccctttgtagatcttgaagcagagaagtgaggtgataatcaacactgataaacatcattgacaccagccctgagaacttcatcagtatcacccaaagcatcatcaccattgggttcgccatttttatcaacaccatcccaccatgatgtccaaacacctgctcctcagggccacagctcccatctccccctactctgggagccacagaagggtccctccttgcccagacccacctgcctccatcccctggcctcactcacaggtactgcaggtgggacaggcccgcaaatgcatcgtcctcaatcacggagaaggagttggaggtgaagaggctggcaagggggcaagaaagaaatttttccagaattgcagcccccatctgacattttaaccctggcctccaccctcagcctaggtgggcatgggcacgcaggtgtgagtatgtgcatggacacaaatgcttttgtacagacgtgtgcatacacccccacacacgtgcatcaatgcccacctgacatctgtgtgagcatacactcccacacatgtgcataaacgcacactcccttgagctggttgtcggcccagccaggccccactcacagcaggtgcagagacggaattctcaggaagctgccggccttcagctgggtgactcccgtcctgacgagtgagctggggatgtgggcagtggtaggtgagagggacaccacagcaatactccagttgcaaaccagaaccttctgccatccgggagaccccagcgtgccaccctgaccctggatgtgtctcccctgcatgccagaggaggcaggcatttgccctcctggcttgacaaggaccctgacagcactcaaccctcctcctgggccccaaatgctgtccctgccctctggggtttccttctgctccttcccagatgccagcacccctcttcaaggcatcccgacaggctttgctgcccatctcctgagatcctgatgggcccctgtttccctggagacccggcaccacatcccaacctctggggtcccaggacttccgtccccaccttcgggcatgcagaaggctggacactcacagtgacagcagggtcggagagaagctgacgggcaggtccggggagccctcacacagggcgctgtctttagagcaggagcagcgcaggggacactttccctttgggggtctccaggccaccaccacccccgccccagccagcagcagcagcagaatgcctgcccctcccatgcccccacccccactctgaggcacccgcttctcccggcccacccagctcagcccaggccactacgtctcctcctccaccaggccgccctccatccgcctgctggcacgctcggccctggcttctctctcctcttctccgtctttctttcagtcggccttcctccctgttcgtatgtctttggtgtctaattttctgtttctctttctccctgtctttctgtctctgtatttttgactctgtgtgttagtctgtttctatttctgtctttgtctctctttctgcctgtttctttttttctgtgttgctgtcagtctttcaggctttaggtagctgtctatctgttggtctctatgtgtgtgagtgtatgtgagtgtgtgtgtgtcctgctgcctggtgtcttgatttcttgtctcctgccccccccacccccccttccagctccctgcctgtagtttctttgcctcctcccacctcccttctccccgaaggtttgggaaaggggttcgctggacacccggcacacccggcagagtaggatgggaaggaggagggggtcagaggccatgagaaggtcggccttgggggaagggactggacagccccacaggagggggaggggccaccaagggctggagccgccccaccactcccgccagccccctccccagattccccactcaaccctattgggggagcaggaggacgatgtcaccagggtggggaccagatggctctgcattctggagcagggtgggaggagaggccctgggggggctggggacatcccgtcctggccactctctgccagccccctcccctggctacaggagggtgtgttgggcgctgtcagtggggccagatcacgtccagctgctccctctggtggtcatactcggcaggacctctgcccggccccaagcccttagcctccctcccctaccctgaaattaaccctctagtggccaacacccactgggggacagcaccaacccgaggacatgatgatgatgaagatgatgatgatggtgaagatgatgatgatgatgccaccccttcttcagcgtctactctgagcctggccttgtcctaaaagctcatctattaactcattctgatcttgccaaagccctctgaagttagtgctgtcatcatcaccactttacagctggaggaagtggagacagaggtcagggaacctgaactctaggttacccagctgagggcacagccgggattcaaacccaggcatccggctccaggttattttgcattctttctttggagatcagagttcatggatagatggataattggttgttttaatctggactaaattttagtcatttggatagattctgtccactaaataagaaacataagtaaatgacacttgttagctaagatgaaatagtagtaatgtttatactcactcagccttcacagccaccctgtgagatgggcagtactgctatccctgctttacagatggggaaactgaggcacagggaagttatgtgattagtttcctggctctagtcagctctaaacctaacccctaggctgtaccacctcatcgcctggggacgagactcatcctgtgattgaggaatgcatgcagcctctcttgacactgacgcccacgcccagaagcctcgttggaggataagggggcttaacagcttggaggtcatgcagatctgggttccaggcccagtcctgtgtggcctcagttttcccatctgtcaaacggggacaatcgtggcacccgcttcccagttgtggagaggactcaggtgatggaggcaactcatccttttggggttcagcacaaggtgggcatcccacagtggtcggcaagcttgggggtgggctccggatccagctcctagaggagcagaccccagcagcttgtggtttgagccatgcccgtcagctctcagtttccttcactgactattgggtatgataaacagggtccctgaaagtgaagttggagagctgagtgccaggggcacagagggatctgaacccactctcatagggtgcccagcccagcagtccagttcacaaggaggaggatgacaaggacaataataataggccaggcacggtggctcatttctgtaatcccacattttggcaggctgaagtgggaggatcgcttggggccaggagttcaagacaagcctgggcaacatagagaaaccccgactgtacaaaaaattaaaaaattagccaggcatggtgtcgcacgcccatagtcccagctactcaggaagctgaggtgggagaatcacttgagcccatgaggttgaggctacagtgagctatgattgtgccattgcacttcagcctgggtgacagagcaagacccggtctcaaacaaacaaacaaaaaatgaagttaatcataagacaatgtcaagttcagagacctctgagccctgtccaggattatacacgtgatcttagtgatttttccattttggagcatgtgaaaatgaggcacagagctgctcaagttcacacaaccaggagtgcagtgcctgggccattccaggtttccctgtcaccaggacctgtaaacctggcctg

SEQ ID NO: 1560609 - DNA, 4001 bp, Homo sapiens
tcactgcgctacgccatccagctcatcacagctgccagcttggtgtgccggaaacgcaaggtcagccggccgaattagccagcagggccagatggcggcagtgagtgacacagtacttcaggggcttccagggttccgatttcatcctagaatgtacgttttcagacgcagggaattttcatccctcaggttggcttctgtatcatccagcctggcctatagtaggtatcagtaaatctctcttgacttaagtagatgctgttaggtccaccttacagataaagaaactgaggaatgaagaggctgggcccacaacaaggagatggccaggcaggatttgaacccaggcaatctggcccagaatgccctcccctcacatgccacactctgctgcctagagcatggaggtggcatacgctggggtctgtgccttgagcctcacggagaggggcccaactgaggactcgccctccccctccagggtacagaagtgcaggtggatgacatcaagcgggtctactcactcttcctggacgagtcccgctccacgcagtacatgaaggagtaccaggacgccttcctcttcaacgaactcagtaagaatccccaccccgcacctgcactgccagagccaacctcagagggaggaagagggagctcggcgtagaaggctcaggccctgccacctgggcgacactgaccatgtggccttccttctccccacagaaggcgagaccatggacacctcctgagttggatgtcatcccccgaccccaccctgttttccaccagagttctgacactgtgactctgtataaaatggttgggaagctgcacccaccctgtgtatgtgtggttgccctgagcccacagaaagacacctccagagtgcggattgagaagcctttattgtgggaggatcggggtgtcagggctccaggagtcgggatggacttggaaggctgcggggagggtctttagaggaagaggaggcctgagagttgggggtggtcacaggtcaaggggtggtctttgggacccccacagtcagaggtgctgcggcggcagggtccacagcgacagctgagagccacagggaaggagaccacggggtccacaccacgcgggcagccagggagccggatggactcgaagcgcacatcacggtaggtgcacaccacctgaggcaggggcggcaggaccgcctgcagcacgcgcatctggaggccgtgtgagtgggggaatgagcatgtgcctgaggccagcgcctcagctgagctcccaagctgaccccacaggtcctggactcaggagcccaggaagccctctgttcctgccttcccacaccccattccccaaccgcaggccagagaggcagaccacccttcctcccccgctgcctctgtgggtctggccctgaggtggcagcatctgcccctggccccaggcagctcaccatggtggggcagtagccggcacagatggtggtgttgacggtgatgcacactgggcagccctccttctcgacagccaggatggcattgatggggtggcaccatggccgaagcggctccctggatgcccatgccccgcccatgctcagcagcagcaacagcagcagcccctgggacaaggacactgcttcacccaggtctgagaccgcagccccgagtcctggccttcccatcccgcgtggtacaccacccacaaagacccagagacccttcccggcatctcctattcaggacccaccacccggacacctgcctttcagagcccaccccacagcccagaggacctgagatgccccaacatttcagatccccaccctcaggaactgccccacctgaagcttactgggggtcatgcccctccagaaagaggcctccttccacagctcacacgggtctgccccttctcatgccagtgatggcctggaaggaggtggaaggtgcccaggggccctgtagtcttacctggagcatctccatccttggtgcatcccctgcctcgtgtatctggctatatacctcggggttgtgggggcggcaaggccaccaggaggtgataggatgctggggtaacctggacactaatccccccgggggcgagaggtgcacatggccagggaggcgcaggagtggctcagcagagcgccccagccctctcccctcagtggtctagcgccagaggtgaggcagagaccacggtgaagtgacctcagagacccagttgtcgagtgctagggactagtcgagcctggaggcacagggagtagggtgtaggaaggcctgcctctgccaattgtggggtcttgggagccaggaggaggccatgacccgagaaaggtgctggactgaagcctcaaccctccacttgaggctttcctgcaccacagtccaacctaacaggaggggcgctgcttcggacttagcttctgcccagtgagagagggtctccccgtgactgtgctgccagggaagccacttgacccagatgcccccaaggagggattaagcccgagccccacctctcccttagggacctccgcccaccctaccctcaagccaggatgcccggagcgtccccggaagtgggtgtggttcaggtgatttaactcattatttaatacgcccgcagggtgcgtgtcttgcccccggggccacagcctgcaaggacattatctggacttagtcccctctccgtgatgccgcagctgagtgggtgtctgggctagtcccgcccccacgttgccaatagacgtaatgagtgcgactcaggctgggtccggaacccttcctagtgagcggaggtcccgagctccgctcggcagcgcggccctgggggcgggtctggggtggggctggccctgacggctcacaccagcgccggcttcaagctgccatagctggagttctcggtactgtaggctttcggcacgctgtagatgccccgcaggggcttccagtgcgggccgccccagggcgcctccagcgggcagaagcggtcgagccgccggagcgggtgcagcagggggctgtaggactcctgagccagagacagggctccccggtgcggcatggccgaggtcaccgggctgacgcgcggcacgcggacccgcggtggtcggggcggccgggaggagcgcggacagggcggccgctgcgggccgtggctccagacctggggcgtctcttcgaagctccagtaggtcagggagtccttgcgggggtatccggacagctccgtcctgtgggagcagggcgggatggtgaggatacagctggatccttggggacgagtttcagacctcgggatctaaggagtctgcacattcaaactcctgcatttccaggcgagcaccccttaggaaggacgcgacccggcacgcgttgcctgcgttcctgggtcctcgaggtacttaacgtcctggaaactgagctttcgcatcctagggaagtaaaaggggactttcgcttccttgggaaggagtatctgggggctcaagtaccgaaggaggccctgccctcagatccggaatcccctcgagccgctgtgcaggcttcctgtccctaccgcggttcctgagaggtgacactaaggactcctgggtgcttaaaaaaaaaagggaggggctgaggcctgaactttggttcttgctgctacagaagtcgaggctgagaccaccggctcagggaatgggagccagcccaggggctcggcgtgcaccggccacggcgggggctgtgcaggaggcggtgccgagcgagagcccggcttacttgggatagaaccgaaagtcccgcgccgaggtggtcagatagagctggcggcggtccaggacgccccggtcggatactgtgaaaggccggccagacagctcggggttcttcgtccaggcaattagagcctgagcaagattgggggaggaggcatacccaagacatagatttcataccccatcccaagccctgggtcccgagttcagaatccctctcctt

SEQ ID NO: 1560610 - DNA, 4001 bp, Homo sapiens
aactgtaatgagagaagactggaaactggtggaatgtctacccttagggaactggttccctcattactggaataccatatggtagaatattgttcagggttaaaattaaatgaatgatggataaaaggtataggagttttttggggggatgataaaaatatcctaaaatcgattatggtaataactgcacaactcagcgcatacactgaaaaccactgacttgtacactttaaatgggcactttaaatacactgaaatacactttaaatacactgaaaaccgctgacttgtacattttaaatgggcaaaattgtacactttaaatgggcaaactgtataattgtgaattatatctcaataaagcggttaccaaaatgaagagataatgacaggaaaaatatcaagtaaggatgaaacagtactcagtaataaaaagaaacgaagcactgatacaagcaacaacttgggtggacctccagggcattgtgcagagtagaaaaaaggtaacatcctaataatatatgattccatttacataacaatctccgaatgacaaaactagagatggtgaacacattagcggttgccaggggcctggggaggagttcttatgtggagagggaactgttctatatcacaattacgatgggggttacacaaatctatacaaggaatcaagctgcacgggcacacagatgcacaatcacactcacaccacacaaactggtgaaaactgaacaaggtctgtaatctagttaacagaactgtattgatgtcaatttcctggtttcgatattgggactacataagatgtcaccattaggggaagatggatatactcttttcacaacttccttgaatctataattatttcaaaataaaaagtaaaaacaagaggtaagctccatccctttatcaagcatacattaggccagacgtctccccattcagatgattctccatcttttacgagccctttacctagacctggaccttaccactgacctctccctgacaccacccatctccctccagtagggcccactccttccaggtgatgctgctgcccgcgatttaccttcttctagccccgccccctcagcacttccaggtggcccccgccccctcagcacttccggttcccagccagccccacccttggcacctcccccttccaggtggccccgcccacacgcaatcttttccccggccccgccccttagctcccttcagcccctccccctcccagatagccccgccccctcggggggccttccgatttccagctggccccgcccacacagttttcccccccccggccccgcccctcagttccatttggcctctcccctttccaggtgaactcgcacctcaaggcctcttctcagaggacctgtccaactgtctctgtctctcgtctaccctctacctggcccccctccctctgggagacacctctctgcactctccggcggcccgcagcccgcgctcttccgtctccaccgcgctctcggcagcctcagcgtccccacgcccactcctctgcagacaccccgacatggcgaagcataggccccaagcattcggcgcacccgccgccctccgcctcccatctgcttgcggacggccccacttgccttgcgttggtcccgcgcgccgctgcccgggcaacacactcagatccgccaggcgcgcctctgcagtcccaagttcgcgccacggcattcgcgcgcagacgtctgcgggcgggggcggggcagagcctaggggcgggacctgggcaccgtccgcaccgccgccgtcgcgcggaggacactgggagtcgtagtctcccgaatgggaggagggcgggaaaaggggtgaagtggggcgagccctcccgcagagcacactgggaaaatgcccgcgctttccctcgccctggatgagcgggtgtggctgagggtctgaggagtgactggcagggaaagaggaggaatcggtggaagcgcccccgcgaggcacggcgggaagagaggcgggagaccgcgcggggcatcccgggagcaagggccgggccaggcctgggcgcggggcattgtgggaggtggacgccgctccggggcgggtaggtgagtggggaggggcgggaagggtgcacatcttggggaggggagaggcacagctaggtgggacggcggggctggaaggtgccgcagcgggcggggagggggggagtaggagggtcgggagcgggctggatggggctgctcgaggggagacgcgcagctggacgtggggggagcatctggggtgaaggagcccatccgaggacgaggggccatgtctagaacgaagatgcatattgcgggggatggtggatgtaactgggaggaggggcccacagctggactgggggccgcatctgaggaggaggggaccacaggtgaatactggtgacacttccgaggagaactagccacaagtggggcacacacctgtaggcgaagcgtggataactgcatgtggggagtacatctggagatgagagtgtctcagggaagccccagctacagctgcatgtggcgagccatagggtcataatcgggggaaggggcaacagctgcacgccagaggcacatctggggagtgcggagccacaggtgcatgaagcatgtgaccgggtgaggggtccgtggcctggatgtgggagcacatctggagatggagcgtctttggaggggttacagccaactgttggcacatggaaggaggagttccagatgaatacgagagttagaagttactcttgggtgagagacacagctggaaggggaggaggttttagctggaatttgagaacacatttgaggagatgtccttaagggacatctgagcttaagggtcgtattttgggaggagagattccaactgtacctaagggtcacatctgcggaggaggagacgagttggaattaggaatcaagatgacaggctccaagtgaaccagggataaggcggtgggaggaggccaaagataggatggaggttgatatttatatatttggagaaaaacaggcacgtccgaccccgggctacccacctcgatagaggcaccagcaaccgacggggcaggccaagaatggagtagatgagataccccgggtgggaatgggtctgatatccacctgttctcccctcctccacgcaggcccccaggatggagcggccggagcccccacccggcacggctgcggggcaggaggagcaggagctgcgggagcgggccttcttctcgtgggccgagttcagccgcttcttcgacgcgtggtgccagcagcggctggcgctcttcttcgtcaagagctccatgcacctggcgcgctgccgctgggccagtgcgcccccgctctacacgctcatcgacgtgctcaagtacagctacgtgcggcttgtgtgcaaggacgtgcgtgcgcccagccggcccgccgtggggtgcgtgaacctgagccgctgtcctgctggggggaaggggagcaccgggggtgggtgtgggtgggagacgggcagagaacaccccacccagagatgcagagggggagaggccaactgaggcagccaaatacaccttgcagagaggcgggagtcaaggagggacatgtactgagagaagaagaggagctagagagacaaagatactcacggagcaagagatggtgtgggcccgacttacagacttttttttttttttcgagatggagtctcgctctgtcgcccaggcttgagtgcagtggtgccatctgcagcctccacctcctaggttcaagtgattctcccgcctcagcctcccgagtagctaggactacaggcacctgccatcatgcccggctaatttttgtgtggttttttgtttttgtttttgttttgttttgctttgtgttgtttttttgagacagagtcttgctctgtcactcaggctggagtgcaatggcacaatctcggctcactgcaacctccacctc

SEQ ID NO: 1560611 - DNA, 4001 bp, Homo sapiens
ctcccccggggcctcaccactgctgatcttcctgtgtctccggccccaggagccctgagccctctcgccccaacatcatcccacctggagctgccctgagacgtggctgctccccacctgcctggagactcagggagactcagggaactccaggcaatgctgtgaatttctcacctaggaccaggagctccaggagatcactgggtagagaccacacatggggagagttcgagtcataagcatagcacctgtacgaccacctgcgactcgggctcacggggcccacagagaagatggcccgggaccacccatgggtacggggctgtgagttcaggcattgtgggtgttcatcttctccttccttacacagaatgaagctgccaaatgccacctgtgagacacaatggagggtcacgttccctcctgaggtcaccacagggctgggtagagctgagagggtgggtttgatgtaggctcctaggagagaaggaggcaccatgttaaatggggctcacacctcccacttcatccccagggctgggctgtgagagggagatgcccctgagaactgactcccttcctgagggcagagcctggggctgggagccctcagtgtcagctcacctgtcaccaccagctccagggggtcactgggctctgaccagcctgcagtgtggctaccgtagaaacagcgataccgccctgtgtgttcccaggtgatggatgggatggggaactggcccttcttcacaatctcctgtgggatccgtgtaatccagggtgctgttttcttttctctatacagacggtactcctgggtctccaggatcccctgacaccagagggtcacgggactcccctgggtgatcacagagcctggctcagcccagagtgtgggcttggggagggtccctggaaggaaatcagagttcagattctaagtcatttcccacccaacatatctcagctctcagcccaggaccctccagatgcccccatcagtcagtccagaactgctattccccatccccagctgcacgggggtggccccttgtccccagtgaggaggagggacctgggagagctggggacagactcacctgcctgcacgtgggtccgggggcccagactcagccctggaagagagttccctgtgaggaatttgcccctgaagcctgggcaggtcctcccctccctgggatctttgtgagcccctggggtctccttagggactagaggtcggctgtggggtgaggtccctcctaggttagaagctcccctccctcttcaaatctcactgagacagatcaggactgtgacgatgggggtcatagcgtctcctcccactgccctgctctgcggatggatgagccctcggtgctggcaggacagagacacacagagagaaatagcctcccctccttcccacccagtgtggacactcggaggctgggtccttctcatggggtgttgtcatctgcagccacacaggaagcagaactaccctaccaggagcctgactctcattcttttagagctgaggtgggggcaggaaccaggccctctgcagacatttcagactgtaatggggtctttcctgacccccagccactgtctgtctggtttctcctcttctcactgagagacgggatgtagcagcaaatagaactggtgctttctgcgtctgcccttccagatgagggtaacggaggcttccctttccttctcacagcctcccacatggtcaccctccctccttcagccatccatcagctcagcgttgtggggtccttaccatggcagtcgtccctccagccctggagatgcttcagggaagaccaaggtccatgctgcaggcagactcagatcagcagagaagcatctcgcatctggctgtgtagctcaggttgagctgcgtgtggcagtgagcacagaggagaaatgcagggaaataggggaagaaaagttgacttctttcttgacactggattgtgggttttctttcaaccaaatagtcccctctcaacttcccctttttaaaatattttgctacagtgtccactcccacccgctgggaacaaacatctgagactttcctgcctcctcggtgccctttgcttacttggccatccctctgcacctcaatccctgttcaacgttttgagaacaatgacttatgtttgagctttgatttggggagtgggggagggagttgatatttatttgatgactggttatcatccgctgcctacatgaccttggtttgtaatgtcccatcactgagcctcagtttcctcctttgcagattgttgtcatgaatcccactggtcacagtggttgttgggtcagtggtgcctgggacattcggaggggctcatttgtgcttgatttccagaccagggtaagacctgaactgtttgggatgtgaaaggatctcgatgttggaccccccagtctgtgtagatgattgatgtgtccactctggatctcacatctgaccctaatggagaaatgtacatgaggcatttctgaaatacccagagcatcaatgtcatgagcagaaaaagaggtgaggaagttcccaagtgtaggtggatccacaagaaagaacagaggccagagggtcccaggaccttcaaggggtaattagaatggagttttccaccactgaatggaggtgggagaggaacctcgggatctgcaatgacagtgagggcctcagggctccagaccaaggtgggaggctgcgtcctccagctacacctgaggctggagtggaccccaagcagcccagaggaattccatcaaaggagtgcaccaaaccgtccagtgatagagctgctgggattccaaagaaagaagcactaaacaccagggtgttcatagagcatttgttagagggacttccatagagtgggccctgcagcatgtcctggaggtagacaaggtgacactgggtgttctatccaatgctttaacctaaaataacaaaacaaaacaaaaatctagagaaaattatctctaagtacagttgttctttggtgtacaagggaactggctccagtccgtggcccacatgtcacaaaacctgcctgtactccagccctgaagctggctccactgcaccatgtatagggaaagtctgccattcgtatacacaggatttgcatcccacaaatgccatagttatgatccccgtttggttgaagagagtgtgcatacaagagaccccaggaattcaaggctgcattgctccagggttgcctggattttgcttgtatttgacaatgagaagcaaagattacaatctggagtgcatggcatggcaagacacagtgcatccggagagggaagtgtgatgttgtgatacacactggttttcacccgcggttcctggcttataactccataccactggttacagtcttttgttagagtattggctgtgttaggccttaggggaggcctctgacctcctcctgcccttccttcacctgcccaaggcaagactcgaatgttccctgcctttctgatggtggctcttaagaccctcccagaagatggtctcaccctgttccttgtgggaggaaatgctgatgtcacgaagctccttaaaagcccaagaggactgggtttcatgggcttctggatggctgagcatgcggaggttcctggagcgtggcgcccagggagggcatagatgctccggtcccttcccccatgcctcctcctatgagtctcttcatctgtgtcctctgcagtgtgctttgtattcaaccagtaaacgtcagtgtctccctgagttctgtgagctgctacagcaaattaatcaaacccaaagaggtggtcatgggatccccaacttgaagccagtcagtcagaagttctggaggtctggacttgggaatggtgtgtgggggcaatcttggagaatgggccttcaatctgtgggatctgggactgtgtctgggtagacagctcggagccgacttagaggacac

SEQ ID NO: 1560612 - DNA, 4001 bp, Homo sapiens
ggaactgtcctggagagaagaaggatgggtgagaggctgccccaccttgttctgagctgacgcctccccaggcttctatctgggaccctcagtctctatctctgttttctctgagtcttccccgccccgcccatcccctgtctctgtctgtctctccctcccttgggacccccacccctcattccggccatcaccacctgggctcccctggcagggcctgtgcggagcctgtgtccctgactgaacccgctgggctcctcacctgcgatcaggatgtccagggggtcgctgggggccgaccactcggaggagaggttgtatgcaccggagcatctgtactggcccccgtaggagcggctcacagggcccagggtgaagttggcctgggagagcccagcctggggctgtgggccagggagctggaggaagtcacgttctccctccttatacagaacaaatctgtcgtagctgacatcagaaacacactggagggtcaggctctccccaggggccactataggacctggctgcactgagagtgatggcttcttagaaacacctgggaaaaggtgctcatggtttccaggagccgaccctcaggcttccccacatatcctccctctcccccggggcctcaccactgctgatcttcctgtgtctccggccccaggagccctgagccctctcgccccaacatcatcccacctggagctgccctgagacgtggctgctccccacctgcctggagactcagggagactcagggaactccaggcaatgctgtgaatttctcacctaggaccaggagctccaggagatcactgggtagagaccacacatggggagagttcgagtcataagcatagcacctgtacgaccacctgcgactcgggctcacggggcccacagagaagatggcccgggaccacccatgggtacggggctgtgagttcaggcattgtgggtgttcatcttctccttccttacacagaatgaagctgccaaatgccacctgtgagacacaatggagggtcacgttccctcctgaggtcaccacagggctgggtagagctgagagggtgggtttgatgtaggctcctaggagagaaggaggcaccatgttaaatggggctcacacctcccacttcatccccagggctgggctgtgagagggagatgcccctgagaactgactcccttcctgagggcagagcctggggctgggagccctcagtgtcagctcacctgtcaccaccagctccagggggtcactgggctctgaccagcctgcagtgtggctaccgtagaaacagcgataccgccctgtgtgttcccaggtgatggatgggatggggaactggcccttcttcacaatctcctgtgggatccgtgtaatccagggtgctgttttcttttctctatacagacggtactcctgggtctccaggatcccctgacaccagagggtcacgggactcccctgggtgatcacagagcctggctcagcccagagtgtgggcttggggagggtccctggaaggaaatcagagttcagattctaagtcatttcccacccaacatatctcagctctcagcccaggaccctccagatgcccccatcagtcagtccagaactgctattccccatccccagctgcacgggggtggccccttgtccccagtgaggaggagggacctgggagagctggggacagactcacctgcctgcacgtgggtccgggggcccagactcagccctggaagagagttccctgtgaggaatttgcccctgaagcctgggcaggtcctcccctccctgggatctttgtgagcccctggggtctccttagggactagaggtcggctgtggggtgaggtccctcctaggttagaagctcccctccctcttcaaatctcactgagacagatcaggactgtgacgatgggggtcatagcgtctcctcccactgccctgctctgcggatggatgagccctcggtgctggcaggacagagacacacagagagaaatagcctcccctccttcccacccagtgtggacactcggaggctgggtccttctcatggggtgttgtcatctgcagccacacaggaagcagaactaccctaccaggagcctgactctcattcttttagagctgaggtgggggcaggaaccaggccctctgcagacatttcagactgtaatggggtctttcctgacccccagccactgtctgtctggtttctcctcttctcactgagagacgggatgtagcagcaaatagaactggtgctttctgcgtctgcccttccagatgagggtaacggaggcttccctttccttctcacagcctcccacatggtcaccctccctccttcagccatccatcagctcagcgttgtggggtccttaccatggcagtcgtccctccagccctggagatgcttcagggaagaccaaggtccatgctgcaggcagactcagatcagcagagaagcatctcgcatctggctgtgtagctcaggttgagctgcgtgtggcagtgagcacagaggagaaatgcagggaaataggggaagaaaagttgacttctttcttgacactggattgtgggttttctttcaaccaaatagtcccctctcaacttcccctttttaaaatattttgctacagtgtccactcccacccgctgggaacaaacatctgagactttcctgcctcctcggtgccctttgcttacttggccatccctctgcacctcaatccctgttcaacgttttgagaacaatgacttatgtttgagctttgatttggggagtgggggagggagttgatatttatttgatgactggttatcatccgctgcctacatgaccttggtttgtaatgtcccatcactgagcctcagtttcctcctttgcagattgttgtcatgaatcccactggtcacagtggttgttgggtcagtggtgcctgggacattcggaggggctcatttgtgcttgatttccagaccagggtaagacctgaactgtttgggatgtgaaaggatctcgatgttggaccccccagtctgtgtagatgattgatgtgtccactctggatctcacatctgaccctaatggagaaatgtacatgaggcatttctgaaatacccagagcatcaatgtcatgagcagaaaaagaggtgaggaagttcccaagtgtaggtggatccacaagaaagaacagaggccagagggtcccaggaccttcaaggggtaattagaatggagttttccaccactgaatggaggtgggagaggaacctcgggatctgcaatgacagtgagggcctcagggctccagaccaaggtgggaggctgcgtcctccagctacacctgaggctggagtggaccccaagcagcccagaggaattccatcaaaggagtgcaccaaaccgtccagtgatagagctgctgggattccaaagaaagaagcactaaacaccagggtgttcatagagcatttgttagagggacttccatagagtgggccctgcagcatgtcctggaggtagacaaggtgacactgggtgttctatccaatgctttaacctaaaataacaaaacaaaacaaaaatctagagaaaattatctctaagtacagttgttctttggtgtacaagggaactggctccagtccgtggcccacatgtcacaaaacctgcctgtactccagccctgaagctggctccactgcaccatgtatagggaaagtctgccattcgtatacacaggatttgcatcccacaaatgccatagttatgatccccgtttggttgaagagagtgtgcatacaagagaccccaggaattcaaggctgcattgctccagggttgcctggattttgcttgtatttgacaatgagaagcaaagattacaatctggagtgcatggcatggcaagacacagtgcatccggagagggaagtgtgatgttgtgatacacactggttt

SEQ ID NO: 1560613 - DNA, 4001 bp, Homo sapiens
agagagggtctgtcatagaactgtcctagagagaagaaggatgggtgaggggctgccccaccttgttctgagctgagacctccccaggcctctccctgggacccttagtctctctgtctctgttttctctgagtctcccctccccgcccatcccctgtctctctctgtctctccctcccttgggacccccaaccctcattccggccatcaccacctgggctcccctggcagggcctgtgcagagcctgggtccctgactgaacccgctgggctcctcacctgtgatcaggatgtccagggggtcactgggggccgaccactcggaggagaggttgtgtgcactgtagcatctgtactggcccccgtgggaggggctcacagggcccagggtgaagttggcctgggagagcccagcctggggctgccaaccagggcgctggaggaagtcacgttctccctccttatacagaacaaatctgtcgtagccgacatcagagacacactggagggtcaggctctccccaggggccaccataggacctggctgcactgagagtgatggcttcttagaaacacctgggaaaaggtgttcatggtttccaggagccgaccctcaggcttccccacaaaccctccctctcccccgctgatcttcctgtgtctccggccccaggagccctgagccctctcgccccaacatcatcccacctggagctgccctgagacgcggctgctccccacctgcctggagactcagggagactcagggaactccaagcaattctgtgaatttctcacctgggaccaggagctccaggagatcactgggtagagaccacacatagggagagttcgagtcataagcatagcacctgtacgaccacctgcgactcgggctcacggggcccacggagaagatggcccaggaccacccacgggcatgggaatgggagttcaggcgttgtgggtgttcatcttctccttccttacacagaatgaagccgtcaaatgccacctgtgagacacactggagggtcacgttccctcctgaggtcaccacagggctgggcagagctgagagggtgggtttgctgtaggctcctaggagagaaggaggcactgtgttaaatggggctcccacctcccacatcatccccagggttgagctgtgagagcggagatgcccctgagagccgacccccttcctgagggcagagcctggggctgggactcctgagtgtcctctcacctgtcaccaccagctccagggggtcactgtactctgatgagtgattgtggctgtagtactgacagtgataccgccctgcgtgttcccaggtgatggatgggatggggaactggccattcttcccaggctcttgtatccgtctaacccaggatgctgatttgttttccctatatagatggtactcctcagcctgaaggctcccctgacacctgagggtcacaggacttccctggatgatcacagagcctggctcagcccagagggtgggcttggggaggtgccctggaaggaaatcagaggtcggattctaagtcatttcccacccaacagatctcagctctcagctgcaggaccctccagacacccccatcagtcagcccagaactgctattccccatccccagctgcacgggggtggccccttgtccctagtgaggaggagggacctgggacagctgggaacagactcacctgcctgcacgtgggtcctggggcccagactcagccctggaagagagttccctgtgagggatttttcccctgaagcctgggcaggtcctcccctccctgggatctttgtgagcccctggggtctccttagggaccagagtttggctgtggggtgaggtccctcctaggttagaagctcccctccctcttcaaatctcaccgagacagatcaggaccgtgaggatgggggtcatggcgtctcctcccactgccctgctctgcggatggatgagccctcagtgctggcaggacagagagacgcacagggtgtggacactcggaggctggatccttcttgtcatggggttttgttatgtgcaaccacacaggaagtgcaactgccctctcaggagcctggctgtcatacctttagggctgaggtgggggcaggcaccaggccctctgcagacatttcagactgtaatggggtctttcctgccccccagccactgtctgtctggtttatcctcatctccttgagacctgggatgtagcagcaaatagaactggtgccctcctgcgtctgcccttccagatgagggtgagcagaggcttcctcttccttctcagagcttccccatggggtctccctccctccttcagcccgtccatcagctcagcgttgcggggtccttaccatggcggtcgtccctccagccctggagatgcttcagggaaaacccaggtccatgctgcagttagactcagatcagcagagacgcacctgacacctggctgtgtagctcaggttgagctgcgtgtggcagtgagcacagaggagtaatgcagggtctaccatggtggctcatgcctggaatcccagcacttcaggaggctgaggtgggtgaaggctagaggccaggagcttcagattaccctgggccacatagcaagaccttgtctgtataaaaaaagcaaaaaattagccaggcatggcagctcacatctctagtcccagctactcaggaggctgaggtgggaggaatacttcggcctgggaggcggaggctgcagggagctatgatcaccccttagcattccagcctcagtgacagagtgagaccctgtctcaaaaggggaaatgcagggattaactataataaaacatatttgttctgtcttgagagtgtgtgtttccttcctaccaaaccgtccctctcctgtacttccccttttctctttgttgcaacatcacccacccccaccccgggaatgaggctctgagtcggtcccgccccctcagtgtcccttgcgtccttggccttccctcggcacctccgtccatgttcagagttttcagaagaatttgttaggtctgtaatctgattctggggaaggtgagctgatttgtatttaattcctgattatcatccagggtttatgtgactttggacatgaatgtcacctctgagcctgctgtcgtgaaccccactcatcacagtggctgtgggggtcagtggtgcccaggacatgggaggctcagccatggtgaatttccagaccagttcagacaggagggtggggacgggagaggatcctggtgctgggctccacagtccaggaggatgattgacgcccccactcaagagcccacatcggctccaaataccatgaaattctccttgtgatacatctgaaatatgcagatcatcacagccacgggcacagaaagaggaagaacagttcctcacattgagacgcatccccttccatgagcagagttcaatgctgagtggccacaggtgtctgggaccacccagggtcattagggaggaggaggctcccacctccgtgtgggacagaagaggaaccccacgtcctcccaggcagggaggggtcagggctctgggtgacgctggaagctgtggctccccctcccctgtgtgtgtggacaggcgctggggggtctctgctcactcactggaggccatggtcagtgctcagcccctcccctgtgtgtgagaaacagattcaatccacggtggtctgacatgggcgtctgctctgccccacaggtgagtgtgagactggcgttggtcccatccctgctgggcacaatcttgagctgacactgagtttgggggagtggggaggagcagcggcaacaatccccttcatcaggctgatgcctggacagccgtgggagaaaccctttatgaaaggtcaggtgcgtgggaggagccgccccacaggaatgacaaccaagatacatgaggaaaacacagacagttgttgaaatgca

SEQ ID NO: 1560614 - DNA, 4001 bp, Homo sapiens
accacacatagggagagttcgagtcataagcatagcacctgtacgaccacctgcgactcgggctcacggggcccacggagaagatggcccaggaccacccacgggcatgggaatgggagttcaggcgttgtgggtgttcatcttctccttccttacacagaatgaagccgtcaaatgccacctgtgagacacactggagggtcacgttccctcctgaggtcaccacagggctgggcagagctgagagggtgggtttgctgtaggctcctaggagagaaggaggcactgtgttaaatggggctcccacctcccacatcatccccagggttgagctgtgagagcggagatgcccctgagagccgacccccttcctgagggcagagcctggggctgggactcctgagtgtcctctcacctgtcaccaccagctccagggggtcactgtactctgatgagtgattgtggctgtagtactgacagtgataccgccctgcgtgttcccaggtgatggatgggatggggaactggccattcttcccaggctcttgtatccgtctaacccaggatgctgatttgttttccctatatagatggtactcctcagcctgaaggctcccctgacacctgagggtcacaggacttccctggatgatcacagagcctggctcagcccagagggtgggcttggggaggtgccctggaaggaaatcagaggtcggattctaagtcatttcccacccaacagatctcagctctcagctgcaggaccctccagacacccccatcagtcagcccagaactgctattccccatccccagctgcacgggggtggccccttgtccctagtgaggaggagggacctgggacagctgggaacagactcacctgcctgcacgtgggtcctggggcccagactcagccctggaagagagttccctgtgagggatttttcccctgaagcctgggcaggtcctcccctccctgggatctttgtgagcccctggggtctccttagggaccagagtttggctgtggggtgaggtccctcctaggttagaagctcccctccctcttcaaatctcaccgagacagatcaggaccgtgaggatgggggtcatggcgtctcctcccactgccctgctctgcggatggatgagccctcagtgctggcaggacagagagacgcacagggtgtggacactcggaggctggatccttcttgtcatggggttttgttatgtgcaaccacacaggaagtgcaactgccctctcaggagcctggctgtcatacctttagggctgaggtgggggcaggcaccaggccctctgcagacatttcagactgtaatggggtctttcctgccccccagccactgtctgtctggtttatcctcatctccttgagacctgggatgtagcagcaaatagaactggtgccctcctgcgtctgcccttccagatgagggtgagcagaggcttcctcttccttctcagagcttccccatggggtctccctccctccttcagcccgtccatcagctcagcgttgcggggtccttaccatggcggtcgtccctccagccctggagatgcttcagggaaaacccaggtccatgctgcagttagactcagatcagcagagacgcacctgacacctggctgtgtagctcaggttgagctgcgtgtggcagtgagcacagaggagtaatgcagggtctaccatggtggctcatgcctggaatcccagcacttcaggaggctgaggtgggtgaaggctagaggccaggagcttcagattaccctgggccacatagcaagaccttgtctgtataaaaaaagcaaaaaattagccaggcatggcagctcacatctctagtcccagctactcaggaggctgaggtgggaggaatacttcggcctgggaggcggaggctgcagggagctatgatcaccccttagcattccagcctcagtgacagagtgagaccctgtctcaaaaggggaaatgcagggattaactataataaaacatatttgttctgtcttgagagtgtgtgtttccttcctaccaaaccgtccctctcctgtacttccccttttctctttgttgcaacatcacccacccccaccccgggaatgaggctctgagtcggtcccgccccctcagtgtcccttgcgtccttggccttccctcggcacctccgtccatgttcagagttttcagaagaatttgttaggtctgtaatctgattctggggaaggtgagctgatttgtatttaattcctgattatcatccagggtttatgtgactttggacatgaatgtcacctctgagcctgctgtcgtgaaccccactcatcacagtggctgtgggggtcagtggtgcccaggacatgggaggctcagccatggtgaatttccagaccagttcagacaggagggtggggacgggagaggatcctggtgctgggctccacagtccaggaggatgattgacgcccccactcaagagcccacatcggctccaaataccatgaaattctccttgtgatacatctgaaatatgcagatcatcacagccacgggcacagaaagaggaagaacagttcctcacattgagacgcatccccttccatgagcagagttcaatgctgagtggccacaggtgtctgggaccacccagggtcattagggaggaggaggctcccacctccgtgtgggacagaagaggaaccccacgtcctcccaggcagggaggggtcagggctctgggtgacgctggaagctgtggctccccctcccctgtgtgtgtggacaggcgctggggggtctctgctcactcactggaggccatggtcagtgctcagcccctcccctgtgtgtgagaaacagattcaatccacggtggtctgacatgggcgtctgctctgccccacaggtgagtgtgagactggcgttggtcccatccctgctgggcacaatcttgagctgacactgagtttgggggagtggggaggagcagcggcaacaatccccttcatcaggctgatgcctggacagccgtgggagaaaccctttatgaaaggtcaggtgcgtgggaggagccgccccacaggaatgacaaccaagatacatgaggaaaacacagacagttgttgaaatgcattagacagacattgtgaaggtgaattaatttttatattaatttatatattatataaaagagtcccaagcccttctcagccttttcccctgctatcattgctaccgaaactttggggcttctgtctccaccctcaggtgcccccctcttcctgtcacagaagttttcttcctggacatcagcagctgggctggacccggggaaggacatgggagtgtgagggccagtgaggaggttgtgggggtaggtgggcgtctggggtcttcgggcagaattacctcctccacaggcctctgtcgttctctgactccacagtccccacaggactttggaaatcagcctccctctgggctgggtgaagagggacagagcttcagccttgggatcatgagagccacctgccctgcacagagaactcaagagaaaagaaggaaagctgaaaacacacttgcatagatgttttaaaaacgtcgttagatgaaacaaccaaaagaataaggtatgttcatgtatgttcacatttattctcttctttctaggttttctcactgggaaatgctggagccgtttttctgagctgaactttcccatctggaatctgtctggttggtggtgccctgaccccaccttcagtcagcccatgggtctccccgccaacttcctactcacccaatgtcctgtgttggccctgaggccagtgtcagaggagaaagaagaggaggaagagcaccagctgaaggccactgagaccccgatcacaacccccaggtgctttcccagaccctgaggtaggactgtgaaggtgtactgatgcccttgccaaatgaaaggaaact

SEQ ID NO: 1560615 - DNA, 4001 bp, Homo sapiens
aaagaaggacgggtgaggggctgccccaccttgttctgagctgagacctccccaccagtcctctccctgggaccctcagtctgtccctgttttctctgagtctccccctccccgcccatcccctgtctctgtctgtctctccctcccttaggacccccacccctcatcccggccatcaccacctgggctcccccagcagggcctgtgcagagcctgggtccccctgactgaacccgctgggctcctcacctgcgatcaggatatccagggggtcactgggggccgaccactcggaggagacgttgtgtgcgccgtagcatctgtactggcccccgtaggagcggctcacagggctcagggtgaagttggcctgggagagcccagcctggggctgccggccagggcgctgggggaggccatcggccccctccttgtacagagtgtatctgatgtagccgacatcagagccacactggagggtcagattctctccgggggtcacgacagggccctgcagggtcaggagggagggcttcctagacacgcctggagggaaagatgagttgggactcggagcggctggttcctcctgcgccccttccttctgtagccttcctcactagggtttccagcgtccttgtttttttctcattctgtatttgtgtccccagggcccccatcttcccctcatcttttcttcttgcgtgggctagcccgagggtaaggctcccaacagctcacctggtgccctgactttgtataaggaaaagctacggcttcctcacctgacaccagtagctgcagggggtcactgggttccgaccacacgtatggggtgttgttttcatagccgtagcatctgaatgtacccctgttgctgaaggtcagggggcccatggggaacagggcctggaactttccatggttgtgttggtgtgagttcagggtccaggagagcctgtggtctccttcctcaatcagagtgaacctgcccagtcccagccgtgaggcacaccggagggtcacgttcactcctgaggtcaccacagggcttggcagtgcggacagggtgggtctgctgtaggctttcaagagaaaaaaaggcagccgtgtttaaatggggctcacacctcccaccttatcctacaaggctgggctgtgagaagggagacccctcgagagctgagagccgacccccttcccgagggcagagcctggggctgggacccctgagtgtcctctcacctgtcaccaccagctccagggggtcgctgggctctgaccagcctgcagggctctgatagtaacagtgatatcgccctgcatgttcccacatcatggatgggatggagagtttgaccttgttttcagactccagtgtttttaatatgtgcctcgacattgagtttccctctttatccagacggtacccctgggcctccagggtgccctgacaccagatggtcacggggttatgccaggtgatcacgggacctggctcggcccacaggatgggtttgagtaggttttctggaaggaaattacaggttaggtcccaagatgtcctcaaccctcagatcccagctctcagccccaggacccccctcatccccatcagtcagcccagaactgctgtcttcacccccagctgcccaggggtggtcccttgtccccagagaggaggagggacctaggacagctggggacagactcacctgcctgcacccgggtcctggggcccaggctcagccctggaagagagttccctgtgagagatttgcctccgaagcctgagcaggtcttcttcttttccttgagcccctgggatgccctaattgactaaggcatggctatggattggggtctctctcctagactagggtctctcctccccctcttaagatctcaccaaagaagagcaggcttgtgagaatgagggtcatggcatctcctcctcctggccctggctgtgcaggcaggtgtggccacggtgcccgtagacacagacagacacatggtgtgcgggcacacggaggctgggtcctccccatcacgaggttgtcccatcagcacaccgacagaaagaggaactgcccctccccaggaccctggctctcatttcccagggcttgtcctgggggtgagcaccaggctctctgccgatatttcagacacaaatggggattcacaagggggtcgttaagaaggacattttcggccgggcgctgtggctcacagctgtcatcccagcactttgggaggccaaggtgggtggatcacttgaggtcaggagttcgagaccagcctggccaacatggcaaaaccccgtgtctactaaaaatacaaaaatgagccggtcgtggtggcacatgcctgttatcccagctactcgggaggctaaggcgggagaatcacttgaactccggaggcagaggctgcagtgagccgagatcacgccattgccttccagcctgggcaacaagaacaaaactctatctcaaaaaaaaaaaaaaaaaaggacgtttccatctctgtgtggcacagaaaaggaagtccagggtcctcacagacagggaggaacctagggctccaggtgaaagtgagacgctgtggctgcccctcttctgtgtttgcacatgggcactgccatctctctgcttccttgtgggagccatgaggggcagaaagaggaactgcccctccccaggagcttggctctcatttccccagggcttgtcctgggcgtgaacaccaggctctctagagatattacagacagaaatgggctctcccctcactttggctgcgtctatctaatctgtcctcatctcaccaagggccaggatgtagcagcaaacagacccggtgccttcttgattcagccccttccaggtgagagggactgatggttcctccttccctctcagagcctccccatggaggaggctccatctcccctgtgtgtgtgtgaaaaacaggctgtctgtggtattgtcacacctggacatctgtcccacacgtgagtgggaggtcacattggactccgccttgccagccacaactttgggcagatgctaagtttggaagagttgatgctcctggacaggagcagctgtaaccacccgctctggacaggcctgatttctgagtcgtctctgggagaaatgttctttgtaagatcatgtgcatgggggtagatggacagcatgcagtgtatttgagaagagatagacaactagaaattatgtaggcagatgtggctgtggtgaaaatagtaggtagaattaacacacttaaaaatcaattctatggccgggcacggtggctcgcacctgtaatcccagcactttgggaggcccaggcgggcagatcacttgaggtcaggagttcaagaccagcctggccaacatggtgaaaccccgtctctatactaaaaataacaaaaattaggctcatttttgaatccccttaaacattaccagcccctaaatgtctgctctatggattcttctttgaattcagtattaacatctttcccgttccctcgttaatagtaagctaaataaaaacttgtgtccattttatccttctagaagagcaatttttttttacctttttgaaaaaaaaaactttaccaaaatatatttaagatcaagaatgctggtcataagctgtgaaaatctatgtcttgtcttaatcattccatcagcataaaaaatgtagcaatgcatgtgaagtgttggttccaggcaaacctgcttaagactcaatgttcaaggttgttattaggtgggggccatataggcataatggtcagtcacagggaaaccagggaaaagctgctgttcatcagcatttttttttttttacaaactcatcaacagtgagctacattgtttgcggaaatggcctagtcaagacacagtagaattcagtgctgcagtcacacaacaccagcttatctcttaggaacatagggaacattccaggagccatgttta

SEQ ID NO: 1560616 - DNA, 4001 bp, Homo sapiens
gaaatggggtttcaccatgttggccaggctggtcttgaactcctgacatcaggtgatccacctgcctcggcctcccaaagtgctgagattacacgtgtgagccactgtgcccagcccttgctttgttttcctcaccctgaatttgtgtccctaggatttctgtgttctccttcccctttttgtctttcttagcaggggctgccctgcctgtaaagctctccacaacctgtctggcttccctgaattgtactagagaagactgtggcttcctcacctgagaccggaatctccaggaggtcactgggttctgaccatacctgcaggatatgcctgcgagagccatagcatctgagcatccacctgtggctgggggtcacagggcccacagggaacagggcctggaactgcccactgggggtcagctgtgagtccaaggtccaggagagcttgtggtctccttcctcagtcagaatgaacctgtcgaatctcagccgtgagccacactggagggtcacgttctctcctgaggtcaccacaggactgggcagggctgagagggtgggtttgttgtagaatcctaggagagaaggaggcaccgtgttaaatggggctcccacctcccacatcatccccagggctgggctgtgaaagggagacacccctgagagccgacccccttcctgagggcagagcctggagctgggaccccagagtgtcctctcacctgtcaccaccagctccagggggtcgctgggctctgaccagcctgcagggctgtagtagtaacagcggtatctccctgcatggtgctctgtcatggatgggatggagaatctggccttgttcttgggctccagtgggttctgtgtgtcccagggttctgggcttccctctttaaccagacggtattcctgggcctccagggtcccctgacaccggatggtcacagagttcccccggctgatcacagagcctggctcagcccagagggtggctttggagaggttccctggaaggaaatcagagtctgggctccaagacctccccacccctcagatcccagctctcagccccaggaccctccagacgtccccatcaatcacccagaactgcggtcttcacccccagctgcccatgggtggccctttgtccccattgaggaggagggacctgggacagctggggacagactcacctgcctgcacgtgggtcctggggcccagactcagccctggaagagagttccctgtgagagatttgcctctgaagcctgagcaggtcctcccctgcctgggaacctcctaaaaccctggagtttcctgatagacaagggcctcgttatggggtggggtccctcccagactagggtgccccttccctgaggcttccaatctcaccgaggcagagcagaaccatgagggcagggctcacggcgtctcctcccactggctgcagctgtgcagatggatgagaccatggtgcctggcaggacagagagacacacagggtgtggcagctcggaggctgggtccttcttgtcataggattttctcattctcagcccacagaaaggggaactgctctccccaggagcctggctctcatttccccagggctgaagtgaagtagttgagactacaggcaccaggctctctgcagacatttcagacagaagtggggtctcccttccccgggccactgtctgcctgatttatctttatctcactgagagccgggacacagcagcaaatagacccggtgccttcctgagtcagcccctttcaggcgagggtgacctcctccctctcagagcctccccatggggtctccctccctccttcagcccgtccatgagctcagcgttgcggggtccttaccatggtcagtgatttttcagccctggagatgcttcagggaagatgcaggtccatgccacaggcagactcagatcagcagagacacatctgacacctggctgtgtagcccaggctgagctgcatgtggcaatgagcacagaggagaaatgcagggaaataggggaggaaatcatgaccctttagtggccctggagtgttttctttctaaccaatagtactctctttcttgtacttcccttaattttttttttttttttttttttttgcaacagcgtccacctccaccccacctccagtaacaaacctctgaatcttttctgcctccactgtgccttctgtttctttgggcttccctctatacctcaatccatgttcaacattttcggagtaattacttaggctttgttttaaaattttcattcttatgtatctatttattttttaatttttgtgggtacattacttaggtttgggctctggtttgctgagtggggagttgatttctttctttctttctttctttccttttttttttttttgagaccgagtctcgctctgtcgcccaggctggagtgcaatggcgctatctcggctcactgcaagctccacctcccgggttcataccattctcctgcctcagcctcccgagtagctgggactacaggcgtccgccaccacgcccggctaatttttttgtatttttattagagacagggtttcaccatgttagccaggatggtctcgatctcctgacctcatgatccgcctacctcggcctcccaaagtgctgggattacaggcgtgagccactgcgcccggctggtggggagttgatttctatgtaattcccgattattatctacggcttgtgtgatcttgggcagtactgtctcatctctgagcctcagtttccctgtgtggagcctgttgtcatgaacctcactcatcacagcggatgtgggggtcagccgtgcttgggtcatgggagaggctcaatcacggttaatgtctagactagattaagacatgaggggttgggacatgagaggattctggtttcagtctctatgattatgtcacagaggtgcagaaaaagcatttgataaaatcctgcatcccttcatgataaaaattcccaacaaacaaggtacagagggacatacctcaaaatactaaaggcgataggtgacgaaatcccagccaatatcgcaaacagggaaaaatagaaagcattccccctaagaactggagcatgacaaagatgtgcactgtcaccactcttcaacgtagtactggaggtccttgccagagcaatcaggcaagacaaagaaataaaacacatctaaattggaaaaaaaaaaagtgaaattatttctgttcgctgatgatattatcttatacctcaaaaaccctaaagactcagccaaaacactcttagatttgataaagaaatgcagtaaagtttcaggatatagaatcaaagtacagaaatcagtagcatttctgtactccaataatgacgaagctgagaaccaagtcaaggaggcaatcccatggacagtgggtgcacaaaaataaaacacctgggaatatatttaaccaaggaggtgaaagatttctacaaggaaaacttcaaaccagtgatgaaagaaattgtagaagacacaaacagatggaaaaacatcccattctcataaatcagaataattactatgattaaaatgaccacattgcccaaagcaatctacagatttaatgcagtccttacaaaaataccttcatttttcacagacttagaaaaagaaaccttaaaagttatattgagccaaaaaaagagcccaaacagccatagcaatcctaagcaaaaagagcaaagctagagacatcacattaactgactcaaagtttacaaggctatagtaaccaaaagagcatgacactggtataaaaatagacatataggccagttgcagtggctcacgcctctaatcccagcactttgggaggctgaggcaggtggattacgaggtcaggagttcaagaccagcttggccaacatggtgaaaccccgtctctgctaaaaatacaaaagaattagccaggtgtggtgatgggtgatctcaa

SEQ ID NO: 1560617 - DNA, 4001 bp, Homo sapiens
acctgggctcccccggcagggcctgtgcagagcctgggtccctgactgaacccgctgggctcctcacctgccatcaggatgttcagggggtcgctgggggccgaccactcggaggagaggttgtgtgcaccatagcacctgtactggcccccgtgggaggggctcacagggcccagggtgaagttggcctgggagagcccagcctggggctgctggccagggcgctggaggaagtcacgttccccctccttatacagaacaaatctgtcgtagccgacatcagagccacactggagggtcaggctctgcccaggggccaggacagggccctgcagggtcaggagggagggcttcctagacacgcctggagggaaagaggagccaggactgagagggctggttcctcccacgccccttccttctcccgtcctggccctgcaggtctcactgtctctcatgctctgagtctctgaccccagggcctccttctcacccggggctgtcttggagtcatttcagaggagtggggtctccctagccctggccactgtgcctgatctttcctcctctccctgagagctgggacctcacagcaaacacaccgatgccttcctgagtcctccccgttcaggtgagcgtggctgagggctcctcctcccatgtcagagcctccccatggggtctccctcatgccttcagcccgtccttcaacacatcactctgggtcctttccagattcagtcaccagccaaactccccacaacctgtcagctgccccgaaagtgtgttagacaaggccgtggctccctcacctgagggcagaatctccagggggtcactggggtgggaccacacccggggggtgttcatataatagtaatagcatgtgaacctccacctgtggctggggttcacggggcccacagggaacagggcctggaaccccccactgtggagctgctgtgagtccagggtccgggggagctggtgttctccttccttcatcagaacaaaatggtgatatcccttctgtgagccacattggagggtcatattcccccctgaggccaccacagggctgggcagggctgagagggtgggtttgctataggctcctaggagagaaagaggcaccatgttaaatggggctcccacctcccacatcatccccagggctgggctgtgagagggagacacccctgagagccgacccccttcctgagggcagagcctggggctgggaccccagagtgtcctctcacctgtcatcaccagctccagggggtcgctgggctctgaccagcctgcagagctgtaatagtggcagcggtatctccccgcatggtgctctgttatggatgggatggagaatctggccttgttcttgggttccagtgggttatttctgtcccagggctctgggcttccctctttatccagtcggtactcctgggcctccaggctcccctgacaccagatggtcacggggctcccccagctgatcacagagcctggctcagcccagagggtgggtttggggaagggccctagatggaaatcagaggctggatcccaagacatccccacgctcagatcccagctcccagccccaggacttcctcatcatccccatcagtcacccagaactactgtctcctccccacccagaactgctgtctcctcccccagctgcccatgtgtggcccttgtccctagtaaggatgagggacctgggacagctggggacagactcacctgcctgcacgtgggtcctggggcccagactcagccctggaagagaattccctgtgaggcatttgccctgaagcctgagcaggtcctccccgccctggtgcctcctgagcttttgaggtctcctgatggaccagggcttgtgtgtggggtggggttcctccaagactcagatctccccctccccatcttgaaatctcacctaggcagagcagggctgcgagggtgggggtcatggcgtctcctcctggtgaccccgggctctgcagagggatgagccctcagtgctggcaggacagagagacacacagggtgtggccgctcggaggctgggtccttcttgtcatggggttgtctcatcctcagcccacaggaagaggaactgccaccccaggaacctggctctgatttccccagggctgaagtgggggcaggcaccaggctctctgcaggcatttcagagagaaatggggtctccctgcccccgggccactgtctgcctgatttatctttatctcactgagagctaggacacagcagcaaatagaaccagtgccttctggagtcagcccctttgaggcgagggtgactgtgggctcatcctccctctcagagcctccccatggggtctccctccctccttcagcccgtccatcagctcagcgttacggggtccttaccatggcagtcgtctctccagccctggagatgcttcagggaagacccaggtccatgctgcaggcagactcagatcagcagagacgcacctgacacctggctgtgtagtccaggctgagctgcgtgtagcagtgagcacagaggagaaatgcagcgtctaccgtggtggctcatgcctggaatcccagcacttcaggaggctgtggcgggtgatggcttgaggccaggagcttcagacagtcctgggaaacagactgtgaccctgtttctacagaaaagaaaaaagtgagctgggcatggaggctcatgcctgtggtcccagctactcaggaggctgaggtgggaggaccacctgggcccgggaggcggaggctgcagggagatatgatcaccccttggccttccagcctgggcgacagcgcaggatcctgtctgaaaaggagaaatagaggggataaagagaaatatatatatatatatatatatgtttcattgtaatctataatctgattctggggaaggtgagctgatttgtatttaattcctgattatcatctagggtttatgagactttggacatgaatgtcacctctgagcctgctgtcgtgaaccccactcatcacagtggctgtgggggtcagtggtgcccaggacatgggaggctcagccatggtgaatttccagaccagttcagacaggagggtggggacgggagaggatcctggtgctgggctccacagttgaggaggatgattgacgcccccattcaagagcccacattggctccaaataccatgaaattcttgtgatacgtctgaaatatgcagatcatcacagccacaggccgagaaagaggaagaacagttcctcacattgagacgcatccccttccatgagcagagttcaatgctgagtggccacaggtgtctgggaccaccgagcgtcattagggaggaggaggctcccacctccatgtgggacagaagaggaaccccacgtcctcccaggcagggaggggtcagggctctgggtgaggctggaagcggtggctccccctcccctgtgtgtgtggacaggcgctggggggtctctgctcactcactggaggccacggtcagcgctcagcccctcccctgtgtgtgagaaacagattcgatccacggtggtcagacatgggcgtctgccccacaggtgagtgtgaggctggcgttggtcccatccctgctgggcacaatcttgagctgacactgagtttgggggagtggggcaggagcagcggcaacaatccccttcatcaggctgatgcctggacagccgtgggagaaaccctttatgaaaggccaggtgcgtgggaggagctgtcccacaggaatgacaaccaagatacgtgaggaaaacacagacagttgttgaaatgcattagacagacgtcgtgaaggtgaaaaatagtaaattgaattaataccatcgaaaagtaatttaataaatatatacacctactatgtagccataaagtgaaaaatttgaccgggcgtggtagctcatgcctgtaatcccagcactttgggagg

SEQ ID NO: 1560618 - DNA, 4001 bp, Homo sapiens
caggggccacgataggacctggctgcactgagagtgatggcttcttagaaacacctgggaaaaggtggtcatggtttccaggagccgaccctcaggcttccccacaaatcttccctttcccccggggccacatcactgctgatcttcctgtgtctctggccccaggagccctgagccctctcgccccaacatcatcccacctggaactgccctgagacgcggctgctccccacctgcctggagactcagggaactccaggcaatgctgtgaatttctcacctaggaccaggagctccaggagatcactgggtagagaccactcatagggagagttcgagtcataagcatagcacctgtaccaccacctgcgactcgggctcacggggcccacggagaagatggcgcgggacgacccacgggcatggggctgggagttcaggcattgtgggtgttcatcttctccttccttacacagaatgaagccatcaaatgccacctgtgagtcacactggagggttacattccctcctgagttcaccacggggctgggctgggctgagagggtgggtttgatgtaggctcctaggagagaaggaggcaccgtgttaaatgtggctcagaccacccgcgtcatccccagggctgggctgtgagagggagaagcccctgagagccgtcccccttcctgagggcagagtctggggctgggacccctgagtgtcagctcacctgtcaccaccagctccagggggtcactgctctctgagcggcctgcagtgtcgctaccatagtaacagcgataccgccctgtgtgttcccaggtgatggatgggatggggaactggcccttcttcacaagctcctgtgggatccgtgtaatccagggtgctgttttcttttctctatatagacggtactcctgggtctcctggcccccctgacacctgagggtcacaggactcccctgggtgatcacagagcctggttcagcccagagggtgggcttggggaggtgccctggaaggaaatcaggagtcagattctaactcatttcccacccaacccagcagattccagctctcagcccaggaccctccagacgcccccatcagtcagcccagaactgctattccccatccccagcggcacgggggtggccccttgtccccagtgaggaggagggacctggaagagctggggacagactcacctgcctgcacgtgggtccgggggcccagactcagccctggaagagagttcccggtgagggatttgccccctgaagcctgggcaggtcctcccctccctgggatctttgtgagcccctggggtctccttagggacaagagtttggctgtggggtgaggtccctcttaggttagaagctcccctccttcttcaaatctcaccgagacagatcaggaccgtgaggatgggggtcatggcgtctcctcccactgccctgctctgtggatggatgagccctcggtgctggcaggatagagagacacacagagtgtggccaatcggaggctgggtccttcttctcatggggtgctgtcatctgcagccacacaggaagtggaactgccctccccaggacccttgctctcattccattagggctgaggtgggggcagtcactaggccctctgcatcatttcagatggtaatgggccctttcctgacccccagccaccgtctgtctggtttgttttcatcccactgagagccaggatgtagcagcaaataaaactggttccttcctgtgtctgcccttcctgacgagggtagcggaggcatctccttccttctcacagcctcccacatggtcaccctccctccttcagccgtccatcagctcagtgttgtggggtccttaccatggcagtcgtccctccagccctggagatgcttcagggaagacccaggtccatgctgcaggcagactcagatcagcagagacgcatctcgcatctggctgtgccgcccaggctgagctgcgtgtggcagtgagcacagaagagaaatgcagggaaatagggaagaaaagttgacttctttcttgacactggattgtgggttttctttcaaccaaatagtcccctcttaacttcccctttttaaaatattttgctacagtgtccaaccccaccccccgggaacaaatctctgagtctttcctgcctcctcggtgccctttgcttacttggccgtccctctgcacctcaatccctgttcaacgctttgggaacaatgacttatatttgagctttgatttggggagttgggggggagttatatttattcaacgactggttatcatccactgcctacgtgacctcgggcggtaatgaaccatctctgagcctcagattcttcctttgccgactgttgtcacaaatcccactcgtgacagtggttgtacggtcagtggtgctggaacattaggaggggctcatttgtgcctgatttccagaccagggtaagacctgaggtgtttgggacataagaggatcttggcgttggactccacagtctacgtaggtgattgatgtgtccactctggatctcacatctgaccctaatggatagatggacgtgtatttgtccatctatctgggcatttctgaaatacccagagcatcaatgtcatgagcagaaaaagagatgtggaagttcccaagtgtagatggatccacaggaaagaacagaggccacaggtgagatgccacagggacctgggaccatcaagggctcattagggtggaggtttccaccactgagtggagccaggagaggaacctcgggatctgcaatgacagtgaggggctcagggctccagaccaaggtgggaggctgcgtcctccagctacacctgaggctggagtggaccccaagcagcccaggggaattccctcaagggagtgcaccaaaccgtccagtgacagagctgctgggattccaaagaaagaagcactaaacaccagggtgttcatagatcatttattagggagacttctgcacagtggggcaccctcgtctccttgcccagtgtctccttgtggatctcaaggatgtgcttccacatagcagcatcttcttcagatggacaaggagacactgggtgttctacccgaagctttaacttaaaataaaaataaaaacaaaaataaacccctagagaatatgatctctcagtagagttgtttcttgggatacacaggcaattcgtttcagtacccgctacatgcaccaacacctgctcgtactccagccccgacattgtctctgctgggcctgcatataggaaaagtctgccgttcatatacacaagtcttgcatcccacaaatgctacagttttgacccccgtttggttgaaaaaagtgtgcatataagagaccccaggaattcaaggctgcgttgctccagggttgtctggattttgagtttatttgggagtgagaagcaaggattacaatctggagtgcatggcatggcaagccacagtgtgtccggagagggaagtgtgatgttgtgatacacactggttttcacctgcggttcctggctcatagctccatagcccttgttacagtcttttgttataacattggctgtgttaggccttaggggaggcctctgacctcctcctgcccttccttcacctgcccaaggcaagactctaatgtccctgcctttctgatggtggctcttaagaccctcccagaagatggtctcagcctgttccttgtgggaggaaatactgacatcatgaagcttcataaaaacccaagaagactgggtttcgtgggtttctgggtggttgagcatgtggagactcctggagggtgatgcccagggagggtatggaagccctgcgccccttcccccatgcctcctcctatgagtctcttcatctgtgtcctctgcagtgtgctttgtattcaaccaggaaacgtcagtgtctctctgagttctgtgagctgctacagcaaa

SEQ ID NO: 1560619 - DNA, 4001 bp, Homo sapiens
aatcttccctttcccccggggccacatcactgctgatcttcctgtgtctctggccccaggagccctgagccctctcgccccaacatcatcccacctggaactgccctgagacgcggctgctccccacctgcctggagactcagggaactccaggcaatgctgtgaatttctcacctaggaccaggagctccaggagatcactgggtagagaccactcatagggagagttcgagtcataagcatagcacctgtaccaccacctgcgactcgggctcacggggcccacggagaagatggcgcgggacgacccacgggcatggggctgggagttcaggcattgtgggtgttcatcttctccttccttacacagaatgaagccatcaaatgccacctgtgagtcacactggagggttacattccctcctgagttcaccacggggctgggctgggctgagagggtgggtttgatgtaggctcctaggagagaaggaggcaccgtgttaaatgtggctcagaccacccgcgtcatccccagggctgggctgtgagagggagaagcccctgagagccgtcccccttcctgagggcagagtctggggctgggacccctgagtgtcagctcacctgtcaccaccagctccagggggtcactgctctctgagcggcctgcagtgtcgctaccatagtaacagcgataccgccctgtgtgttcccaggtgatggatgggatggggaactggcccttcttcacaagctcctgtgggatccgtgtaatccagggtgctgttttcttttctctatatagacggtactcctgggtctcctggcccccctgacacctgagggtcacaggactcccctgggtgatcacagagcctggttcagcccagagggtgggcttggggaggtgccctggaaggaaatcaggagtcagattctaactcatttcccacccaacccagcagattccagctctcagcccaggaccctccagacgcccccatcagtcagcccagaactgctattccccatccccagcggcacgggggtggccccttgtccccagtgaggaggagggacctggaagagctggggacagactcacctgcctgcacgtgggtccgggggcccagactcagccctggaagagagttcccggtgagggatttgccccctgaagcctgggcaggtcctcccctccctgggatctttgtgagcccctggggtctccttagggacaagagtttggctgtggggtgaggtccctcttaggttagaagctcccctccttcttcaaatctcaccgagacagatcaggaccgtgaggatgggggtcatggcgtctcctcccactgccctgctctgtggatggatgagccctcggtgctggcaggatagagagacacacagagtgtggccaatcggaggctgggtccttcttctcatggggtgctgtcatctgcagccacacaggaagtggaactgccctccccaggacccttgctctcattccattagggctgaggtgggggcagtcactaggccctctgcatcatttcagatggtaatgggccctttcctgacccccagccaccgtctgtctggtttgttttcatcccactgagagccaggatgtagcagcaaataaaactggttccttcctgtgtctgcccttcctgacgagggtagcggaggcatctccttccttctcacagcctcccacatggtcaccctccctccttcagccgtccatcagctcagtgttgtggggtccttaccatggcagtcgtccctccagccctggagatgcttcagggaagacccaggtccatgctgcaggcagactcagatcagcagagacgcatctcgcatctggctgtgccgcccaggctgagctgcgtgtggcagtgagcacagaagagaaatgcagggaaatagggaagaaaagttgacttctttcttgacactggattgtgggttttctttcaaccaaatagtcccctcttaacttcccctttttaaaatattttgctacagtgtccaaccccaccccccgggaacaaatctctgagtctttcctgcctcctcggtgccctttgcttacttggccgtccctctgcacctcaatccctgttcaacgctttgggaacaatgacttatatttgagctttgatttggggagttgggggggagttatatttattcaacgactggttatcatccactgcctacgtgacctcgggcggtaatgaaccatctctgagcctcagattcttcctttgccgactgttgtcacaaatcccactcgtgacagtggttgtacggtcagtggtgctggaacattaggaggggctcatttgtgcctgatttccagaccagggtaagacctgaggtgtttgggacataagaggatcttggcgttggactccacagtctacgtaggtgattgatgtgtccactctggatctcacatctgaccctaatggatagatggacgtgtatttgtccatctatctgggcatttctgaaatacccagagcatcaatgtcatgagcagaaaaagagatgtggaagttcccaagtgtagatggatccacaggaaagaacagaggccacaggtgagatgccacagggacctgggaccatcaagggctcattagggtggaggtttccaccactgagtggagccaggagaggaacctcgggatctgcaatgacagtgaggggctcagggctccagaccaaggtgggaggctgcgtcctccagctacacctgaggctggagtggaccccaagcagcccaggggaattccctcaagggagtgcaccaaaccgtccagtgacagagctgctgggattccaaagaaagaagcactaaacaccagggtgttcatagatcatttattagggagacttctgcacagtggggcaccctcgtctccttgcccagtgtctccttgtggatctcaaggatgtgcttccacatagcagcatcttcttcagatggacaaggagacactgggtgttctacccgaagctttaacttaaaataaaaataaaaacaaaaataaacccctagagaatatgatctctcagtagagttgtttcttgggatacacaggcaattcgtttcagtacccgctacatgcaccaacacctgctcgtactccagccccgacattgtctctgctgggcctgcatataggaaaagtctgccgttcatatacacaagtcttgcatcccacaaatgctacagttttgacccccgtttggttgaaaaaagtgtgcatataagagaccccaggaattcaaggctgcgttgctccagggttgtctggattttgagtttatttgggagtgagaagcaaggattacaatctggagtgcatggcatggcaagccacagtgtgtccggagagggaagtgtgatgttgtgatacacactggttttcacctgcggttcctggctcatagctccatagcccttgttacagtcttttgttataacattggctgtgttaggccttaggggaggcctctgacctcctcctgcccttccttcacctgcccaaggcaagactctaatgtccctgcctttctgatggtggctcttaagaccctcccagaagatggtctcagcctgttccttgtgggaggaaatactgacatcatgaagcttcataaaaacccaagaagactgggtttcgtgggtttctgggtggttgagcatgtggagactcctggagggtgatgcccagggagggtatggaagccctgcgccccttcccccatgcctcctcctatgagtctcttcatctgtgtcctctgcagtgtgctttgtattcaaccaggaaacgtcagtgtctctctgagttctgtgagctgctacagcaaattaatcaaacccaaagaggtggtcatagggtccccaacttgaagccagtcagtcagaagttctggaggtctggacttgggaatggtgtgggggcagtgttggggac

SEQ ID NO: 1560620 - DNA, 4001 bp, Homo sapiens
ttataggcatttattccattgcatttacttgataaacttatttaatagtttacctagattatttatgaacactgtgacagtcatcacttaaagttaattccctgttaaccaatgttataaactatgaatttcaggtgtttacctaagtaagggaacttatggttaaatataaagttattttttttaaccaatatctcagtagttagctgtttttatttaaccaacaatattacatggcttatttattaaaaattatacaagcaaagatcattctgttttgggctgggtttataattttgttttgtgtgtgtcaggctgctcttgaactcccaacctcaggtgatccaccagcctcggcctcccaaagtgctggggttacaggcgtgagccaccgtgcccggccaggtttatagttttataacccttatggaaaatcttatactattctgcagggataagcacaaaaccacttgtgcaataagtgcaaacaaaaacgctaacaattcttaagacatttctaatcttattttaccaataattttaaagccagcttatttattaaagattttacttaagtgaacttgaagaagcatcttgtcctgataaagtatttgatttaagcacttttattctctttaagccaattaattagagctcttttgtatatttttagtagtgaaacattatgtacaccacacacagattcatggacgcattaggcatgctgatagaagtacatcttatagattcaaaaaacctcttttttttctatctcaaactttcaaactctttttttttctttttttctttttttctttttttttttttttgaggcaggggctcactctgtcacccagactggaatgcagtggcatgatcccagctcactgcaacctacatctcccatgctgaagtgattctcctgtctcagtctcccaagtagctgggattacgagtgtgccactactgcctggctaagttttgcatttttagtagagacagggattcaccatgttggccaggctggtcttgaactcctgatctcacatgagtcacctacctcagcttcccaaagtgctgggaatacaagtgtgagccaccacgcccaaccctttcaaactcttcataacctgtttccttaccccaggcagttgtcagctaaataaccctaaatttccatgttacaggaaacactttttaggagaaaaaatcagcaaaacttacatctcaaagtacagaggaagaagtctggtgtgttagagggaaattaaaatgggttcactgccaattaaacataaaattatacaaatctatcataaaggcttttaaacacacacacaccacacacacacacacacacacacacacacacacacagacatcctgtagcttttacttcaaaactctagccatgagatattaatataaatttaccagcttgcaaaaaaaatttggatctaaacagtggtttttatctcagtagaaaggtaacagcagatgtaaagcaggcagaaaagaaaatagagaaagagagaacttaggaactctatagcgtgcaagccgccattagggctctcttaccttgatgtaaatgtgcacaaagaccataatatttttgttttacacaaactccagaaagtagaggcgccataaaaccaatggagtgcccacaagggggtcactcttcttgctttctcctcattcttagattatttgtttcccactttttcttttcttttcttttctgttcctcctctcctctcctcttttctcttctcttcttaaaggaggaagtgagctgtgggctagaggtttgtgcagtgggtcacagtgtgctggttgtgggtgggactccacagggtctcaccactgagtcatttcttccctctcatgtgtctcagtttctctctcggaaggtctaaacacctccaggagggcccaaaatgcagagtgaccagctcccatatgtgcttcctggacaagcctttttaaaactcattttgttgggtgttccctgtaggccactcacatcacgatggggtccatccacccccagacattcccacaagcacccctcatcacttcccacattttggctgggaggagcaaaatgccctttcttttttaagctgaggaaacacagtctctcgtttccctatgaaaacaacagttcagttcctcatgcaaatgtgaacagacaagccaaatcgagattaatttggggagaaaagcaatggagaagaccctttagaatgtatctcccaactagaagtaggatccttaaacaacaacttcctagaaagaaaaagaaatagtagatcagaataaataaagggccgtcaaccaaagggaggtcggggctcaggaggacttaccacttctggcagagaagaagctcaaaatcctggaggctttcagtgggcccctgctggtaccttagctccaggttgagacaactcctttggggtcctgagtcttatctgaggcctcacgtgttcaggcaccaaattattgtggacaaaaagagtcaaactctgtaatatattagaagagatttttctgagccaaatatgagtgatcagcactcaggaggtcctgagaacatgtgtcccttgactttttaataatagccattctgacaggtatcagatggtatctcattgtggttttgatttgcatttctctcatgatcagtgatgttgagctttttttatatgattgttggccacatgtatgtcttcttttgaaaagcgtgtgttcatgtcgtttgcccacattttaatgtggttgtttgttttcttcttgtaaattggtttaagttccttaaagatactggagagtagacctttgttagatgcacagtttgcaaaaactttctcccagtctgtagattgtcagtttactctgtttacagtttcttttgcagtgcagaaaccctttggtttaattagatctcatttgtcaatttttgcttttgttgcaatttcttttggcattttagtcataaaatctttgcccgtgcctgtgtcctgaatgtattgtctaggttgtcttccaggtttttatagttttaggttttacatccatcaatcaatccatcctgagttagtttttttgtatatggtgtaaggaaggggtccagtttcaattgtctgcatatggatagccagttatcccagcacagtttgttgaatagggaatcctttccccatcactttttttttgtcaggtttcctaaagatcagatagttgtaggtgtgtggttttatttgtgggttttctattctgttccattggtctatgtgtttgtttttgtaccagtaccatgctgttttggttactgtagccctgtagtatagtttgaagtcaggtaacataatgcctccagctttggttttcggtttttgtttttgcttaggcttgccttgactatttgagctctttttgggttccatatgaatttttaaatttaaaacttttggttccatatgattcttctagttctgtgaagaatctcaatgataacttaatacaaatattactgaatctataaatggctttgagcactatggccatttttaagatattgattcttcctattcatgatcatggaatatttttccatctgtttgtgtcatctctaattttttgagcagtgttttatagttctccttgaagaaattgtccaccctcctagttagctgtattcctaggtattgtgtgtgtgtgtttgtgtgtgtgtgtgtaaactgtaaatgagattgcattcctgatttggctctcaacttgactgttattggtatataaatgctagtgatttttgcacatttattttgtatcttgagtctttgctgatgttgtttatcagcttaagaagatctcaggttgatgtttgggttgatgttttctagatacaggatcatttcatctgcagcaaagatagtttgacttcctctcttcctatttgaatacgccttatttttttctcttgcccaattgcc

SEQ ID NO: 1560621 - DNA, 4001 bp, Homo sapiens
gtgcctcaccactgctgatcttcctgtgtctctggccccaggacccctgagccctctcgccccaacatcatcccacctggaactgccctgagacacggctgctccccacctgcctggagactcagggagactcagggaactccagacaatgctgtgaatttctcacctgggaccaggagctccaggagatcactgggtgaagaccacacatagggagagttcaagtcataaccatagcacctgtgcgaccacctgcgattcgggctcacggggcccacggagaagatggcgcgggacgacccacgggcatggggctgggagttcaggcattgtgggtgttcatcttctccttccttacacagaatgaagccgccaaatgccacctgtgactcacactggagggtcacccttcctcctgaggtcaccacagggctgggctgggctgagagggtgggttttgggtaggctcctaggagagaaggaggcatcgtgttaaatggggctcccacctcccacatcatccccagggctgggctgtgagagggagacacccctgagagcctccttcctgagggcagagcctggggctgggatccctgagtgtcctctcacctgtcatcaccagcaccagggggtcactgagctcagaccaccgagcgcggctgtaatactgacagccatatcgccctgtgtgttcccaggtgatggatgggatgtggaactggccgttcttcacaagctctggtcgtatccgtgtaatccaagatgctgattttttctccctatatagacggtactcctgggcttcaaggctcccctgacaactgagggtgacgggactcccctgggtgatcacagagtctggctcagcccacagggtgggcttggggatggtccctggaaggaaatcaaaggtcagattcgaagtcatttcccacccaacagatctcagctctcagcccaggaccctccagatgcccccatcagtcagtccagaacttctaatccccatccccagctgcacggaggtggccccttgtccccagtgaggaggagggacctgggagagctggggacagactcacctgtctgcacgcgggtcctggggcccagactcagccctggaagagagttccctgtgagggatttgccccctgaagcctgagcaggtcctcccctccctgggatctttgtgagcccctggggtctccttagggaccagagtttggctgtggggtgaggtccctcctaggttagaagctcccctctctcttcaaatctcaccgagacagatcaggactgtgacgatgggggtcatggcgtctcctcccactgccctgctctgcggatggatgagccctcggtgctggcgggacagagacacacagagagaaatagcctcccctccttcccaccctgtgtggacactcagaggctgggtccttctcatggggtgttgtcatctgcagccacacaagaagcggaactgccctcccaggagcctgactctcattcttttagagctgaggtgggggcaggcactgggccctctgcagacatttcagactgtaatggggtctttcctgacccccagccactgtctgtctggtttctcctcgtctcaccgagagccgggatgtagcagcaaatagaactggtgcttcttgtgtctgcccttcctgatgagggtagcagtggcttccccttccttctcacagcttcccacatggtcaccctccctccttcagcccatccatcagcacagcgttgtggggtccttaccatggcagtcgtccctccagccctggagatgcttcagggaagacccaggtccatgctgcaggcagactcagatcagcagagaagcatctcgcctctggctgtgctgtccaggttgagctgtgtgtggcagtgagcacagaggagaaatgcagggaagtaggggaagaaaagttgacttctttcttgacactggattgtgggttttctttcaaccaaatagtcccctcttaacttcccctttttaaatgtttttgctccagcgtccactccctcccccccgggaagaaacctctgagtctttcctgcctcctcggtgcccattgcgtccttagccgtccctctgcacctcaattcctggtcaacattttgggaacaatgacttatgtttgagctttgatttggggagtgggggagggagttgatatttatttgatgactggttatcatccgctgcctacgtgaccttggtttgtaatgtcccatcactgagcctcagtttcttcctttgcagattgttgtcatgaatcccactcgtcacagtggttgtggggtcagtggtgcctgggacattgggaggggctcatttgtgcttgatttccagaccagggtaagacctgaggctttgggacgtgagaggatcttgctgttggactccacattctgtaggtgattgatgagtccactcaagatgtcacatctgaccgtaatggagaaacgtatgtgtagcatttctgaaatacccagagtatcaaggtcatgagcagaaaaagacatgtggaaaccccaagtgtagacggactcacaagaaagaacagaggccagaggtgagatgccacagggtcccgggaccatcaagggctcattagggtggaggtttccaccactgagtggagccgggagaggaaccccgggatctgcaatgacagtgaggggctcagggctccagaccaaggtgggaggctgcgtcctctagctacacctgaggctggagtggaccccaagcagcccaggggaattccctcaagggagtgcaccaaactgtccagacctgctggaattccaaggaaagaagcactaaacaccagggtgttcatagagcatttattagggggacctctgcacagtggggcatccttgtcttcttgcccagtgtctccttgtggatctcaaggatgtgcttccacatagcagcatgttcttcagatggacaaggagacactgggtattctatccaaagctttaacctaaaataaaaacaaaaccaaaaataaacccctagaaaatatgatctctcagtacagttgtttcttgggatacacaggcaattcgtttcagtaccccctacatgtaccaacacttgctcgtactccagccctgacgttgtctctgctgggtctgcatataggaaaagtctgccgttcatatacgcaagtcttgtttctcacaaatgctatagttttgatccccgtttgtttggaaaaagtgtgcatataagagacccctggaattcaaggctgcattgctccagggttgcctggattttgagtttatttgggagtgagaagcaaggattacaatatggagtgcatggcatggcaagccacagtgtgtccagagagggaagtgtgatgttgtgatatatgctggttttcacccgcagttcctggcttgtaactcccatagcccttgttatagtcttttgttataacattggctgtgctgggcctcaggggaggcctctgacctcctcctgcccttccttcacctaacccaaagtaagactcgaatgttccctgcctttctgatagtggatcttaagaccctcccagaagacagtctcaccctgttccttgtgggaggaaatgctgatgtcatgaagctttcataaaagccccagaggactgggtttcatgagtttctgggtggctgagcatgctaaggctcctggagggcgacgcccagggagggtatggaagccccgggcctcttcccccatgcctcctcctatgagtttcttcatctgtgtcctctgcagtgtgctttgtattcaaccaggaaatgtcagtgtttcctgagttctgtgagctgctacagcaaattaatcaaacccaaagagtggggcatgggatccccaacttgaagccagtcagtcagaagttctggaggtctggacttgggaatggtgttgggggcagttttggggaatgggccttcaatct

SEQ ID NO: 1560622 - DNA, 4001 bp, Homo sapiens
tgtactggcccccgtaggagcggctcacagggcccagggtgaagttggcctgggagagcccagcctggggctgccggccagggagctggcgaaggtcacgttccccctccttgtacagaacaaatctgtcatagccgacatcagagacacactggagggtcaggctttccccaggggccatgacaggacccggctgcactgagagtgatggcttcttagaaacacctgggaaaaggtgctcatggtttccaggagccgaccctcaggcttccccacaaaccctccctctcccccggtgcctcaccactgctgatcttcctgtgtctctggccccaggacccctgagccctctcgccccaacatcatcccacctggaactgccctgagacacggctgctccccacctgcctggagactcagggagactcagggaactccagacaatgctgtgaatttctcacctgggaccaggagctccaggagatcactgggtgaagaccacacatagggagagttcaagtcataaccatagcacctgtgcgaccacctgcgattcgggctcacggggcccacggagaagatggcgcgggacgacccacgggcatggggctgggagttcaggcattgtgggtgttcatcttctccttccttacacagaatgaagccgccaaatgccacctgtgactcacactggagggtcacccttcctcctgaggtcaccacagggctgggctgggctgagagggtgggttttgggtaggctcctaggagagaaggaggcatcgtgttaaatggggctcccacctcccacatcatccccagggctgggctgtgagagggagacacccctgagagcctccttcctgagggcagagcctggggctgggatccctgagtgtcctctcacctgtcatcaccagcaccagggggtcactgagctcagaccaccgagcgcggctgtaatactgacagccatatcgccctgtgtgttcccaggtgatggatgggatgtggaactggccgttcttcacaagctctggtcgtatccgtgtaatccaagatgctgattttttctccctatatagacggtactcctgggcttcaaggctcccctgacaactgagggtgacgggactcccctgggtgatcacagagtctggctcagcccacagggtgggcttggggatggtccctggaaggaaatcaaaggtcagattcgaagtcatttcccacccaacagatctcagctctcagcccaggaccctccagatgcccccatcagtcagtccagaacttctaatccccatccccagctgcacggaggtggccccttgtccccagtgaggaggagggacctgggagagctggggacagactcacctgtctgcacgcgggtcctggggcccagactcagccctggaagagagttccctgtgagggatttgccccctgaagcctgagcaggtcctcccctccctgggatctttgtgagcccctggggtctccttagggaccagagtttggctgtggggtgaggtccctcctaggttagaagctcccctctctcttcaaatctcaccgagacagatcaggactgtgacgatgggggtcatggcgtctcctcccactgccctgctctgcggatggatgagccctcggtgctggcgggacagagacacacagagagaaatagcctcccctccttcccaccctgtgtggacactcagaggctgggtccttctcatggggtgttgtcatctgcagccacacaagaagcggaactgccctcccaggagcctgactctcattcttttagagctgaggtgggggcaggcactgggccctctgcagacatttcagactgtaatggggtctttcctgacccccagccactgtctgtctggtttctcctcgtctcaccgagagccgggatgtagcagcaaatagaactggtgcttcttgtgtctgcccttcctgatgagggtagcagtggcttccccttccttctcacagcttcccacatggtcaccctccctccttcagcccatccatcagcacagcgttgtggggtccttaccatggcagtcgtccctccagccctggagatgcttcagggaagacccaggtccatgctgcaggcagactcagatcagcagagaagcatctcgcctctggctgtgctgtccaggttgagctgtgtgtggcagtgagcacagaggagaaatgcagggaagtaggggaagaaaagttgacttctttcttgacactggattgtgggttttctttcaaccaaatagtcccctcttaacttcccctttttaaatgtttttgctccagcgtccactccctcccccccgggaagaaacctctgagtctttcctgcctcctcggtgcccattgcgtccttagccgtccctctgcacctcaattcctggtcaacattttgggaacaatgacttatgtttgagctttgatttggggagtgggggagggagttgatatttatttgatgactggttatcatccgctgcctacgtgaccttggtttgtaatgtcccatcactgagcctcagtttcttcctttgcagattgttgtcatgaatcccactcgtcacagtggttgtggggtcagtggtgcctgggacattgggaggggctcatttgtgcttgatttccagaccagggtaagacctgaggctttgggacgtgagaggatcttgctgttggactccacattctgtaggtgattgatgagtccactcaagatgtcacatctgaccgtaatggagaaacgtatgtgtagcatttctgaaatacccagagtatcaaggtcatgagcagaaaaagacatgtggaaaccccaagtgtagacggactcacaagaaagaacagaggccagaggtgagatgccacagggtcccgggaccatcaagggctcattagggtggaggtttccaccactgagtggagccgggagaggaaccccgggatctgcaatgacagtgaggggctcagggctccagaccaaggtgggaggctgcgtcctctagctacacctgaggctggagtggaccccaagcagcccaggggaattccctcaagggagtgcaccaaactgtccagacctgctggaattccaaggaaagaagcactaaacaccagggtgttcatagagcatttattagggggacctctgcacagtggggcatccttgtcttcttgcccagtgtctccttgtggatctcaaggatgtgcttccacatagcagcatgttcttcagatggacaaggagacactgggtattctatccaaagctttaacctaaaataaaaacaaaaccaaaaataaacccctagaaaatatgatctctcagtacagttgtttcttgggatacacaggcaattcgtttcagtaccccctacatgtaccaacacttgctcgtactccagccctgacgttgtctctgctgggtctgcatataggaaaagtctgccgttcatatacgcaagtcttgtttctcacaaatgctatagttttgatccccgtttgtttggaaaaagtgtgcatataagagacccctggaattcaaggctgcattgctccagggttgcctggattttgagtttatttgggagtgagaagcaaggattacaatatggagtgcatggcatggcaagccacagtgtgtccagagagggaagtgtgatgttgtgatatatgctggttttcacccgcagttcctggcttgtaactcccatagcccttgttatagtcttttgttataacattggctgtgctgggcctcaggggaggcctctgacctcctcctgcccttccttcacctaacccaaagtaagactcgaatgttccctgcctttctgatagtggatcttaagaccctcccagaagacagtctcaccctgttccttgtgggaggaaatgctgatgtcatgaagctttcataaaagccccagaggactgggtttcatgagtttctgggt

SEQ ID NO: 1560623 - DNA, 4001 bp, Homo sapiens
gtgtgccacggatctgtcctggagagaagaaggatgggtgaggggctgccccaccttgctctgagctgagacctccccaggcctctctaggagcctctgtctctgttttctctgagtcttcccctccccacccatcccctgtctctctctctgtctctccctcccttgggaccaccccccgcctcatcctggccatcactaattggattcccccggcagggcctgtgcagagtctgggtccctgactgaacccgctgggctcctcacctgtgatcaggatgtccagggggtcgctgggggccgagcactcagaggagaggttgtgtgcaccgtagcatctgtactggcccccgtaggagcggctcacagggcccagggtgaagttggcctgggagagcccagcctggggctgccggccagggagctggcgaaggtcacgttccccctccttgtacagaacaaatctgtcatagccgacatcagagacacactggagggtcaggctttccccaggggccatgacaggacccggctgcactgagagtgatggcttcttagaaacacctgggaaaaggtgctcatggtttccaggagccgaccctcaggcttccccacaaaccctccctctcccccggtgcctcaccactgctgatcttcctgtgtctctggccccaggacccctgagccctctcgccccaacatcatcccacctggaactgccctgagacacggctgctccccacctgcctggagactcagggagactcagggaactccagacaatgctgtgaatttctcacctgggaccaggagctccaggagatcactgggtgaagaccacacatagggagagttcaagtcataaccatagcacctgtgcgaccacctgcgattcgggctcacggggcccacggagaagatggcgcgggacgacccacgggcatggggctgggagttcaggcattgtgggtgttcatcttctccttccttacacagaatgaagccgccaaatgccacctgtgactcacactggagggtcacccttcctcctgaggtcaccacagggctgggctgggctgagagggtgggttttgggtaggctcctaggagagaaggaggcatcgtgttaaatggggctcccacctcccacatcatccccagggctgggctgtgagagggagacacccctgagagcctccttcctgagggcagagcctggggctgggatccctgagtgtcctctcacctgtcatcaccagcaccagggggtcactgagctcagaccaccgagcgcggctgtaatactgacagccatatcgccctgtgtgttcccaggtgatggatgggatgtggaactggccgttcttcacaagctctggtcgtatccgtgtaatccaagatgctgattttttctccctatatagacggtactcctgggcttcaaggctcccctgacaactgagggtgacgggactcccctgggtgatcacagagtctggctcagcccacagggtgggcttggggatggtccctggaaggaaatcaaaggtcagattcgaagtcatttcccacccaacagatctcagctctcagcccaggaccctccagatgcccccatcagtcagtccagaacttctaatccccatccccagctgcacggaggtggccccttgtccccagtgaggaggagggacctgggagagctggggacagactcacctgtctgcacgcgggtcctggggcccagactcagccctggaagagagttccctgtgagggatttgccccctgaagcctgagcaggtcctcccctccctgggatctttgtgagcccctggggtctccttagggaccagagtttggctgtggggtgaggtccctcctaggttagaagctcccctctctcttcaaatctcaccgagacagatcaggactgtgacgatgggggtcatggcgtctcctcccactgccctgctctgcggatggatgagccctcggtgctggcgggacagagacacacagagagaaatagcctcccctccttcccaccctgtgtggacactcagaggctgggtccttctcatggggtgttgtcatctgcagccacacaagaagcggaactgccctcccaggagcctgactctcattcttttagagctgaggtgggggcaggcactgggccctctgcagacatttcagactgtaatggggtctttcctgacccccagccactgtctgtctggtttctcctcgtctcaccgagagccgggatgtagcagcaaatagaactggtgcttcttgtgtctgcccttcctgatgagggtagcagtggcttccccttccttctcacagcttcccacatggtcaccctccctccttcagcccatccatcagcacagcgttgtggggtccttaccatggcagtcgtccctccagccctggagatgcttcagggaagacccaggtccatgctgcaggcagactcagatcagcagagaagcatctcgcctctggctgtgctgtccaggttgagctgtgtgtggcagtgagcacagaggagaaatgcagggaagtaggggaagaaaagttgacttctttcttgacactggattgtgggttttctttcaaccaaatagtcccctcttaacttcccctttttaaatgtttttgctccagcgtccactccctcccccccgggaagaaacctctgagtctttcctgcctcctcggtgcccattgcgtccttagccgtccctctgcacctcaattcctggtcaacattttgggaacaatgacttatgtttgagctttgatttggggagtgggggagggagttgatatttatttgatgactggttatcatccgctgcctacgtgaccttggtttgtaatgtcccatcactgagcctcagtttcttcctttgcagattgttgtcatgaatcccactcgtcacagtggttgtggggtcagtggtgcctgggacattgggaggggctcatttgtgcttgatttccagaccagggtaagacctgaggctttgggacgtgagaggatcttgctgttggactccacattctgtaggtgattgatgagtccactcaagatgtcacatctgaccgtaatggagaaacgtatgtgtagcatttctgaaatacccagagtatcaaggtcatgagcagaaaaagacatgtggaaaccccaagtgtagacggactcacaagaaagaacagaggccagaggtgagatgccacagggtcccgggaccatcaagggctcattagggtggaggtttccaccactgagtggagccgggagaggaaccccgggatctgcaatgacagtgaggggctcagggctccagaccaaggtgggaggctgcgtcctctagctacacctgaggctggagtggaccccaagcagcccaggggaattccctcaagggagtgcaccaaactgtccagacctgctggaattccaaggaaagaagcactaaacaccagggtgttcatagagcatttattagggggacctctgcacagtggggcatccttgtcttcttgcccagtgtctccttgtggatctcaaggatgtgcttccacatagcagcatgttcttcagatggacaaggagacactgggtattctatccaaagctttaacctaaaataaaaacaaaaccaaaaataaacccctagaaaatatgatctctcagtacagttgtttcttgggatacacaggcaattcgtttcagtaccccctacatgtaccaacacttgctcgtactccagccctgacgttgtctctgctgggtctgcatataggaaaagtctgccgttcatatacgcaagtcttgtttctcacaaatgctatagttttgatccccgtttgtttggaaaaagtgtgcatataagagacccctggaattcaaggctgcattgctccagggttgcctggattttgagtttatttgggagtgagaagcaaggattacaatatggagt

SEQ ID NO: 1560624 - DNA, 4001 bp, Homo sapiens
atcaggatgtccagggggtcactgggggccgaccactcggaggagaggttgtgtgcaccatagcacctgtactggcccccgtaggagcggctcacagggcccagggtgaagttggcctgggagagcccagcctggggctgctggccagggcgctggaggaagtcacgttccccctccttatacagaacaaatctgtcgtagccgacatcagagccacactggagggtcaggctctgcccaggggccaggacagggccctgcagggtcaggagggagggcttcctagacacgcctggagggaaagaggagccaggactgagagggctggttcctcccacgccccttccttctcccgtcctggccctgcaggtctcactgtctctcacgctctgagtctctgaccccagggcctccttctcacccggggctgtcttggagtcatttcagaggagtggggtctccctagccctggccactgtgcctgatctttcctcctctccctgagagctgggacctcacagcaaacacaccgatgccttcctgagtcctccccttccaggtgaacgtggtcaagggctcctcctcccatgtcagagcctccccatggggtctccctcatgccttcagcccgtccttcaacacatcactctgggtcctttccagattcagtcaccagccaaactccccacaacctgtcagctgccccgaaagtgtgttagacaaggccgtggctccctcacctgagggcagaatctccagggggtcactggggtgggaccacacccagggggtgtttgtataatagtaatagcatgtgaacctccacctgtggctgggggtcacggggcccacagggaacagggcctggaaccccccactgtggagctgctgtgagtccagggtccgggggagctggtgttctccttccttcatcagaacaaaatggtgatatcccttctgtgagccacatcggagggtcatattcccccctgaggccaccacagggctgggcagggctgagagggtgggtttgttgtagaatcctaggagagaaagaggcaccgtgttaaatggggctcccacctcccacatcatccccagggctgggctgtgagagggagacgcccctgagagccgacccccttcctgagggcagagcctggggctgggaccccagagtgtcctctcacctgtcatcaccagctccagggggtcgctgggctctgaccagcctgcagagctgtaatagtggcagcggtatctccctgcatggtgctgtgtcatggatgggatggagaatctggccttgttcttgggttccagtgggttatttctgtcccagggctctgggcttccctctttatccagttggtactcctgggcctccaggctcccctgacaccagatggtcacggggctcccccagctgatcacagagcctggctcagcccagagggtgggtttggggaagggccctagatggaaatcagaggctggatcccaagacatccccacgctcagatcccagctcccagccccaggacttccccatcatccccatcagtcacccagaactactgtctcctcccccagctgcccatgggtggccccctgtcccagtgaggagtagggacctgggacagctggggacagactcacctgcctgcatgcgggtcctggggcccagactcagccctggaagagagttccctgtgaggcatttgccctgaagcctgagcaggtccccgcccgggtgcctcctgagcttttgaggtctcctgatggaccagggcttgtgtgtggggtggggttcctccaagactcggatctccccctccccatcttgaaatctcaccaaggcagagcagggctgtgagggcgggcgtcatggcgtctcctcccggtgaccccgcgctctgcagagggatgagccctcagtgctggcaggacagagagacacacagggtgtggccgctcggaggctgggtccttcttgtcatggggttgtctcatcctcagcccacaggaagaggaactgccaccccaagaacctggctctgatttccccagggctgaagtgggggcaggcaccaggctctctgcaggcatttcagagagaaatggggtctccctgcccccgggccactgtctgcctgatttatctttatctcactgaggacggggacacagccgcaaatagacctggtgccttcctgagtcagcccctttcaggcgagggtgaccgtgggctcctcctccctctcagagcctccccatggggtctccctccctccttcagctcgtccatcagttcagcgttacggggtccttaccatggcagtcgtctctccagccctggagatgcttcagggaagacccaggtccatgctgcaggcagactcagatcagcagagacgcacctgacacctggctgtgtagtccaggctgagctgcgtgtggcagtgagcacagagaaatgcagggtctaccgtggtggctcatgcctggaatcccagtacttcaggaggctgtggcgggtgatggcttgaggccaggagcttcagacagtcctgggaaacagactgtgaccctgtttctacagaaaagaaaaaagtgagctgggcatggaggctcatgcctgtggtcccagctactcaggaggctgaggtgggaggatcacttgggcccgggaggcggaggcttcagggagctatgatcaccccttggccttccagcctgggcgacagagcaagatcctgtctaaaaaggagaaatagaggggataaagagaaatatatatatatatgtttcattgtaatctataatctgattctggggaaggtgagctgatttgtatttaattcctgattatcatctagggtttatgtgactttggacatgaatgtcacctctgagcctgctgtcatgaaccccactcatcacagtggctgtgggggtcagtggtgcccaggacatgggaggctcagccatggtgaatttccagaccagttcagacaggagggtggggacgggagaggatcctggtgctgggctccacagtcgaggaggatgattgacgcccccactcaagagcccacatcggctccaaataccatgaaattctccttgtgatacgtctgaaatatgcagatcatcacagccacaggcagagaaagaggaaaaacagttcctcacattgagacgcatccccttccatgagcagagttcaatgctgagtggccacaggtgtctgggaccaccgagcgtcattagggaggaggaggctcccacctccatgtgggacagaagaggaaccccacgtcctcccaggcagggaggggtcagggctctgggtgaggctggaagcggtggctccccctcccctgtgtgtgtggacaggcgctggggggtctctgctcactcactggaggccacggtcagcgctcagcccctcccctgtgtgtgagaaacagattcgatccacggtggtcagacatgggcgtctgccccacaggtgagtgtgaggctggcgttggtcccatcgctgctgggcacaatcttgagctgacactgagtttgggggagtggggcaggagcagcggcaacaatccccttcatcaggctgatgcctggacagccgtgggagaaaccctttatgaaaggccaggtgcgtgggaggagccgccccacaggaatgacaaccgtatgaggacaaaatagacagttgttgaaatgcattagacagacatcgtgaaggtgaaaaactatattaaattaacgccattaaaaaggaatttatgtctgggcatggtagttcatgcctgtaatcccagcactttgggaggtggaggcgggcagatcacttgaggctaggagttcgagaccagcctgggtgacatggtgaaaccccatctctactaaaaatacaaaaaattatctgggcgtggtggtgagtgcctgtaatcccagctactcgggaggctgaggcaggagaatctctt

SEQ ID NO: 1560625 - DNA, 4001 bp, Homo sapiens
gcctgggaccctccaaggatcctgggtagaaggacaagaggagggtgagagtctggggttgcccttgggtctccacatcaaattgaacctctccctatatctgccctgcagcttcccaaggaccatttctctgtccacctggcaccttctggaccctaggtgagggagaagagcatgggcatgcctgggagggcccctgttgtcctcctcccctctgagggctgagtcccccactggctgagcccctctccctccatccctgcccagagctctcctggcagcagggcatgaacggagccactgagctcagagaggacagggtcaggagcctcacctgagactatgagctccagggggtcactggggtgtgacagcaggtagtgggagaagccgtgtgagctgaagcacctgtaggtccccccgtgcactgaggtcacaggactcatggggaattcagcctggtgctgctgagctccgtgctctgatctcagatgcagtaggggatgggctgcccgctccttgatcagaagaaaagtgtccattgggctccgtgactgacacagcagggtcacgctctttcctgaggtcacaagaggactcggcagggctgaaagggtgggtttactgtaggctcctaggagagaaggaggcaccgtgttaaatggggctcccacctcccacatcatccccagggctgggctgtgagagggagatgcccctgagagctgacccccttcctgagggcagagcctggggctgggacccctgagtgtcctctcacctgtcatcaccagctccagggggtcactgggctgtgaccagcctacagggctgcgatagtaacagcggtatctccctgcatagtcctctgtcatggatgggatggagaatctggccttgttcttgggctccagtgggttctgtctgtcccagggtgctgggctttcctctttatccagacggtactcccgagcctccagggtcccctgacaccagatggtcacagagttcccccagctgatcacagagcctggctcagcccagagggtgggtttggggaggggccctggaagaaaatcagaggctggatcccaagaccttcctcagccctcagatcccagctctcagccccaggacccccccgtcatcctcatcagtcacccagaactgctgtctcctcccccagctgcccatgggtggccccttgtcccagtgaggaggagggacctgggacagctggggacagactcacctgcctgcatgtgggtcctggggcccagactcagccctggaagagagttccctgtgagggatttgccccggaagcctgagcaggtcctctctttaccctgagatttttttttttttttttttttgagacggagtctcgctgtcacccaggctggagtgcggtggtgcgatcttggctcactgcaagctccgcctcccgggttcacgccattctcctgcctcagcctcccgagtggctgggaccacaggcgcctgcaaccacccccggctaattttttgtatttttagtagagacagggtttcaccgtgttagccaggatggtctcgatctcctgacctcgtgatccgcccgcctcggcctcccaaagtgctgggattacaggcgtgagccaccgcgcccggctaccctgagatttttgagtctcctaaagaaccagggcctggctgtgaggcaaatttcctccaagactcgggtctcccctccccctctttaaatctcaccgaggcagagcagagccgtgaaggtggggatcatggcgtctcctcccaggggccccagctgtgcagatggatgagtcctcagtgccggcaggacaaagagacacacagggtgtggccgcttggaggctgggtccttctcgtcatggggttgttccatcagcagcccacaggaagggaaactgccctcatttgaaccccagcctggctttcatttccccagagctagggctgaggcaggcaccaggttctctgcagacatttcagacagaaatggggtctctctgatcccagcctgctgtctgcctggtcttaattcctctcttgaccaaacatcaacccgtatgtatcgtgtgtttgcaaagcgcctgacactgggggtacatcattgaacaagtgaaaaaaaaaaaaaaccaaaaacctgcattttcagggtacagatgaaccataaagcttccttttgctgccataacaaatcaccacaagcttagtggcttcacataatgtaggtttattgacttaccgtcccggaggtcacaagtccaaaatgggtctccctgggctaaaatgaagctgctatcagagccgtgtcctcctggaggctccaaggagaatctgttccctcgcctgttcaagcctctgcaggctcccgcattcctgcctctccattccctccaacctcaaagccaccagtcccgttatctgccccctgcttccatgcactcacctccttctctcactctgaccctcctgtcttcctctttcacttactcagccccttgtgattacatcaggcccacctgggtaatctccccaacccaagatccttgacttaatcacatctgcaaagtcccttttgccacataagcttccccaactcacagggtctgggcctcaggaggtggacatctctgggaggtcactattctgcctcccacaggccttcagggactcctttaaccaaatctcacatagagcacttctctgcgatgacggagagtggctgggcacgccagtcgaatgcttggtgggccagtacgcagccaggtcatggtcggctactcatgtcccatgggacctgcccacttgaggccaaacattccatctccaccagagcccggtagacatctaaaaactgtgtcgcaaaacaaaactcattctctgcagcgctagcacgatgtagctccaaaatatatatatatattttttcttttctgagatgcagtctcactctgtcgcccaggctagagtgctgtggtgtgatctcagctcactgcaacctccgcctcctgggttcaggagactctcctgctttagcctcctgtgtagctgggattacaggcacccgccaccactcacagctaatttttgtatttttaatagagatggggtttcaccatgttggccaggccggtctcgaactcctgacctctggtgatccgcccatctcagcctctcaaagttgctggggttacaggcatgagccaccacgcccagccaagcatagattttaaatgttttcacagatgttagtatgcggagtgatggacatgttaactgtcttgattccatcattccacagtgtatacatttataacacattgtaccccataaatatatatagttggtgaattaaatatttagtaaaattattttgaaaaggaaaaaagccataaatacataacaagcaagcaaaaaggccagatagcttcaacccttagatcactgcctgtgtaaaacacttcaggtggccagctctcaataatcatccatttgagtgggcacgtcctgcaatgatctggaattgtagtctgtcctagatggtgactaaccattttctgtctctgttcttcttaaaaggatgagaggaccttctaactttagaactgaaacatagggtgggaggggaaagaggaagcagaaaaaacaaaccccaaattaattgtatctaacggtcaggaaggcaaagaaggagaggcttgcaggaggctgaaagtcaaagtgccgggaaacgcatgaacaccactgccctcaggtttccaagcacctgcttttagtacctcattccgtatccttttgggtcactctcagaatcacgggacagtatctcatttcgaggatttccatgtgtctctccacatttgtgtgtaaggaccttattggaagctatttcagccaaagcttgatgcgtctgacagtggctggggaaaaagaaactcccagaaatgggggctagaaagccatacacatat

SEQ ID NO: 1560626 - DNA, 4001 bp, Homo sapiens
ggggtcgctgggggccgaccacctaggggagaggttgtgtgcaccgtagcatctgtactggcccccgtgggagcggctcacagggcccagggtgaagttggcctgggagagcccagcctggggctgctggccagagccctggacgaggtcatgttccccctccttgtacagaacgaatatgtcatagccgacatcagagcgacactgcagggtcaggctgcctccgcgggccacgacagagccctgcgggatcaggagggagggcttcctagacacgcctggagggaaagaggaattgggacttggaaggctggttcctcccccgccccttccttctcccgtcctggcgtcctggccctgcaggtctcactgtctctcacgctctgtgtctcggatcccggggcctccttctcacctgggtctgtcttggagtagttccagaccgatagtgtctctctgactcctggccactgtctgtctggtctgtcctctcctcattgagggacaggaaattgcagcaaatacacccattgccttcctgagtcgaccccttccaggtgagggtgactcaggctcctgtttccccatctgagcctccccgtggggtcttcctcacgccttcagcccatccatcaacacatccttctggggtccttgccatgatcagtcatcaaccaaactcccaacaacctatctggttccccaaaattatataaagaagtgtggtggctttttcacctgggaccagaatctccaggaggtcactggggttcgaccacacctgagggtttttcctgtaatagtaatagcatctgaacctccacctgcagctgggggtcacgggacccacagggaacagggcctgggatggccctttggggagcttctgtgagtacagggtcctggggagcttctgttcttcctcaacaagaacaaacgtgagaagtccgtccagtgtatcacactggagggtcacatttcctcctgaggccaccacaggactcggcagggctaaaagagtgggttctgcatagaatcctagcagagaaggaggcacgtcttaagtggggctccgacctcccacatcatccccagggctgggctgtgagaggtagacgtccctaagagccgaccctcttcctgagggcagagcctggggctgggacccctgagtgtcctctcacctgtcgccaccagctccagggggtcactgggctctgaccagcctgcaggggtctcatagtagcagcggtatcgccctgcactgtcatacaccgtggatggaatgtggaacttggccttggctccaggctccagtgggttctgtctcttccgggcccatgggagtccctccttatccagacggtactcctcagtctccaggggcccctgacaccagagggtcacgggcttcccccgagctatcacagaggctggctcagcccagagggtgggtttggggagggtgcctagaatggaatcagaggctggatcccaagacatccccatccctcagattccagctctcagccccaggaccctccagacgtccccatcagtcagcccagaacagctatctccacccccagctgcccggggttgggcccttgtccccagtgagaagaagggacctgggacagctggggacagactcacctgcctgcacgcaggtcctggggcccacactcagccctggaagagagttccctgtgagggatttgcccctggaagccccagcagttcctctcctccctcggagcctctgatagaccagattctctgatagaccagagcctcgctttagagtgagctccctccaagacggggaccttccttccccctcttcaaacctcaccgaggcaaatcaggactgagagggtgagggtcatggcgtcagctcccactggactcagctgtgcaggcggatgagaccacggtgcctggcaggacacaaaaacacgcagagtgtggactggaggctgggttctccctgtcacaagactgtcccatcggaagccccacaggaaggggaactgccctccccaagagcctggctctcatttccccagggatggggctggggtgagctccaggctctctgcagacatttcagacagaaatggggtctccctgagccctagccgctgtcggcctgacctatactcagctcaccaagggctagggcagagcaacaaaacccctccgctgggaatgaacctctaagtcgttcctgcctcctcagtgcccctttgtccttggccgtccctctgtgcctccaaccatgttcaaggttttcagaacaattactcaggtttgtcatctgattcatggggtggagtggggagctgaattttcttcctaattccaccgattatgtgaccttggacagcaaagtggcttgcttgagcctttctcttttggaacttgtggtcatgacctcagcttctcagagtggatgtggggctcagtggtgcctgggacatgggagggggcttggccatggtgaatttccagaccagattaagacaggagtggttggggtgtgagaggatcctggcattgagctccgtagtagaggaggatgattgatgccccaactcaagagcccacatctgctccaaataccaagaaatgctccttatgtttgaagttcccggcacggtggcccacccctgtaatctgagcacctagggaggctgaggatggaggatcccttgagctcagaagttcaagaccagcttggggaacatagtgagaccccgtctctgcatataacaaagaagaaataatcaggtatgtttgtgcacgactgcagtcccaactatttgggacactgaggtgggaagattgcttgagcctgggtggtccaggctgtagtgaggtatgatcatagcactgcactccagcctgggtgagagagcacgaccctgtctcaaaacatacatatatatatatatatatatatatatatatacacacacacacacatacacacatctgaaatatgtagattatacatccgaaatatgtagattatgaaagttttgtgcagaaaaagaaatgaaaagttctttaatttgagaaggttgcacatcaaagaacaaacttgaaagctgacagcctgcttgtgtctaagactgtcccagggtcattagggaggaaatttccacttctgtgtgggacagaagaggaaccccaggtcctcatggaaagggagggggtaggggctccagatgaagatgaaaagctgtggcccggcccggcgcggtggctcacgcctataatcccagcactttgggaggctgagatgggcagatcacgaggtcaggagatcgagaccatcctggctaacacggtgaaaacccgtctctacttaaaaaaaaaaaaatagaaaaaattaagcgggcgtggtggcgggcgcctgtagtcccggctacttgggaggctgaggcaggaaaatggtgtgaacctgggaggcagagcttgcagtgagctgagatcgcgccactgcactctagcctgggggacagagtgagactccgtctcaaaaaaagaaaaaaaaaaaaggaaaagaaaagctgtggttcacccttgctcgtgcttgtggacaggagctgggatatctctgcccactgactgaagtccatgatcagcatggggccacctctcccgtttttgtgtttaacagattccgccgccgtgcgtggtgcctcacgcctgtaatcccagcactttgggaggctgaggcgggcggatcacctgaggtcgggagtttgagaccagcctgaccaacatggagaaaccccgtttctactaaaaatacaaaaaaattagctgggcgtggtggtgcatgcctgtaatcccagctacttaggaggctgaggcaggagaattgcttgaacccgggaggcggaggttgtggtgagacgagatcaagccattgcactccagcctgggtgacaagagtgaaactccatctcaaaataataataataataata

SEQ ID NO: 1560627 - DNA, 4001 bp, Homo sapiens
actcttacatacaattgaactgcccgtagtgttgttggggatggaagtgagtttatccatgtaaagtgcttagaatagcacatagggcatagtaagcactcaatcaatgccagttattattattactgttactagtagtaatacacaatatattatatattattaattaatttttatttattttttagacagagtcttcgtctgttgtccaggctggagtgcagtggtgccatctgggcccactgcagtctccgcctcccaggttcaagcgattttcctgcctcagcctcctgagtagctgggattacaggtgctcaccaccatgcctggctaatttttgtatttttagtagagaccgggtttcaccttttttgccaggctaatcttgaactcctgacctcaggtgatccgcccacctcagcctcccgaagtgctgggattacagacgtgagccaccacgcctggccaaatttattaatatgttatataataagtgtgcaatataatatactctacattattaatttattatataatatattgtataatatatacattattaatttattatataatgtcatgacatatactatttattagataatgaatgtgtaatataatggattctacatcatatataatatattacatgtgcattacttatataatatgtagcatattatatacaatatattatgtattagtaatttattatataatagaggtgcatgtataatacactatactgtatattattgtctatatgtagttatatataatacatcataaattatatgtaataatataaattgcatatattacacataatatagtatacattaacttaatatattatagatgctatgcagcaagcaatatactatatatctctatgtatctctctatctatggcctggcacattataagtaggcaaaaatactttatgctactttatgcagtatttagcaaattcagtatccaccagtacctaacatagttcttggtccatagtacatatttagaaaatgctgtttcgtgacactagccccaattgctgtgcatgacacctctgaagcgtcaggaaatgccacctctcccaacttaaccttcaaaccagcaccccgtgaaactgcagctagaaaacaaccctgtagtcccagttctgccccctccatgctgagtgaccttgggttgctccctttccctctttgagccgcagagttctccatctggaatacaggtgtccttgggccccgaggtccgccctgctctttccccaggcgcggcctggaccctggccggggggctcaccgatgctgtctgtctgcaggtagcacttgttgcccaggcagtaccgccacaggccctggtgggcgaaggaccctgacagccggtactgcatccagtggtctgttgccatggccaccaccaggaggatggtccccacccaggcacagaacaggccaccacccatgaagctgtacatggtgatctgtggggaaggggagagatgggattgggagctgaattcccgggacttgaagggaggaactggggggagagagggctcaggagtgggatgccaagtgcttgggagaaggagatggagacctagacgcctgggtcctgggcgaggaggggactggagcccggactcctgggtctgagggaggaggatggtagggatcctggaaagacaacagggagagcggggctgggttctgggaagaaaaggccgggggcctggacttccaggttctgagcaaggaataggctggaggcctagcttcctgagtcctaggtgagaaggggcccaggagcctggattcctgggtggtgggtaaggaaggggctaggggctagggggtaggacaccaggtcctgggagaagaaggagctgggaccctagactcctgggacttggggaagagggggctacaggtctcacgcctggtgcctacctgagtggcagagcctgcccgagccctccttctgccacggcccctctgtgcagactgagctgagcctggtcactggcctctttgcccccttaggttccccaaatcccttaagcctccctacacaatggtcccactacccagcagcttccagcaggcagaaatgcagcggtggcagaggcctcaaatggaattcgctgaagcaggcatccagggggctccccccacccactcactgacctctgtgaccctccccggaacccaataccttgtcgccagccttgctcaaagcaaccctggctttgtccgagctgtgtaagcacgcacacacgcacacacacacacacacacgggcgcgcgcacacacgcaagattcagggagagtcatgcgtttattgttcaaccagggctttctacctgaagagcaggcagtggggtggggagtcacaggtgtctgggtatgtggggccaatgcggttctttgtggggatggacacagggctgtggctgaggttgaggatggagctctttggggctgtagattcagaggacattaaagatgggctgaggtacacaggcaatgaggagaaaggggttggtaaagagggtgggttagggttgaggcgcagaagtggagctgggactggtgacagggatgggaatgaatgggtttgggaacagggtattgagagtggggaagagagaggcaggtaggagtggctttgggattagggagaggatagggaatggggttggaggagccctgggggttgagaatgaggtaaggattgtggttgtggttggggatggcattgggaatggggttgaggccatcaaggagacaggtttgggtacgaggtttaggattttcttctcacttgggattcaggtgacttaggtcaggttcaccaagtgcctcacaggagctactcctgggattgtggttttggggagaggggaggatggaagatgtttcttggggttcttctgacagggctgagatcactctgggccccaggaaaaccctcctgggtgactgcaatctcaggtgcctgaccctccaaggtcctagtactctgtctcccagtcctcagcagccagtggtgtttccaggggtggctctggacctcgagcttctttcttcccatcctgggcaggcagtgttggtggtgatggcagtgtcattggtggggtcctggggccagccccagggccccccgcccggcccctctctggctgctcagctctcccaaggccccgtcgatgcaggcctcggccccagcctggcctgtgcctgacttcccagcctccgcgtcccctgggaggcctcctaactgcccccggctgggagtggcctgcctgggagcagcaggggcaagagggcaaggcctgttggaaggtgtaggcccccagcagggcgctgtgcaggaggcaggagagggtgtccaggcgtatgggcacggtgacagaggccacgctctccgggagccccaggtgggtggggtctgtggagttcaggagcaagggtggaggggctgggagaggcgcagggggccatggctcggtcccagatgacggcagggacaggttgttcctagaacaacaaaaagacaggtcagtggggctcagcgtctccgtactttcttgtttctcgctgccaggctgtctctgcacctctgcagaaggcagccatctctccatcctcagtgcccacctgtgacttcctcccccgcttctctctttttgtttctaacccgggtctctctaaagaaacagacagctctgccatgaacttcggcaccagacagaactcagttccaattcctggtggcctcgcttttggtggtgtatctttggacaaatcattttcctattccgaaccttaatttgtttatagtcacagatggctttggatggtatcaaaggtgcgtatgacagcgctgggtctggtaagtgctaaaacagtggacagctacgatttctccagccttctggggatccctggagtcttcacatttcttggtttattcttggaaatttct

SEQ ID NO: 1560628 - DNA, 4001 bp, Homo sapiens
ggtggggaagggagtagctgagattgcagcaaagccttgggcagatgcagagggtacggatcacgtccacaactctcctcaggcccagcctctctcctgaacccccgacttgggcctgaagcctccctctcaagggtcgcctcactgtccccaagtccctccctgtacctcaccatggatacccctctccctcccctacccagcccaccaaccccatggcctgtccactaggcctcccgagtgtctctcccacccacctcctccctactctacccatcctggtcctgtcctttgctcccccttggctccctgcctcagtgtcccccttctgatacaccctccacaaggcagccaggggaatcttcctgaaaaataacaaacctgaccctgatcttcccttgcttggaaacttccatgactccacagcacccaggggtggagtctgcactcctcagcctggcactcacaggtgtacaccttccctcaccatcatttgtggtcacacccacttctcttttctttctttcttttcttttcctttctttttttttttttttgagacagggtctcaatctatcacccaggctggagtgcagtggtgtgatctcagctcactgcaacctccgcctccccggctccagcgatcctcctgcctcagcctcctgagtagctgggactacaggcttgtgccaccacacctggctaattttttttttttttttgtattttttatagagacagcgtttcgctatgttgcccaggctggtctcaaactcctgacctcaagtgatctgccagcctcggcctcccaaagtgttgggattacaggtgtgagccaccgcacccagcctcccactttgttttaataacacttttgccatgggacatcctacatcattttactattatctttctgtctaaattctgcacccctcccactgcccttaccatgccaggcctgggatccggtcagctccgccccaacccaaaattctctcctctttctaagcttcacccattgaccacagttcctattttctaggattactggaatatagtgactgtgaggattaagagtgcctgtacttcaggctcacagcaagatgtgtgactctgatcactgctggaaatggggaaactgaggggaagccaagaaaagagaacttctcggctgggcgcggggactcacgcctgtaatctcagcactttgggaggctaaggcgggaggatcgcttgagaccaggagttcgagaccagcctgggcaatatagcgatactccgtctctatttaaatattttaaaaatttaaattaaaaaaaagaggaaagaaaagggcccttctcagagttaccggctcaggattccccatgtcctaccacgcacgtcattgcccgagccaccccattcaatctcaaagcgacttcaagcgcacaccgggagggtgtgaaggtggcaggcaacgctcgctgcctgatacagcgattgtcaggtgggcttcagggaaaagtcgtgcagtcccctttccgcgatactcccttccaccgggactccacaccctgtcaacccgatggtcccgacaggcccccgacgtcagggtcctcacctgatttctccactttcaccttcacagggaacatggtttgggtccgggatctggctagctgggtcagaggcgccccaaagggcctagggtcacaagtcaaggcgggagaaggcggggacagttcaaagatgagcttcgtgggccacgggtcctccgcctttggttgtgtccagcctggaccgtggccaccacccttctgtgggcgggccccttcggcagtagcttgttcctattagttattgcagccgtcaatctcgcatcctgaccaattgagagctgcctccgtagtctcccagctttaggtcccacccacctggggctttgcttccggaaacaaaccatctaccccctagcttcctgggaggtgtagttccagcttcccagactcaccctgagtaacagcgcctgcgccgcgcggggcacggtgggaaacaaaggattagggcatcgcgaggcttcccgggacttgtagtgtgagaagggttgagcaacaccaagttagctctttaccggatttaaccaaccgttggggtcccttcatccctaagaggaagactaatgtaaaataacgttgggttccctctcactgagcactcgctaggtgccaggtatctgttaatctctttgcaggtacaacttcattcattttgcaaatatttattagtgtgtcgggcactcttctaggcattggagacaccttgaggaacagaatagacaaaaatccctgcgctaatggagcttatcttttaaaggagggaagataaacagtaaacaagtaaattttaagtgaaatgtaataggagaaagaatatgatctgggcggggcatggtggctcacgcctgtaaatcccagctctttgggaggcctaggcaggcagatcacctgtgaccaggagttcgagaccagcctggccaacatggtgaaacccagtctttactaaaaatacaaaaattagccgggcatggtggcatgcgcctgtaatcccagctattcgagagtttgaggcaggagaatcgcttgaacccgggaggcggaggttgcagtgagccgagatcggacctctgcactccagcctgggtgacagagcaagactccatctagaaaaacaaacagacaacaacaacaaacccctctccccccccaaaaaaaaaacccacaaaaaaagtgtagcctgaaagggacataggaatatcaaggtggtgattgaattttaaataagatggatggtcaaggaaggattctctgagaaagctcttgactatttttatttttgcagacaacacttccttcagaaaacgggaaacttccatttgtcacacgtcttggtccagataaatcccaggaagtagcatcgtgatctacacttctgatgagaatactgcagcccacagtaggaaagttatatttttgaattcacgactaccagtacaggataacagcccctagaaatggaagcactaggccgatcctaccactgcactccagcctggctgacagagcaagactctgtctcaaaaaaaaaaaaaaaaaagaaaaaagaaaaagaaatggaagcactattcctttcttagtttctcatctaatagtttcctgagcaggaaagttcctagttcagaagattatgagtagtatgcactgtaaaaaatgtacatcatgtctaaatactaagcctcgtacaaagctctcaacagatgtttttaaatattaataatcatttatgcctcaacctctaaaagatcccaggaagtcagtatcgaaagttagggtcctttattgggggatgtcagcagagaacgtgggacatgaaaacaagtcttaggagtttgagaaggggctcccaggacaggctcctctgctttaaggagcctgtcctgggagaataagcagggccccagtatgtgcagaagttgtcagggggtgcccaggggtatggtgaaggagaggtagtccccaagggcaccccagcggggccggtagatctggaagatggtgatccaggaggtgagcactatcacccagaagaggaagcccacagctgagcgccagacatctgtcatgggaaacagaagctggaagggttggcctccggctgctctccagacttccctagaccagccttcccttctcacccagagccccaacattttggatcctccattgtcccttcccaccaagattccccgcttccccctctcccctgccactggcctccctcctctgtgctctagactcacagcctttgatttggctctgttctgtgtaggctgggacaaggaaggcctctcggaagaaccagaagatgttgaccaaccagagaaaaggcaggaaagcaaacccccctagggagaaagaaaaacaaacaaacaaaccccaaaacctcataaggcaatgaagatc

SEQ ID NO: 1560629 - DNA, 4001 bp, Homo sapiens
acccatgatgttgaagcctaggccctcatccgtcttgggtagctccactaccctgggatgtgcgtggccctcgctggctgtgaaggcagccactgtggcctgggagagagaaagcgactgaagatgagggccccttccaggtaggcatgaaagctggggtgggggatgtggaccgaggacagcgatttagcctgggttactatccccaagcatgggacacttgtcatggcacaatgcacgatccccctgtaatgactgtgcgtctctttctgttcacttgcaagagaaagtgtccatttggtgtgtgtcttgaataccccatacttgccaatcttactttttttttttttttgagatgaagtctcactctgttgcccaggctggagtgcaatggcatgatctcggctcactgcaacctcggcctcctgggttcaagcgattctcctgtctcagcctccggagttgtaatccagctgggattacaggcactcgccaccacgctcggctttttctttctttttttttttttttgtatttctgtggagacggggtttcaccatgttggccaggctggtctcgaactcctgacctcaactgatccacctgcctcggcctcccaaagtgttgggattacaggcgtgagccaccgtgcctggcctcaatcttacttttaaacagaggaaagccaggcctggagggagatctgagcctccggacagcagcaagaggtagcagcatctaactattgtgcagtgagaggtcagagcgccatgagtttcctggtttgcactgtacagatgttgaaggttatcttctaccaaccatgccatactgtttccatttgcagttgctaaagatgccttagtatgacatttaagttaaaaatgtgcgattatttactaatagtaaggtggcacatagatttagcaaaaatcatgagggaggaaacagaaatgactggcatgaaggagatattgagttcgactaggcagttaaatagacaccaggagcaatggggtgcggggcccaccttggctgtggcatgggctcggatctcggcgctgccggtgatgtccagcgtgtcataaagctgctcatacacctgggtgaggaggcagcggcatcagggagtcgccagctcctccagccctagacgcaggagttcaggcctctagaccctctcccgctaccacgcaaggatccgccccgcccccgcaacagaaggccgagaaaactacaactcccgaagaacccctgagctgaagcgttggcaccccaaggcgggccgcctcgggagctgccgggaggcgtagtctccgggctcgggacaagcaggaggaggaggaggaggacgacggccaccagctcgcgcccctgcgccgcgcgcccctcacctctcggatagcggagcagaagcggctctgcagaactcgctggagggcctgcagcttctgcggcggcagctccccgctgcgctggagccgctcgaggagctcaaccgcccgggacacgtctgcggggcgggggcggggcgcagaaaccccgagtgtcagagaccccgagacgcagagaagcaaggagagcggcggagtgaggccgagcgcacagtccggggaggacggccgaagcctagtcggacaccccgcagagtccagggtggcgcaggagagactgccaccagcggccctgcggccccgggacccctccacaggccgggttgtaaggcgggcgcccagcgtcccggcccgcgcccagggagcctcccacacctagcgaccgcccggccccggcgcccgccccgcccaccccctccgggtccgctggcccacccgcactggcctgacccgggaagggcggggaccgggggctgggtatgtaggccgcggcccgggtgggcagggccccctggcgcacgcttaccccgctccagccccagcggctccaccagcgcagccatgtcggcgccacagctgccagccgcccgcctgccctggcgccggcgaggagggcggggctgcgcgaggccacgccccgggccacgggcgccccctgcggaggcgcagcctggagagcgcccagctctccctcgcccgactgctccgaccacctgccgcgcgccagccgcgccctgccctccgccccggccagtcggtcctgttggcgacccctcccactgcaggttcggtctgtgtgtacctttcaggatccgtgtctgcctgccctccacacccgtctatcccctgtccatcctttccccacattcattcaacaaactcttgtgaaacatctgagcccaagtcatggacaccgtggtgagcaggacagccaagcccacggcccgaacgaagcttccagtctataggggaggtagacgaccaactacggctgtgatgagagctgagagtggggaggtgatgatctagaaaacgaaggaaatcctagaggagggacattgacatacagtcctgggaggtaagatgaacaagaggtggagcttgggtcacccccaccacccagaaagagcccacgtggctggaagcagagttaggattggttgatgatgaggtgaaaaggtcggcaggatagtttatgcctgggctcctgcgttggcatatgcgccttgaggatttggggcttcatgcaaactcctaagagaaaaatatgacactcaaatttgtattattattatattattattattattatttttgagacggagcctcgctctgtcgcccaggttgggcctcaaatttgtattttaagatcactggggccgggcacggtggctcacacctgtaatcctagcgctttgggaggctgcagcaagactacttgagcccaggagttcaagaccagcataggcaatatagtgagacctcgtatctattgaaaaaaaaaaaatcactgtagccactgtggagactggtttggacaagaacaagaggagaagcagcggggcaacttacgaggctaccacagccatccaggtggcagctagcaccagggccaaagcacagaagatgggtgggcagatgtgggaaatgtctagacaagccttggtgcttggctatataaggggattgggaggtgcaggagaagacagtattaaggtgctttggtgccatttttaagatggtctacactgaaagagggatactggatattttgtttttgagacacagtcttccctctgttgcccagtctcgagtgcagtggcgtgatctcggctcattgcaacctctgcctcccgggtgcaagcaattctcctgcctcagcctcctgagtagctgagagtacaggtgtgcacctccacacctgccaaatttttgtatttttcatagagatggggtttcaccatgatggccaggctggtctcgaactcctgacctcaagtgatccacctgcctcagcctcccaaagtgctgggattacaggcgcgagccaccttgcctggccgatactggatattttgaatttgaggagcctatgcagaatccatggggagaaactatcgatctaggtctagggctcaaaagagcaacctggtctgcaggcatgtttgaatattggggcataggtggtaaataaaaccaccggagtggataagaatgtcaggggcaagcgaatattaagacggcctagaactggtccccagacctctctaacacttaaaagtcaggaggacagcagagaatggcctgaaatgtaggcagaaacccaggtgggagaaaccatgagaagaggggtttttaaattttatcttctttttttgtttgttttagatggaggggtctttgttgctcaggctggtcttgaactcctgggctcaaacaatccccctgccttggcctcccaaagtgctgagtttacaggcacgaaccgctgtgtctggctgcgagtgtttttaaaaagaagtgtggctgggcatggtggctcacgcctggaatcccagcactttggggggccgaggcgggtggatcgcctgaggtcaggagaccagc

SEQ ID NO: 1560630 - DNA, 4001 bp, Homo sapiens
agggggaataataaagttcgttttggagagaaggagactgagggtcagagtgggccccagctcactgcacaacttagctgcagacagtcagcatttgaacctggatctgacgccagctcctacccacaaaatcccagctccccactagagggtgaagggcgctctttggaggcccgagattgacatgtggtggtgggcggcttgatggggcccacccggggccaactttgctcgcagagttcttcaagaggctctacctggtgacgaggtagtgactcagggggcgccggggaatgacagtgctgtgggaagagacatcaaactgccttctattcccactcagcaaggcaccttcaggtcccggcttaccctgggggtggacggctgaggctgagggaggccaggcagggctgctgccgtaaccatcgtgacctgagcatctgttttatggtggcaccacactgcagccgaggtgggcagcatctcatttaatcccatgtggggtggatctgagagaggggacgtcatttgccggaagtcaccggtgaagaccagacaggcagggcagggaaggctgagttgaaccctcctaagcccccatcccaccgcccggctgcccccttcctgccaccccacatcatcgagatggggacaggagctgggtctacaggggaagcccgtgggttcttcccactcagatcctgtctccgacgatggctgctgcttcggctcagagaacagccagggtaaggccatgccgcggcagcccaccccacaccagcctcctgataaagccagcaccaccctccctgaacctgtttccagcctgcgtcctccacctgaccactcacacctcacaccttctgcatcctctccaggccacttccagggagccctcctgggttgctctggttctcacagctctgttgtccctgaaggctccccccagccaagccccagatcgtccctctgcaaataccactgcacagcagacgcccgctccccacccccgccggagcaagggtgtctgcagcctcgctgcgtccatggtttagccagggaccgcttgctaaaatgcagcttctggggcacatcgcctcagaagttctgactcctcagaactgggggggccgggacaccggcaccgttagcgccccaagcacacgttgagaaacccagttacatggtggtctccagcgtaaggacccggggcttttcttgtgcccggaccaaggcacgaggtgctgctcccctaaacttgttgaatgggactcagggcctcccctggccaggccccagaggcccgggaggtggcggcacccactcagggtgcccaggcccaccatttctggtgctattcagacgcccccagagcagggggactcagccctatgcccccaggtccctccccgccaggccgggccgtcagctccagcgatggagcaggctccggtgtggaccccagataccctttgcgtcttccagctccgcacccccaggctggaccagacccggctcgggggagacagggcaggaaggcgcgggctgcaggctctattcggacgttccccacaccccagacccaaccagtgcccccttcatctcctcctggagaggagcgcatcctcccagcgtccccagtgccccggggagatgcccacccgattccccgctccttggcgccccagaggaggggcggggggccccagggtggggagttcgcccccaaagtttccagggggagcgtcgggggcctggcaaggagcgatgagcccgggaggggtgcgcggggcaatttcccccggctgaggatggggtcgcgggttgggggctttgggcggcagggtcgcagggtgcaggtgaggggtccccaggtctgcgggcgcgccccacgccgggccccggcacggccactcacctgggcggctccgccgcggacacggcgcgggctgcggcgcgggggccgcccggagccgacacgagcagccgccgccgccgccgccgccgccgccgccgcctcccgggctccgccgtgcgcgccgccgccgcgcgcaaccgcccgccggtctcctcggcgcgcctggcgggggcgcgcgggggctgcgctgggccgcgtgcgcggcggctggggccgcaggtgtgagaggccacgtgggcgcaggtgcggggacactgggagcgcgggtgcagaacccctccgtgcgcatcccgggcgcttcgtgtccgaggacctcctgtccccacggcctgggtgagcctgcggagacggccgtgccgtgcaataaacgcaggggcaccccaagtgcagcaggttgttccgtgtggaaccttctggaagctaccatcgcctcctctgccccccgtcccccacccctagtccaggccgccaccatctgcacctggacatctgccacagcccagcccaggcccattccttatgtggccctcagaggaagcccctcagaggaagcttagccactgggctccagaacctgccgtgattccctattgccgtgagggtcccgtctgcaccccacctaccctggaatttctctttctttcgttctttctttctttctttctttctttttttttttgagatggagtcttgctctgttgcccaggctggagtacagcggtgccatcttggctcactgcaacctccgcctcctgggttcaagcgattctcctgcctcagcctcccaagtagctgggattacaggcacccgccaccacgcccggctaatttttgtatttttattagagacggattttcagcatgttggccaggctggtctcaaacccctgacctcgggtgatccacccacctcggcctcccaaagtgctgggatgacaggtgtgagccaccgcccggctgcctgcactgtttggtctgccgcaccacctccttccccctggcctgtcctcactcactctttcccgggctccaccccctcagccttcctcaaacaggccaagtccctccagtcccaggcctttgatcttcgctgtgcccagcttggacagcctttctctctgtccctccatcgagcagcttggagcctctcagtttgtctaatgggcttgttccccaatgtgccttccgcctagcacacagcagcgcacacaccaagtgcactgcgagtgctcatggaaagttttttacctttttttttgtcttttttttttttttttttttttgaaatggagttttgctctcgtcacccattctggagtgcagtggtgcaatcttggctcactgcaacttccacctcccgggttcaggcgattctcctgtctcagtctcccaagtagctgggattacaggcgcccatgaccatgcctggctaatttttgtatttttaggggagatagagtttcaccatgttggccaggctggtctcgaactcctgacctcaggtgatccacccgcctcggcctcccaaagtgctgggatgacagacgtgagctactatgcccggcccctcactgcatcttctaaaagccacatttagcctccctgtctcacagatgagcaaaccaaggctgggagatgccatttgtcccaagtgaggggtgagaaggaggcctcgggaacctgtgtgtgtaaccttgccctgtctgcccccttcacccactctgcagtcctccccaccagctgtgtattcccagtggctttggcggtggcctggcactcacgcagccacctgtgactcaagcaggctctgttcccagactgtcgcgttggctggaggcccagaaaccgcatccctgggaggctgcaggccaggccccccacaggatgctgtggggggcgggtatggttcaattcctggccccagagaggtccagaaggacttcatgacaccccatgctctccccaccaaatggccctgggctgctgtgctgtgtgaccccagtaggggaggtctccttctctctctgaacgtgtttctttctctgtaaagtgatgctcctgatagctggctctcagggctctt

SEQ ID NO: 1560631 - DNA, 4001 bp, Homo sapiens
tcaaatcctgactttgccacttcctaactgcatggccctgtgcaagaacccttacttctttattttctacctgatgtcctcatttctaaaatgaggatgttggccaggtgctcggtggctcatgcctgtaatctcagcactttgggaagctgaggtgggaggcttgcttggggccaggagttcgagaccagcctgggcaacatagcgaggccacgtctctacggaaaatgtaaaaattagcggggcatggtggtgcacttgtagtcccacctactccggaggctgaggtatgaggatcgcttgagcccaggagtttgaggctgcagtgagccatgatcataccagtgcaccccagcctgggcgacagagtgagactttgtttttttctttttttgagatggagtcttactctgtcacccaggctggagtgcagtggcacgatctcagctcattgcaacctttgcctcccgggttcaagtgtttctctgcctcagcctcccgagtagctgggattacaggcacctgccaccacgcctggctaatttttgtatttttagtagagacggtgtttcaccatcttggctaggctggtcttgaactcctggcctcaagcaatccatctgcctcggcctcccaaagtgctgggattacaggtgtgagccactgcgcccagccttttttttttttttttttttttttaataatggggatgttgatctttatctcaggattgttgaaggatgaccagagctaacctgatacaccgtaagtttttagtattttttaagtaaatgaatgactgtccctgagaggcttcaattcctccagattcacactcacctgtatcctggtagtgtctgtgattccgagcactggttttctcatgtggcgacgtcccactgtatcctgacatcactttataaccagattttcctttgaagcctagcttcactccctgggccaccattccacccatcgtggctggagaatctgtgtctgaagatgatcccacatctgattctgactcagaatctgtgacccactcagaaagtgccttccactctagggctgatcgctgtatggatagttcctgaagttttgttagaaatcccagctctgtcaaagatccctgcttggatttggctccctggactggcgttgtttgcttgtctgactgttcaggtgtctcttgggacgtagattcagtcggggcagatggctcccttttggctccaggtttagcctgggccgcaggtgttgattcagcttcttgttgagctggaggtggctctcctggcccaggccctggctgggctacatgtctttgtctcaatgctggctcctgttgagttatagattcttttcctagcccaggtccctgctgggaggcagcttcctgttgagtgagcagcaccctttggatgtaaggtgattgctgtggtgcgggcttctgtggggcaagaaattcctcttgtgaagcagatttttgttgggctctaggttccttctgggattcagcatcatgttgtgcaggggtctcctgctgggtgaggggtctttggtttgaagcaggcttctgttgggtattggatccctgcagagtcttcgattctggctgggctatgggtgtcttttctggcccaggctctagcggggttataggcctctggtgtggttcaggttgccagtctgacctagacactgacttagaacctggctccattgttatttccctcacgggagatattgatcttccaggttctatccttctgggctcccacccagccctctctcttcacagatctctcattgattcctcatgatggcacttcctcttgggtttcactccatcctagcatcactggtcttcctttttaaggcagctggcagttggccgatcacagctggcccccactaagtaatgaactctgtgcctctttctttggtgggaggattaggaataggaggaggctatgtgcctagcactctcttacaagaagggaggggcttgctctcttgtgtcataaatagggccccaccccacccaccactccgttaaaatgtttcttctcataaggcaagcatcccaatttaggcctccgtgtcatctgggatgacagaagccagatgctggatgagtgttccttttttctctttccttctaatgtctgaggaaagcgtcattcagggggcagtctctgtagttgttgtaataattatttccctctttgttcattcctacaaatggttgccagattatttatttatttacttattgagacaagtctttctctgttgcccaggctggagtgcagtggtaccattttggctcactgaagcctccacctcctgggttcaagcgactctcctgcctcagcctcccaagtagctgggactacaggcgtgcactgccacgcccggctaatttttatatttttagtagagatggggttttgccatgttggccaggctggtctcaaactcctgaccttaagtgatccacccccaccccccgcccccgggcctcccaaagtgctgggtttacaggtgtgagccaccacgcccagccaggttgctagtttaatttccttatattgtcattctgatcatttaactctcatgttaaaaactaatgtcatgccttcccacttttatagcttgaggcccttctgaatggcatttgagatactccatgccatctctctagccctgaactatgatcctgtactagattggaaactcacagaagacagtgaccactgatgacaatgactgataatgatggtggtaatggtgatgatagtagtcataaataccaaaggctgcctaagtgctaagaaactgtgccaagttttttttttaaacctatattatctttaataagaccgtgtctggttcattggtatgcttttttttttttgtcccacctcgctcttacctcagaaagatttgtcgaatgagtgaaagatgaacaagtaggccaatggagacagagtgagggtcttggtggggataagtatgtgtagaatctggattcagtctgcagtgaatagggtaaaatgggtcatctggttgtgaattggcagaccccatttgaaggaaacaattttgatctgtgacatttaaaaatatttattgacttctgtttgctactttcctgattgcatttaaggttaaatgacactagctaggaagctacagtttcctggaatctttcaggtaattaagcctaagcctgggtaaggggagggcacaggctaagactgacgagagaagaagacactagagagagcaacaaacaaaatgatcttgaaaaacatgctttttgagagcactggaatgatttaggggtgggtacagtgggagagtgaggtgggagaagaagagtgtctggtaggtgtgctcactgtcttcttggctgagaatgtttaattggaagagtgggcgctcagagctcctacaaaggcagagcaaagcttcttagctgacattgtttgagaaattgctggcaggctctggaatgcttgtttggctttctgtggtgcctttggtgtcctagggtgcaaataaaggggagaggctagtgttaaaaccatttttaacatttcttttttttttggagacggagtcttgctctattgcccaggctggagtgcagtggcaggatctcaactcactgcaacctctgcctcccgggttcaagtgattctcctgcctcagcctcccaagtagctgggattacaggtgcctgccaccatggctggctaatttttgtattttagtagagacagggtttcaccattttggccaggctggtctggaactcctgacgtcatgtgatccacccacctcggcctcccaaagtgctaggattacaggcatgagccaccatgcctggccttcacatttaatttttttttgagatggagtctcgttcagttgcccaggctggagtgcagtggtgcaatcttggctcactgcaaccactgtctcccagattc

SEQ ID NO: 1560632 - DNA, 4001 bp, Homo sapiens
tcaacactttccaccggacccaagatcccaactctcacccttccttcatattctcttgggggcagaacctgccagaccaccgctgacaccagggcacaaataagggactcccaaatttcccgtgggaccccaaggtatcagaacctctccctcggccccctacccaccctgggcctggtgagagatgaggggcctaattcccaccccagtcaccaatctcttctggattcatcagggaactcgctaaagctccagggagaactgagaccacgtgactcaccccagagactccagggagaccccccacacaccccatcttgggcctcctcagagggcctgggccccccagtctccttggagcccagagaccacccccattccaccccagataccccaatacccagcttcatccccagagactcccactcacaccccctcagttggggggggtccgccaagtctccttggaatcctctgagggacgaggcatatggggggctgcagcccaatactcagggagcccccaaatccccaggacctctctttggtggggagccctagtctgtaacccccatggccccaaaatgcacctctcacggaagggtccccagagctagctggaggcccctctgcagccctcactcaggacacggaagatctcctgggaccccctccataggtggggcattcctggtctgcacttttcactcagtgccctagaaaccccctggaggtccccaagagaatgggccactccggtctgcacccctcccaaggggtcccccaagatctcggaaactgcggtgggcagggcctgcccaggtggcacccctcactcagggtctccccctggagatccccgaggccaggctgaccccacccctgctcagggtcccccgtgatcgcgtactccgcggtgggctgggcctggccgagctgcacccctcactcagggaccccttgaaaccccctggagacccccaagccgggacccttcccggtctgcacccctgcccagggtccccgcgatcgcgcaccccgcggtggccaggacctgcacccttcatccaggagccccccgcaaaccccctggagaccccaagccgggagtcgttcagagtcccccgcgatcgcgcgccccgtggtgggcggggcctggccgagtagcacctttcactcagggactctccgaaacgcggcggagatccccgaggccggactgtccccgtctgcatcccagctcagggttccccgcgactgggagccccgcagtgggctgggcctagccgagcagcacccctcactcagaagcccccaaacctcctggagacccccgagccggagcctgtccccgtctgcacccccgcccagggtccccgcgatcacgcaccccgcggtgggcggggcctggccgaactgcaccgctcactcaggggcccctcgaaaccccctggagaccctcgagacccgggcccgtccctgtctgcacccagggtcccagcgattgcccaccccgcggtgggagggacctggccgagctgcacccctcactcaggggccccccgaaaccccgcggaaacccccgaagccggggcccgtccccgtctgcacccccgcccagggtccccgcgatcgcgcgccccgcggtgggcggggcctgccggctgcacccccgcccggcccctaagccccggcgcccacctcgcgcgtggtcacctcctccttctctgagatcttgagcaggagccggtcgttctccagctccagcgcgcggacgcggtcgatgtagtgcgccaggcggtcgttgagctcgcgcagctcctccttctcctgcagccgcgacaggcgcgtgggcgacagcggcgtggcgggcccgcccgcgcggccgggcagcggcgtggccatggtggcggcggctcgcggcctgcgctgctcccgacggcggcccgggctcggcgggctcattcaatccgcgccgccggctgcaagatggcgccgcgccgcgccgcgcccgccgcccgccgcggcggggcagcctgggactggtagtccgaccgccgggcgcgcgcggggcacgccggaagttgaagtctccgtccagctctcgcttcgcagaggcgctgactccagagacagacttcctggctgcaaactcccagctccgccacgaggaaacagcgttgggttgctttctagtacctgtttccccacttagagaacctcaaaacgtgttcaaagaaccagacacaaaaggccatatagggccgggcgtggtggctcacgcctgtaatcccagcactttgggaggccaaggccggtggatcacttgagaaaagaatttcgagatcagcctggaccacatagggagacccccccacaccatctctactacggaggcgcgcgccggtaatcccagctacttgggaggctgaggcaggagaatctcttgaacttgggacgtggaggttgcagtaagccaagatcgcggcactgcactccagcctgggcaacaatgagaaactttgtctcaaaaaaaaaaaaaaaaaaaaaaaaaagccatatagtgtacaatgccactgatataaaatgtccagaagaggctgtcaaggagtatgaatttcaacaaattgagtttaatgatctcattggctcttattagcaattcatgaattggatagcattcaatctattaaataggcactccaatgagctgagcagagaggatgggcattctgcattacaggcagaaaaggctgaagaaaggagaaataagaattaaaataaaagccaggccaggtacagtggtttgctcacgcctgtaatgccagcactttgggaggcggaggtgggaggatagcctgagcccaggagtttgagactggcctgggcaacatagcaagaccccatttctaaaaataaaaataaaaaaattagccaggtgcagtggctcacacctgtattcccagcactttaggaggccaagccgggcagatcatgaggtcaggagttcgagaccagcctgaccaatatggtgaaatcccgtctctactaaaaatacaaaaattagccaggcatggtggcacatgcctgtagtctcagctactcgggaagctgaggcaggagaattgctttaacccgggaggcggaggttgcagggagccaagattgaaccactgcactccagcctaggcaacagagtaagactccacctcaaaaaaaaaaaaaaaaaaaaattagctgggcgcctatagtcctaggtatttgggaggctaaggtggcaggattgtttgagcaagagaggtcaaggttgcagtgagccctgatcacatcactgcattccagcctgggtgacagagtgagagtttgtctcaaaaaaagtaaaaataaaaatacgaaataaaaaccaattggttgtttcaaagttacttttttcatagggtctgttttaaccccctctattttgagggtacttccctatcaggttaaccggtcccctttggcttggtggctgtgaatgtttttttttgaaaacctgcaccctttaaagttcagtttgaggccaggtacgggtggctctcacctgtaatctcagcactttgggaggctgagatggggagatcgcttaagcctaggagtttgagaacatcctgggcaacatagtgagactctgtctccaaaaaaaaaaattttttttttttggagacagagtcttgctcttgtcacccaggctggagtgcaatggcatgatctcggctcactgcaacctccacctcctgggttcaagcaattctctgcctcccgagtagctgggattacaggcacccgccaccatgcccagctaatgtttgtatttttagtagagacctggtttcaccatcttggccaggctggtcctgaactcctgacctcgtgatccacccacctcgacctcccaaagtgctgcagttacaggcgtgagccacggcacccagccaaaaaaatttttaataattagccacatg

SEQ ID NO: 1560633 - DNA, 4001 bp, Homo sapiens
cctgtcctctgcccccaattctcccagaggccctgtccttccccttcttcctgcacacaccagcacaaacacatgcgtgcacgcatacacacatgttgcccaaacggagccccctccccacccagcccccagcctccctcccacaggccctgctgacagaggcaccgtccccgccgctccgggccctgctgggctgcgggaagacgcgcaccaggtgacggggcaggacccgcagacagacccctgggcagacagcgaggccgccgcgggggtgggggccaccggacagactgatggcccgacagactcaccggggtgggccggggacgccaggcagccggaggcggagacggccgcaaggaggatgagggcgccgggggcaggcatcttgtcgaggatggcagggaggtggaggtggtggcggctggggaggaggggggggcgggccctcagcccccagccatggggacccgcgcgaccctggcctcctcccggcccaggagaggggcaggagacgcaggacagggggagggaggggctgcttgctggctcaggtacccccctccccctctttgaagggacagacggatgaagggatggagaggcggacagaggagagatgctggggagccggggttgctggggtgggggggagagggtaggatggggggggcgagaaagagggccccgcccccgagggcagccaggattgggggagcagagagcctgtcacaggaagggtgggaggagggaggatggagcgtcgtcatggcaactggctcccccgtagcattggctgccaggagggaggggaggaaatgggagggggagggacagacagggaccggcacacacttgcagcgggggtgggggggcagggcccacgggtgcctggcccggacaccgctgtgacatgccaccagcatggacacatgtgctacacgctaagatgcagatgtcaggcacgcgcagcccacacacagctgacacacgtcgcagggaccctcatagacaagcgcatcacatacaaaggtggacagccatcagcagacggggacacgtacacgtcacacacaaagacgcagggaccgcactggaaacgcacaggcaggccagcttccagcacagatgcacccggccacgcaggaacgtcaaagcatcacaaagacccacacatgccccggacaaagtaaagccccagatccacagacgcacacgccacagacaaagatccccacggacaccactgtgacatgctgacactcatagtcacagccacgcagacagtccctagacaaatgggcaacaaagaatacccacagacacaagtatcacatacatgcacgtcacacagacatgcacagacagcaattgcacagacacacgcagacacacacatcacatgaactaacatagacacggacacagcagctacacagagacaggcacatcacatacatgagtacacagaaacataatacatgcatgtatacggacacgtaacatgcatcactcacacggacacaagcttcactcacatggatacacacagacacactacatacacatgcatgcgggcacacacaactcatacatacagggctacataaatcacatgcaaaaatacacataaatacaccacacactgatacatacagacacatataacatgcacatatacacagtcacacatacataagcacagacataggcacacagatcaaatacacagacacacagagttgcacacatcacatacctaaacagacatggacacacacatcacaaatacacacacctttcacacaaggttacaaagacacagaaccccaccacagtcacacatcacatacataaacacacactggcacacataacacatacaaagagtcacacacccacaacacagacacagacacgcgcacagacacacgggtcgcaaatacccacgtttcccgtgcggttacgcagacattacacaaccacagcacttgcctcatacaaaagatacatgatcatagtttatttaatgtatttattcttatgagtatttagtctgtgccaggtatcgtccgcagcgttttacacgtacagaattacctctcaatcctcacaaccgccctctgagacaggtattttttaatcatgcccattgtacagatgaggcaactgaggcacagcgcggggtagtcacctgccccaaggcacacaagccggggagtggcaaagctgggactggaacccggtccatcggggacaccgacacatcagacaaggacacacatacatcacgtgccaggccgccgccgtctcggggtcacatcccaccctccagcgccccgagctgcagacacacccggaagcgcggactcccaccctgggcgcggacctctccatcgtccgtgagcacctgcgaggcgttcccctgggtgaggctgggccggagctgcgcacccaagacgcagcctcagcaacactcggcgcaggcgacccagcccccaaccccaacccccagcaggggcccagggctttccaccaaaacgcgcagccgtggcgcacaccggccgggcagtgcacactccccgcagagcgcagccgtcctcatcggggggctcaggggaaggggctgccctcagggtgtctcattggagaaactgaggcaggttcatcgcgggagggagggggcgcacggcctaggctgcagggtggaggggatgcaatcggggggcggggagtgagaaaagacgcaattcgctgcccgggtggctgaagggcacagaacctggcggaagcagaggcttatgggaggtgtagtcctggccttgagacttgtaggaaatgtagtcctgctcgacccagcaaggaggctcagattaagctgcggttggatgcgggtagcaggagccgaggaagggtccgctgcctgggtctttggaagtgatgtgggcagaattatcaagtcctagggagcggcacaggcggggctgcagtcctgactctggccccagctcgcttgttcatgtattcactcaacgaacgtttactaggtgcccactatgtgattaggcaggcgctgggccagaagctggggctgcagcaggaagcaagtgagacgcgttccctcaccttctgggagtctcgggggttcaaggaaagcagccacgagtggaataattgcacatcaggacttagcactgccgggcaccactgagtcagggtggggatggagtgggtcttgtctggggagtaacagagggttccctagagctttccaaactgtgagcgcccagccattagcaggggtgatatcaagatcctcggtggtctcagaaacaaagtcactctctgaaaagaaagaaagacaaaaaatcctccgtggcaatcagcactttttttttttttaatgggggccgggcgtggtggctcatgcctacaatcccagcactttgggaggccgaggagggtggatcatgagatcaggagatcgaaaccatcctggccaacatggtgaaactcggtctctattaaaaatacaaaaattagctgggcatggtggtgcgtgcctgtagtcccagctactcaggaggctgaggcaggagaatcgcttgaacccaggaggcagagattgcagtgagccgagatcgccgcgccactgcactccagcctggtaacagagcgagagtctgcctcaaaaaaaaaaaaaaaaaaaaaaaaaaaaaaaaaaaaaaagagtatcagtctgtttaggtcagttttatcaccaaacttgccctaaaactttttcctttttgacactttattgatttcaaaactgaaactacatgtcagtggttctcaaagtatggttcagagtcgcttaggagtccctgagaccctttcaaggggtccatgaggtcaaaagtatttgtatactaccctcctgagatgttaactgcctttttcgttctcattcactcataagtggacagtagaagtttccagaagttgcctgacatgtaatg

SEQ ID NO: 1560634 - DNA, 4001 bp, Homo sapiens
accccacccccagccaggcccccaggatagacacaagcctgccctctcctcctacacagggagctctggaaggaccagctcaacaagcccaaggccaggctgggcccccaggagacccagaggacaactgggcaaggtgggccggagagtgtgggggaaggcaaaggagttctgtgagctcagcgtctgaagctcatttcatgcatcaggccccagggctcagcttccgccttcggcttccccttctgccaagagccctgagccactcacagcacgaccagagaacaggcctgtctcaggcaggccctgcgcctcctatgcggagatgctactgccactgctgctgtcctcgctgctgggcggtgagtgggccaagggccggaaaggacctggggcggagctagggctggggttgcaggttgagcctctgtctccccacagggtcccaggctatggatgggagattctggatacgagtgcaggagtcagtgatggtgccggagggcctgtgcatctctgtgccctgctctttctcctacccccgacaggactggacagggtctaccccagcttatggctactggttcaaagcagtgactgagacaaccaagggtgctcctgtggccacaaaccaccagagtcgagaggtggaaatgagcacccggggccgattccagctcactggggatcccgccaaggggaactgctccttggtgatcagagacgcgcagatgcaggatgagtcacagtacttctttcgggtggagagaggaagctatgtgagatataatttcatgaacgatgggttctttctaaaagtaacaggtatggaatggggtgggaacccctgcctctcacactggggagggaccctggggacagcctatgggctgagcagagagggctctcagggacccctgcagcacaagaatctcccaccacggtctctgtcccagccctgactcagaagcctgatgtctacatccccgagaccctggagcccgggcagccggtgacggtcatctgtgtgtttaactgggcctttgaggaatgtccacccccttctttctcctggacgggggctgccctctcctcccaaggaaccaaaccaacgacctcccacttctcagtgctcagcttcacgcccagaccccaggaccacaacaccgacctcacctgccatgtggacttctccagaaagggtgtgagcgcacagaggaccgtccgactccgtgtggcctgtgagtgtggcctgggagggtggggtgtgcagacagccccggtgggtggggaggtggaggagcccagtgggacagtgagcggctcccagctcaggagcatccagggagaggaagctgtggggtcccaggatgccgccgcagccctgggagggggatgggaatggcgtctggtccacacacgtgagccctggcgctggttgtcacttgtcttcccgggatagtcccactttcttttccctgagggagttttttccaggtgtgaggaataaattgtccctccctgaagccagctcacaatcttgttgcagatgcccccagagaccttgttatcagcatttcacgtgacaacacgccaggtactgagggccgtcgggctggggctgggccagttgtctttagatgaaaaggcttcaggggatgaggggatgtgctcctccctgtaccccttctctctttctccctccctttctctcttttttttttttcctcccactccagccctggagccccagccccagggaaatgtcccatacctggaagcccaaaaaggccagttcctgcggctcctctgtgctgctgacagccagccccctgccacactgagctgggtcctgcagaacagagtcctctcctcgtcccatccctggggccctagacccctggggctggagctgcccggggtgaaggctggggattcagggcgctacacctgccgagcggagaacaggcttggctcccagcagcgagccctggacctctctgtgcagtgtgagtgtgcccagcaggggcctggagtccattgggagggcagagggatacaggggctgggctcagggtcccagagctgagggggcctggagccccaggcctcggagaccgaccttcttacctgtgtagaccctcatgcagtttgtgtctgggactcagtgggtgattctgccctgcccttctatcccacccacttcccccacctcagtgtccaggatggttccctttacccagagggaagcccctggtccgtctagagccggtcccctgtctccatttcagatcctccagagaacctgagagtgatggtttcccaagcaaacaggacaggtaggaaaggggacagaggagccaaggcctctcagtgccgaattgggggcccaggagtctggagggtccccacgcaggagggtccctgagccctgagctgctcatcgattctgcctcttccttccctagtcctggaaaaccttgggaacggcacgtctctcccagtactggagggccaaagcctgtgcctggtctgtgtcacacacagcagccccccagccaggctgagctggacccagaggggacaggttctgagcccctcccagccctcagaccccggggtcctggagctgcctcgggttcaagtggagcacgaaggagagttcacctgccacgctcggcacccactgggctcccagcacgtctctctcagcctctccgtgcactgtgagtgggggaaaggggacacctgggtcccaggaaggggaccctgctgagtcctgtcctccctcccctcagactccccgaagctgctgggcccctcctgctcctgggaggctgagggtctgcactgcagctgctcctcccaggccagcccggccccctctctgcgctggtggcttggggaggagctgctggaggggaacagcagccaggactccttcgaggtcacccccagctcagccgggccctgggccaacagctccctgagcctccatggagggctcagctccggcctcaggctccgctgtgaggcctggaacgtccatggggcccagagtggatccatcctgcagctgccaggttagggggccgcctggatgccaaggttcttggaggagaagctgactggggcaaagagtagggtcctgtggttggagcaggagcttggagggacacagcagacccgtggcatctgtatgtagacaggaaaacacaatgggaagtcctaacacctgggccggggtgtggcagggtttcctaaaagtaaacagaggggttgcagatacaatgtccgccatgggaaccggaagccttaatgccgagtgatgagcgggcttcgtgagccctgcgtggatgggaaatgctcaccttgccctctccgtgtgcagataagaagggactcatctcaacggcattctccaacggagcgtttctgggaatcggcatcacggctcttcttttcctctgcctggccctgatcatgtaggttaagaggaggcgtggcggggtctggggcctggacccaggaagaggggaggtgttgcaggccgaaagagtgaaggtcgtgatcaacgcagtatacctctggaggttacatgagtaaacagcaaactgttctcataaatgcagaatgttgtccaactgacaaactgcgtctgcttcccagagggaatgctgagggcagtcacgccccaagcgaagtgtttcttgtaattaggcacagctgaagcttgttagtaataatatgaacctgtgatcaattaaacagctgaccaattgttacctcctgctctctgctctttctacccaataaatacaaagggctgtagaggctcagacagctgccctggctcactagtagcagggaaccctcttcttcttcccctgaccccttcctttaaaataatttcttttgtcttaagttttcatttctacgtttgtcctccttctttcagtctcataatgacggtctcaagtggtaacagtagtaactgtcat

SEQ ID NO: 1560635 - DNA, 4001 bp, Homo sapiens
ggcatacacctgtagtcccagctactcgggaggctgagacaggagaattgcttgaacctgggaggcagaggttgcagtgagccgagatcgtgccatggcactccagcctgggtgacagagtgagactccatctcagaaaacaaacaaacaaacaaaccacagccagagaggtagaggcagaatccagaaaggcctgatagcaaacactgggggaaaggctgggggtgatgggtgcagatgtccccgctgcctgcctaagggcgtgaccctgtcatcctcctttccaggttgctgttctgctgctggttcccctggatgctgagggcggagatgcagtcttagaggccctggacacctgacaaagagacagagtccccactagcatctcctgacacccgaggagccctgagtcaccctgagatagagattcccagtaacacatccagagtagagacccctgttagccagccctcgatcattgaggccccattattaacagatactcccataataacccccaaatacagaccccatgtcacccagaaagagattccctgagtagcaccttcaggctagtccctatccccaacccctcagagcagattcccagattaacagatttccatatcaccccaaatgatggtgaccctctccacataatgcattacaacagaacattcttgaatcacccaaccctggatcagaaacctccccattaacaaacactgccccttaagtcctcttgaaataaacataggtcacacccccaaagcaaaagagtaacagacattcatgtcattgttccccatttaacatcagtcctctcaagatgtcgtgaccccatggtcaccctgaagcccttagattccaacccctcaatcagagacttccttcattaacaaagacccttgttcttatccctcaagaagaaacccaccataaccagcccactgtcacccctaatttacagacaccaaaacagtcctggaagtgctaattacaggaccccccaagtcttcctaccctctgcaccctcaagaaacccccagtgccttgtatgaagcccaccccacatggcccacagctcctgtgctggccagactcccagaaaattctctattttttaagtaacgacttccccctttgggggaccccaaaatttggaggccccattctaggactctggggatcccaaaccctagagtacacacgtcccaaactcccctgtgccctcaagtcctacagcccctagaagaccccaatgccgtaactcctaggacccccaaatcatggaatcccaaatccccagggaatcccaaatttgaaaatccaatcccaagtccccaggaaacccaatcatgaggtccttgtgcctggtatggaggagactgcagtcaggatatgcattccaggctcccagacacctcaagccctattcacaggcaccaggaaaccccacacaggaattcccatccctggaaactggagaatttcaatgccccgagtccatgggtttcaagacaccaaattccaagagccccagccctaagggaaccccaaatcctaaagcctccatctctaataaatggaaggccccaaggccctgaggggatctcaaatcctggaaccccgatttcaatctacgttctagtcactggcctcaaaggaccccacagcacctgggccagaccaacagctcgagggagaacctgaaggcccagggggtccagggcggacctggggccccgaccaccaaggacagctcacgactgccccttcactgcatgtccccaaactcagcatgactcctgtcctcttcaataaagacgtttctatggcctctctgtgtcgggtcattgggggtttcccttgctgggagaagacgggaaaggaagtgcttccttcagtctcacctccctgcggcgtgggcaggtgatggcgctggccgcgggaagtccttctagcagcctctcatgtcttcccgcggctgtcacggctgccgcccccgtcccacccatcggggtccactccgccaatggccaggttcagttcctaagttctgagtggccagtgccagacgacgatgccccgcccacgccctcctgccaatggctcagaggccaggaggcgcggcctatccttaggcgagcatgaagggggcgggcgaatactgagtgagagcgccgattgggtggaaggcgggcccttgaagcctctgggagctcccattggcctgcggactctgcgtctgtaatgtggggcggaaatggctgggagggggatggggatgttgaatttggaaattggaggggacgctggtggacggtcagttttggggagtgctgggggtagagatggatgtcaatagggctgaaagtggggatccgggggagcccagagtaggagtccgaggaggctcagagcttggagtcctaaaaggctcggagtcggggatctgaatggttcagggagggaagaagatttgggagtcagcctcagagctaaagatctcagggtgctggagtgaaggggcgctcaggaggggaaatccgaggggcgtccaaatggggggatccgaggaggctgagggtggacatgtctgaggaggctcagattggggtcacaggagtgcacagaatgggattcggtggggggcgggggtcgctgagtgttgatagccgggctcacagttgcaggtctgaagcggggtctcaaggtgtttaaaggggctctggagtgcagccctgggggctatgtgtagagcttttgagaaaggctccctgtgtgtggggccagagaatgttctctgtgggaggattgagaaggcatatgtgtagttggatgggcccttagtggacagagtaatgggggattattcttggggctcattgtgtccgggcatggaacgtaggggctctctgtgtggcttgtaagatgctgaagactcagattttagagaccaagtgcgtttcagaagagggctgaggtgaggcctggcctgtgatggggtggaatgctgcatcatggtgttagggcgggaggcctagtgacttcagtatgtcctcccctccctacaggattgggtgcaaggagttggtgttgatggaggagcaggacgccagagtcccagccctggaaccgttcagagtggagcaggttgtcagaactcagggtgcagagggtgaaggaggcaggctgattcctgagttcttgggttgggactgcccccttccaccaaattcattcttactgtcagagtccattctggaatggcactggtcccttgactttagaccctgacctgtctgaggacatcctgagcctgtctccaggcataggggttgctctgtgatgatatgtcctctgtgtgggttgaagggccacaccttcagggggtctttctatcctaggcaccacctgtaatctactatgtccctgacttcatctccaaagaagaggaggagtatttgcttcgacaggtgacctcagtgccctactggtctgttttcccactcttcccatattcctccccaatgtccatcctctgtatgagagcccccaaggctgcagtgaagaccccgacagaaggaacaaggaagttacagagctcatactccctctactgagatagcccaatcctgctagcttagagaatagggggttataaacataggctgagatagcccagttcagatcattgagactggggagtaaagaattttgtattcagatttctgtgctgagatagcccagtaaactctttcctgtgctaaaatagcccagcatagacccagagcacaataaggttaccaaatacagaccatctacgctgagatggcccagtctgcattctgttcttaaggtttggggaaagaagaattttcaaagctcagagttcctgccctttgcagccccagtgcctaagttacagagcacagatcttccctgtgttggagtaacccactgatcttgagtccaggaaaaaattagctacagaacac

SEQ ID NO: 1560636 - DNA, 4001 bp, Homo sapiens
tcctcaccattgcgtgcctggacaacctttatttgcctgaacatttcaccccgaatgaagtcccggtcatgtccggtgtctgccagccccggtgtcactgagagacccaaagagaacgcgctggtaaaggtcttggcagagttgcgggttgggagatgtgattaagggtcggggggcggggcatctccttggacgcccactcacctttttcatcccgcacatccttcgtcatcctcaagactggggagagacgccagcagcatgttctagacgctcccctcactcaaagaacctccctggggtttctctgtgttcccccaactcccagagtccaagactttcttccagccccagggcaaggcactttggagctctgaaatgttccactcattttgcggatgagaaaacccaggcccagggacataaagtttcttgtctaaaagcaaccagctagtgagtagtaaggagggaatttcattccagtgtgtctggactgtttagggaatgcaggcagcctggaggttctaatcccagctcagggctgggcttaggggaggtgctcaccaatgactcaaacctgctcgctaatgattctgctccttcagttcatacacacccccgcatgcctccctctgaggctggtgaggaggtcagctccctcctgtgtcaccatggtcacccccagggacacgaccagcagcccctccggctccacccctatcccagcgtttccgaatccgacccaccctacaggttgggagccctcatggctgctgtcccggggccacctggtccccctgattcagccgccttacctctggacagaagcacactgaggagaacaaccaggagaagcaggatcagagacaccaccgggcagagatacttccaggtctttttttattttttattttattttgtttttgttttttttttttttttccgagacggaatcttgctctgtcgcccaggttggagtgcagtggcgcaatctccgctctctgcaagctttgcctcctgggttcacgccattctcctgcctcagcctcccgagtagctgggactacaggcgcccgccaccgcgcccggctaattttttgtatttttagtagagatggggtttcaccgtgttagccaggatggtctcgatctcctgacctcgtgatccacccgtctcagcctcccaaagtgctgggattacaggcgtgagccaccgcgcccggcatttccaggtcttgtcatggggcttctgtgcccgttgccctgggtggaaaccaggtcagcttcccctcccttcagggatacccactctcttttccttagatgcccgagactcctctcaggctgcagggaaatcgctgaatcccccgtgctcttctgggacccctgctgaatgcaccggatgttgaggactcagaaaagactagaaaaagaagcctgtccctctgggatgtggagtaatgaggaggaagcctcagaaagatgggaactccatgccctctctttctcctgcctatggttagagtgcaggggcaacccagcacccagctctttttttttttttttttttttttgagatggtgtctcgcactaccacccggcctggagtgcagtggcacgatctcagctcactgcaacctccgcctccagggttcaagagattctcctgcctcagcctcccaagtagctgggattacaggcgcccgccaccacacccagctaaattttttgtattttttagtagagacgggttttcgcctgttggccaggctggtcttgaactccttaccttgtgattcacctacctcggcctcccaaagtgctgggattataagcgtgagcctccgcgcctggcccaccaagctcttaattgcacataaaagggtttctggtcccagcttcttgactcaccagtttcccccagcctggggggaagtttgggccccaatgctgataattctttggggtccttgctgctagcatccctgccttcaatcatgaccgcagctcactctgctctgagatgctcctactctacatgcttatttctgggaaactccacccagcccttggaaggaaacactccccttcaagtctcttacactgctcctccttcctggcttagagtgtggcccgagatcctgagatatctggtcatctgttaacacagccggaaagaggacctgggtctctgagctcaggaggcagtgggcaccaagtctcctctgcaaagctgatttctgtccaaggtgactgaaacacaaagcaacagagaacggaatctcagatccctgtactgacacccccaccgccactctctgcttctcacagcttagcatgaaaagtgctcttggcttctcacgatgaagtggtggacatttcaaccgaggaaatgatttgtgtgactcttttcttggacaccgaggacaatgacatttcccaacagctttcattcatctccccagctaggtagctacttgtagttttaatgtggccaacaagcatatgaaaaaaaaatctttacatcaccggtcactagagaaatgcaaatcaaaaccataatgagattccatctcacatcagtcagaatggctattactacaaagccaaaaaataacagatgctgggggcagggggttgcagagaaaacggaatccttatacactgttggtggggggtgtaaattagttcaaccatggtgaaaagcagtgtggcgattccttaaagagctaaaaacagaactaccatttgacccagcaacctgattatagagtattcatccaaaggaatataaatcattctaccataaagacacacacatgagaatatttatcgtagcactattcacaatagcaaagacatggaatcaacctaaatgcccatcaatgatagactggataaagaaaatgtggtacagatacaccatggaatactgtgcagccatgcaaaagaacaagatcacgtcctttgtaggaacatggatggagctggggtccattatcttaagcaaactaacgtaggaacagaaaaccaaataccacatgttctcacttataagtgggagctaaatgatttgaacacacggacacatagaggggaacaacacacactggggcctattggaggctggagggtaggaggagtgagcggatcaggaaaaataactaatgagtactaggcctaatacctgggtaacaaaaataatctgtagaacaaactcccgtgacacaggtttacctgtgtaacaaacctgcacatgtacccctgaacgtaaaatgatattttaaaaaaatgaatacaggccaggtgcggtggctcctacttgtaatcccagcactttgggaggccgaggcagacagatcacctgaggtcaggagttcaagaccagtctggccaacatggtgaaaccctgtctctactaaaaatacaaaaattggctgggcgtgagggtgggtctctgtagtcccagctactcgggaggctgaggcaggagaatcacttgaacccaggagacggaggttgcagtgagccaagatcacaccattgcactccagcctgggcaacagagagagattccatctcaaaaaaggaaaaaaatatccaatccactgttgatgggcacctaggctgattccacatctttgctattgtgagtagtgctgcagtaaacacacaagtgcatgtgtctacctagtagaataacgtattttcttttgggtagatacccactgataggattgctgggtcaaatggtagctctgtttaaagttctttgagaaatctccaaactgctttccacagtggctagaccaatttacattctcaccagcagtgttcccttttctctgcaattttaccagtatttggttgttttttttttttttcactttttagtaacagccattctgacgggtgtgagatggaatcttattgtggttttgacttgcatttgtctgatgattaacgaagaggaacattttttcatttgtttgttggctgct

SEQ ID NO: 1560637 - DNA, 4001 bp, Homo sapiens
ggtaactccggccctcttaacagtcaagggagagggtagttcagtttgcaattaggcagagaagggctgggcagtttcactggcggagttgtgggtggtggtcagtttcccaatgggggactgtaagttttatagagggggctggtcaatttcacaaaggcaagtcgatttcatcttccccaatgcagagagccgacccttctccaggcctaatgctagacgccccccgccctgttcctctgacgcgtacgttacttccggccgggggtcccagccttttcaaacctcaaggtttgcgctcctcctggggacagaggaccagaaggaaggccggcctcagggacctgcgcactgcatccaggctcggggtggcggtttgggcctcaagaccaccgtctcctcttcaccccggggatgcgtcccagactgagttctgaccagagtggccctccagggaggatgcacttttccccaccaagcgtcctggcaccggaggggtggggggaccgacaagcgctagaggcacacgggtaagggggctcccacctgctccaggccgttctccgagacctttctgcgggggggccagatcaccaccaactttccgtcgcccctgctcgctgcgggggaaggggcgctcagctcaccagctggcggcagccaggatgaaaggccggccgcaccccttaaacacacacaggcgttcaccctccgcctccccatgaaagcctccattcaactccaggcacccaggaacccgagggaggagggaggtgaacccagaatggagaagcaggagcccgaaaattcagagggaggacccaggagtgccagaacccagtcagggttccctggaacccgacaaaaaggaagacatctggaatgcccccacccccgcgcagcctgggtggtgtggatcagagagtccatcactcccggtggaggggtggatcacagcgagtaatggagctccagaaggggtaggcaagagacaaaattgagagggggtctgggagcttggagggagagaccccgagaatcggagggccacaggaggggccactgaagttgggcaatcggtgggggcggctggaaccctgggggtcccggcgttgctacgcccgcggcttaccggtgaggctcggcgtaggctccttgaactccgcggtgccatagacgctgcgccgctggcgctgcagttcctgctcgcgctcgcgcacggcgcgcacctcctgctccagcagtgacggagtgaaaggcggcggggcgctgcccagcacccggcacccgccctgcacggccgagcgcggccgtcccccaggctctggcagcctctgcgggcccgcgccgtcccccgcccccgccgaggagccgctccccgccgcggcctcgaagaagcgcttgagttcgcccagcggctgcggcggcgaccgggcgcgcggctcggggaccgcggggcgcgccagcgccgcctgccggtgggcctcccgctcgatgtcccgctgcatctgcgcgcccgcccgcgcccgctccagggcgcgcgggagcgcggggccaggacccggcaggttgagcaccggccgcacgcgcagctcgacgagttcacggcctgcgcggcccgggctcaggccccggctccggcgcaggctctcctcgcgttcgcagctgcggcggatttcgcgctcgatgggcgtctccatgaaccgctcctccgggggacgctggggagcctcggggcacggcggaaaacgcaggtggggggcttccgagcctgacctggaggaggaggtcttagggcctggagggggatgctgcccctggacctccgccctttgcgcttcggacggcccagggtcgtctctgcctggctcaggactctcaaagcccgcagctgtggacagcccggggctctctgcgtcctgctcgactgatggctcgaggacttcgctctcttgctccaggatctccacgtcctttgcggagggcttggggacctcggtgttcagctccgcagcagctctggggcttcgctgtctggccctggggactcctggccctcctcttcagacgaccccagggtttcgttctccggccggtgggggccttcgtgtccagggttggaagcagttcggaagcctcagttcccaaccggggttttgattcccagagcgaggacagagggcactgtgaggcacctgtggcggcagtggcggccgtgggttccaaggcgtcgcccgcaccggcggcttctctgacccgcctctggcctccaggaacggcccccgggggcagggccgggcaccgcccccggcacctgccaggaggactcccgccccgccctggccccgccctcgggacaggggcgcctcggtggggcactcagtttcatcaactagcgcgcccagtcacctcagggcacgggacttcttggaagagggcttccctagacccggccccgctctctggggggccattctgggtgctgggttctactgagcgcaccctggcactttttcagagccatgtccccgtcatcgtcccggagactgggcccagcagcgcgtcggactggggttctgaaccactagccgcttggtgaggtgtcccccgaagccgtattttcgggacccgggcagtcccgcttggtcgtgccagccggcaggcagcgactcctcaggcccctgggccctccctccgatccagccttgcagcgcacagctccggcccgagggggcgccaggagccgccttactggccgctggggtctccctaccaatgcttgggctcagcgaggttcccagccgcgcaccactgcccccacgccaagccgagaagcggcttcccctctcctcccggaaaaatccgggaggtgtccgctgccaagggcactcccggattgagggaggagggagagacggacacagtgcgccgtgggcgcagcttagcggttgcagttgaaaggcggtcaccttgggcccgggcgcctggggaggcccagacaggaaacaggaggcgtccagggtagggggaaagagcagctggggccggatcatgcggttcaagggcaggatcgatgcccttgcgcgggccaccctcccctagggacgttttccactttccccctaatggaagcagactcttcccagaacctgcccccaaccccaccattctggggtgcccagaaggaaaaatacagttaccggccgggcatggaggctcatgcccgtgatgccagcactttgagaggccgaggcgggaggatcacctgaggtcagcagttcgaaaccagcctggccagcatggccaaaccccgtctctactaaaaatacaaaaaaaaaattagccaggcctggtggtgggcgcctgtaatcccagctactcgggaagctgaggtgggagaatcacttgaacctgggaggtggaggttacagtgagccaagatcgcgccactgcactctagcctaggcagcaagagcaaaactctgtctcaaaataaataaataaataaataaataaataagctgtatacttctgggaaaaagttttctctatagcaccttccccactgcatcatctcctggtccttcctccagccatgccaactgggctgggttcttggccccctttcacgggaacatttttttctttttctttttcttttctttctttcttttttttttcttttttttttttttttttttttttgccggtctcagtctttaatcgtggcagggccttacgcacgcgcacacatacacacactcaggcttcagatcttgttgaaagctgcgatatcgacactctgcacgtgctcctcaaatttagtgatctcctcctccagcaagtaagtccccaccttgtcgtcctccaccacacactgaatctgtagcttccggataccgtagcccacgggcatcagcttggaggtcccccagaccagcccgtccagctcgatagagcgcacacaggcctccagctgggccatgtccgtctcatcgtcc

SEQ ID NO: 1560638 - DNA, 4001 bp, Homo sapiens
aggcgggcggatcacgaagtcaggagatcgagaccatcttggctaatacggtgaaaccccgtctctacgaaaaatacaaaaaattagccgggcgtggtggcgggcgcctgtagtcccagctactcaggaggctgaggcaggagaatggcttgaacccgggaggcggagtttgcagtgagccgagatcacgccactgcactccagcctgggcgacagagcaagactccgtctcaaaaaaaaataaataaataaaaatctagaacatggatgtccccttgctttagcagacctagctgatcacacaaggtcctgtattgttaggctgcatcacaggccgcaaagacccaggtatctatccagttgttagaaaccatcctgagagttagataccacttttctgttggaaatacagaccatttcctgaagccgtatggttgaggtaaaacaggccttttgcagtcttatattttgagtaaggccaaaactgcctagtgttacaaaaccagacaaaaagcccaggtacccagtcttgcaggatagaaatgtgtgactaaaatgaagcatcgatctgagaagactacaaatgagcgggaaagattggacaggagcatgctatacattatttagattaatgttgatatttaaggagccaggatattggtttgtttttgaggggtgcccatctactttatgtaagaagctataaactacacttctttcagtttctgcttaatccttgctcaaacaaggaataatttcttattccaaagtagacattggtacatcttttactaggtacataatttgggatgaagtctgataaagctccttagaagtacttacagtacaccctcacaagggtgtaccatctacccatggtttaaacagaaattaaaattctaccttcgtggaaaaatttgccaagttttaatggattcagtgctcattaaaaacttttagcctgtcttgatctttaacataattattggtgtgaaacaatggcttctgtggaaaattaaagttttagtggtttgctatttgtgaaatacaggctttttcatgtatcatattagcatataagctggcttaatcattagtactgatcttcaagttactaagacaccagatatttgttactttgtaatttgagtttttaaaaaaattccgaaattggcttttcgatgtgtgaaaaggactacttattagatgcttgtttttaaatttacattcaattaattaaagctagactctttatattcttaggcttggtatactatttgtatgttttgtagtaagtgtataaaaataatacctttgactttgtataaaaaaaatctttcttgctttaaaagccatgttggatttgcattctagaccgtaataaatataactactttaacataaaaatctatttatgttgtttatcagatattaggggtttttttccctctcctgtcaacctccaaataaaatcgatgctccagaatgatgccctcttatcataattttacaaatacctggctccaaggttactacctgatacaaaaatacaatgctggtctcccaaacaggcaactcacattgacactcacacagcttccactcacacctgcgatcacaaggcagcatcttcgggccctcgtcggccacgatccgctcccagagagcattcgcgcacaatcttatcccatccacgattttgattccttttctcccacttcttcaaccctatccgggacgagaccatcaggtcccacctccaccttcaccttcattttccgcgcaatgcagactgagccctggactcacccatatacagattgaattgtccggtcagtgtttcatcccctctgcattctgagggcgagttagcatctgggtgcatgagttccaaactaacagccaggaccaggcttggagccaagaatcctttggctcgcatcgtggctgggttgaccgcttttctgccctggactacatttcccatcggttctaccgttcggggctacttccgccgagaaccggaagcacgttttcctgtgtcttaccccagataacagagctgccagggataatcaggcctgaccactctagcgggcgagccggccccatagcgagccgctcggcatgagggctctgcgatcctcgttggagaggagcggtaaaaggaaacaagccaggcttggaaatgagaggcatagggaagcccgcagtcgggctctggactacatttcccagaggatcccgcaggccgacgccacgtctcgcgagattttggcttcctcttagccaggtggcgggaccgtttgctgtgccgatttagctgccgccgcgccttggagtcctgaggaacttggctaggctggccccgagcggaaccagagaatgctgagggtgaggaatccggctccggtccttttgtgtgtggagggctgaggagaggagtttgcgtgtgtgatcgcgatggctgccgtgggtctccgtggtctgtgactgtggctgtgtggtgctgactctgggtgatcaggtgggcgcttgtgactgtgcgcgcccggagtgggtgtgtgtgtcctggacgaccctcgttgtgcgtgcggatgtgaagaaccggtgactgtgtggttggactgcgtgtcccggggtgggtgtgtgactttgcgtgtctgtgcagtaccttgtgtgcgtgagttgcaggtctgtggctgtgcaagtgcaacttgtgtggccccttggtgtatgtgagagaggagagtgtgattggctgtgaggcagtgggtaagtggatatgcggaggcatgtgtgcgattgggactttgtgtgtccccttgagagaaaaaactctttaggcagttagggtgggaccttggtaaaagtcctttaaacagagaaacagcctgaaaaatcaggctgcaggcatacataaggaaaactccacaggggggttgtcctgaagacattcctcagctgcactgataagggaccgaggcccaacatagaaacgcctttgtcctttgtgtgaccagcgggcttccacgaaatagtcgcttcttttgtgggcatgtacacggtgggctctgttagattttgaagggaaggcgagggttaaagaaagagagagagttggcggctctatggcggggaccaactaaatgccagagcccactgccgcttccaggctggggtaattacaggcctgggcaggaggggtctgggcggtatggcttgttgcctgggagaaagttgataaggatgtttcttgggcttttgcccagcaggatgtgataaggaagtcaggcggttgggaaggatgtttcgcacagcccaaacccgggtggaatgtttccctctgaccagggtctgtgaaatggtgggggcttacgaaacggtgcagcttggactaacaggttccggcggccactttccttttttggacatgctttagactgtgagcgcggcctctttgaatcataacttcaccccctcattggtcccgggccaagctttcacttcagcccctgattggtcccgggccaaactttcacttcagctcctgattggtcccggcccaaactttcacttcagctcctgattggtcccgggccaaactttcacttcagcccctaattggtcccgggccaaactttcacttcagctcctgattggtcccgggccaaactttcacttcagcccctgattggtcccgggccaaactttcacttcagcccctgattggtcctgggccaaactttcacttcagcctgggattggtcccgggctaaggtcccagggccaagctgggtagtgctttcttcaagacagcccacgttcctccccttcccagttaataaacccccccagattcagcctcctagttggcaaccctcttttgggtccctccgctggggagagctttcttcttttgcttattaaacttccgctccgacctcatcctttgtgtccctgttccttaattttcttggccgtgagagaaagaaggcaaa

SEQ ID NO: 1560639 - DNA, 4001 bp, Homo sapiens
ccagtactcaacatcaaggaaaggccttggggccgggcgcagtgactcgcacctgcaatcccagcactttgggaggctgaggcgggtgaatcacttgaggtcaggagttcgagacgagcgtgggcaacatggtgaaaccctgtctcttctaaaaatagaaaaattagccagccacggtggcgggcgcctgtaatcccagctactcagggggctgaggcaggagaatcacttgaacccgggaggcagaggttgcagtgagctgaaatcgcgccactgcactttagcctagatgacagagtgcaacttggtctcaaaaaaaaaaaaaaaaaaatcttggagcagcgttggagaagctccctctgtcccctctctactggctgctgcccctctgaaatggcctttcccttcccaacagatccttgagatttgtttagaagagtctggagagtgagcgcagaggctgactcactgcgtgaccttgctctgccagttaggagataaccttcccatagatgccactttccacatcagtagtttttttttttaagggaaggggagctgggggagaaggcttttggggccttcctactgtaaaagctcaagttccttacactcactgctttctctctattacatcatcctgctccctccccacccccaaggctcttagtctgaaatgatctaatttctaccaccggaatgacttgttctctacagtattctcagaacttgctacgtggtaggaggtcaagaacacactgaataacccacctcttcccaccctcctaagcctcctgtcccatccatgctctactatttctcgtaattattgccttctaatacaatatcgttactaaacatctttattgcctgtctcatcctgccaaaatgtaagctccaaggcagatttattttttaagagacagggtctcgccatgttgaccaggctggactccaggtttccaacaatccttccacctcagccgccagagtagctgggagtacagcgcgcgccaccatgcccagcttcaaaggcagaaatttttgtctgttttgttcactgccatatccccagaacctagaacactctctggcaaataataagcaatcaagaagtatttgtctaagaaaggaatgaattctgatcccagtgaggctcgtaaccagacggcagagcgcctggggcgaggaggtattacaaaactcgtgccaagtaaggagaaaactaacagcgccgtaacactactcaggtccctcccggccccggatttctatgaccggcgttctaaagtggataatcctaggctcatcgggttcaactcctctcatctaacggatcctaagaaatccgaaagggagaggactttggctcaaggttcccaagctagtggtgagcagacaaggattcgaactgcacccttcgagaaacttcatgtctgaaaaagttgcgaaacacaagggcgctcaagtgatcccacggttcagcccgctgcttgcacaggtgggaaacctgaggccgaggcggggactcccattacctcgataatcttgataaagcgcgggaacaccgggttgcgggtgatggcgatgagcggcaggtgcggaaacacatcggggatcgtcatgggcgtgagcgccgttatgaccgggccttccccggcgcccgcgctgccccccgcgccgccggctccttcctccgcgccgccctcggaggcgtcctcgccccccgagaatgcgcctccgccgcggctgctcgcttcccaaaacccccgccattggcccccaattgccgggcctcggccccacagtgcccaaggaggagaggcgtcgcaggtccgctggcctcggagcaaccacgctcctgctgcagtgggaacccgccccccggcggcggccagcatcggccgccgcagcacccagcaccgcgccgctccccacagtcgcacgtagccagtgctcgccgccatagcccggccatactggcggctcacacaactcgcgtcatttccgctcgccgcgaaacgcacgtgacgcccggcgcgtgcctcggtacccgatgggcgcgtggctcgaaacagccgcttcagggagctgggcctacgcggagaagagggggcggagttcgagcatcggatcgtctccgcctcttccggtctcccactttatgcgctgaaggccttttccggtcacgtggaaggctgtgagcaggcgccagcgcccgtacaaaacactggtagtgttgcaaacgcaacgtttaggaactcatgagcagcctgtgcacatgcttaggcgcgcggacaacatgcgcatgctcagactctagactggccacgggtggccgggtgcgcatactcaggctctgagcgcactttggggtgcgcggattcgggcttcccgggattcgtctgcgcatgctcaagattcaggcggagcgccgggctgcagtgcgcggaggcccgctcccgggactcattgatgcgcatgcgcagggcttcagcctgcacgtactcggattgtgcagcgactccccgtggcggttgaggggcagtggtggcggcggaagcccaagtcgatgctgatgttgatgctggtggcggctgtgaccatgtggctccgaccgctggtcacagctcagctctgtcggtggggctgccaggactcctggggctggggtgctgccgggggtcgggagggtgctggttcatcttggagccgaggcctgctccccaacctcactgaggctccccttttactctttttaggaatcgaacttgacgcctcgctcaccctactccaccccatcctcccagcccgatattaagctctcctacctctttttttttttttttttgagacggagtctcgctctgtcgcccaggctgcagtgcagtggcgcgatctcggctcactgcaagctccgcctcccggattcacgccattctcctgcctcagcctcctgagtagctgggactacaggcgcctgccaccacgcccggctaatttttttttgtatttttagtaaagacgggggtttcaccgtattagccaggatggtcccgatctcctgacctcgtgacccgcctgcctcggcctcccaaagtgctgggattacaggcgtgagccaccacgccgggcctagccctcccacttctttttctttttggagccggagtttttgctctgtttcccagggtggagtgcagtggcgcgatctctgctcactgcaacccccgcctcccaaagtgctgggattgcaggcgtgagccaccgcgcccagccttacccagcacattttgaaatttcagtaaatgttaggttagtgcatactccaacctgccatggggaccagttgctgaaactccgttcctgccctcagggaactcccatctggactaaactgtcacattcagtagggacctgtgagctgtattcttagggtgtatggcctcatttgatgtttacaggaagattcataatgattccttaaccttattttattttatttattattattttttgtacagatggggtctcactggctgggtgcagtggctcacgcctgtaatcccaacactttgagaggtagaggtgggcagatcactcacttgaggtcaagagttccagaccagcctggccaacatgatgaaacctcgtctctactaaaaatacaaaaattagccaggcttggtggcaggtgcctgtaatcccagctacttgggaggctgaggcagaaaaatcgcttgaattcaggaggtggaggttgcagtgagctgagatcgcactccagcctgggtgacaaagggagactctgtctcaaaggaaaaaaaaaaaaaaagagatggggtctcactgttttgcccaggctggtcttgaactcctaggctccagtgatcctcctgcctcagcctcccaaagtgttgggattacaggcatgagccacccatgcccagccatacccttattttatttttttgagatggagtcttgttctcgtcgcccag

SEQ ID NO: 1560640 - DNA, 4001 bp, Homo sapiens
agatgacagagtgcaacttggtctcaaaaaaaaaaaaaaaaaaatcttggagcagcgttggagaagctccctctgtcccctctctactggctgctgcccctctgaaatggcctttcccttcccaacagatccttgagatttgtttagaagagtctggagagtgagcgcagaggctgactcactgcgtgaccttgctctgccagttaggagataaccttcccatagatgccactttccacatcagtagtttttttttttaagggaaggggagctgggggagaaggcttttggggccttcctactgtaaaagctcaagttccttacactcactgctttctctctattacatcatcctgctccctccccacccccaaggctcttagtctgaaatgatctaatttctaccaccggaatgacttgttctctacagtattctcagaacttgctacgtggtaggaggtcaagaacacactgaataacccacctcttcccaccctcctaagcctcctgtcccatccatgctctactatttctcgtaattattgccttctaatacaatatcgttactaaacatctttattgcctgtctcatcctgccaaaatgtaagctccaaggcagatttattttttaagagacagggtctcgccatgttgaccaggctggactccaggtttccaacaatccttccacctcagccgccagagtagctgggagtacagcgcgcgccaccatgcccagcttcaaaggcagaaatttttgtctgttttgttcactgccatatccccagaacctagaacactctctggcaaataataagcaatcaagaagtatttgtctaagaaaggaatgaattctgatcccagtgaggctcgtaaccagacggcagagcgcctggggcgaggaggtattacaaaactcgtgccaagtaaggagaaaactaacagcgccgtaacactactcaggtccctcccggccccggatttctatgaccggcgttctaaagtggataatcctaggctcatcgggttcaactcctctcatctaacggatcctaagaaatccgaaagggagaggactttggctcaaggttcccaagctagtggtgagcagacaaggattcgaactgcacccttcgagaaacttcatgtctgaaaaagttgcgaaacacaagggcgctcaagtgatcccacggttcagcccgctgcttgcacaggtgggaaacctgaggccgaggcggggactcccattacctcgataatcttgataaagcgcgggaacaccgggttgcgggtgatggcgatgagcggcaggtgcggaaacacatcggggatcgtcatgggcgtgagcgccgttatgaccgggccttccccggcgcccgcgctgccccccgcgccgccggctccttcctccgcgccgccctcggaggcgtcctcgccccccgagaatgcgcctccgccgcggctgctcgcttcccaaaacccccgccattggcccccaattgccgggcctcggccccacagtgcccaaggaggagaggcgtcgcaggtccgctggcctcggagcaaccacgctcctgctgcagtgggaacccgccccccggcggcggccagcatcggccgccgcagcacccagcaccgcgccgctccccacagtcgcacgtagccagtgctcgccgccatagcccggccatactggcggctcacacaactcgcgtcatttccgctcgccgcgaaacgcacgtgacgcccggcgcgtgcctcggtacccgatgggcgcgtggctcgaaacagccgcttcagggagctgggcctacgcggagaagagggggcggagttcgagcatcggatcgtctccgcctcttccggtctcccactttatgcgctgaaggccttttccggtcacgtggaaggctgtgagcaggcgccagcgcccgtacaaaacactggtagtgttgcaaacgcaacgtttaggaactcatgagcagcctgtgcacatgcttaggcgcgcggacaacatgcgcatgctcagactctagactggccacgggtggccgggtgcgcatactcaggctctgagcgcactttggggtgcgcggattcgggcttcccgggattcgtctgcgcatgctcaagattcaggcggagcgccgggctgcagtgcgcggaggcccgctcccgggactcattgatgcgcatgcgcagggcttcagcctgcacgtactcggattgtgcagcgactccccgtggcggttgaggggcagtggtggcggcggaagcccaagtcgatgctgatgttgatgctggtggcggctgtgaccatgtggctccgaccgctggtcacagctcagctctgtcggtggggctgccaggactcctggggctggggtgctgccgggggtcgggagggtgctggttcatcttggagccgaggcctgctccccaacctcactgaggctccccttttactctttttaggaatcgaacttgacgcctcgctcaccctactccaccccatcctcccagcccgatattaagctctcctacctctttttttttttttttttgagacggagtctcgctctgtcgcccaggctgcagtgcagtggcgcgatctcggctcactgcaagctccgcctcccggattcacgccattctcctgcctcagcctcctgagtagctgggactacaggcgcctgccaccacgcccggctaatttttttttgtatttttagtaaagacgggggtttcaccgtattagccaggatggtcccgatctcctgacctcgtgacccgcctgcctcggcctcccaaagtgctgggattacaggcgtgagccaccacgccgggcctagccctcccacttctttttctttttggagccggagtttttgctctgtttcccagggtggagtgcagtggcgcgatctctgctcactgcaacccccgcctcccaaagtgctgggattgcaggcgtgagccaccgcgcccagccttacccagcacattttgaaatttcagtaaatgttaggttagtgcatactccaacctgccatggggaccagttgctgaaactccgttcctgccctcagggaactcccatctggactaaactgtcacattcagtagggacctgtgagctgtattcttagggtgtatggcctcatttgatgtttacaggaagattcataatgattccttaaccttattttattttatttattattattttttgtacagatggggtctcactggctgggtgcagtggctcacgcctgtaatcccaacactttgagaggtagaggtgggcagatcactcacttgaggtcaagagttccagaccagcctggccaacatgatgaaacctcgtctctactaaaaatacaaaaattagccaggcttggtggcaggtgcctgtaatcccagctacttgggaggctgaggcagaaaaatcgcttgaattcaggaggtggaggttgcagtgagctgagatcgcactccagcctgggtgacaaagggagactctgtctcaaaggaaaaaaaaaaaaaaagagatggggtctcactgttttgcccaggctggtcttgaactcctaggctccagtgatcctcctgcctcagcctcccaaagtgttgggattacaggcatgagccacccatgcccagccatacccttattttatttttttgagatggagtcttgttctcgtcgcccaggctggagtacaatgtcacggtctcggctcactgcaacctccgcctcccaagttcaagcaattctcctgcctcagcctccagagtagttgggattatgggcgcctgccaccacgtgcagctaattttttgtgtttttagtagagacagggttccaccatgttgcccaggttggtctcgaactcctgacctcgtgattcacttgcctcggcctcccaacgtgctgggcttacaggcgtgtgccaccgcgcccggccaacacccttattttatagatacgaaagcatact

SEQ ID NO: 1560641 - DNA, 4001 bp, Homo sapiens
cttgaggtcaggagttcgagacgagcgtgggcaacatggtgaaaccctgtctcttctaaaaatagaaaaattagccagccacggtggcgggcgcctgtaatcccagctactcagggggctgaggcaggagaatcacttgaacccgggaggcagaggttgcagtgagctgaaatcgcgccactgcactttagcctagatgacagagtgcaacttggtctcaaaaaaaaaaaaaaaaaaatcttggagcagcgttggagaagctccctctgtcccctctctactggctgctgcccctctgaaatggcctttcccttcccaacagatccttgagatttgtttagaagagtctggagagtgagcgcagaggctgactcactgcgtgaccttgctctgccagttaggagataaccttcccatagatgccactttccacatcagtagtttttttttttaagggaaggggagctgggggagaaggcttttggggccttcctactgtaaaagctcaagttccttacactcactgctttctctctattacatcatcctgctccctccccacccccaaggctcttagtctgaaatgatctaatttctaccaccggaatgacttgttctctacagtattctcagaacttgctacgtggtaggaggtcaagaacacactgaataacccacctcttcccaccctcctaagcctcctgtcccatccatgctctactatttctcgtaattattgccttctaatacaatatcgttactaaacatctttattgcctgtctcatcctgccaaaatgtaagctccaaggcagatttattttttaagagacagggtctcgccatgttgaccaggctggactccaggtttccaacaatccttccacctcagccgccagagtagctgggagtacagcgcgcgccaccatgcccagcttcaaaggcagaaatttttgtctgttttgttcactgccatatccccagaacctagaacactctctggcaaataataagcaatcaagaagtatttgtctaagaaaggaatgaattctgatcccagtgaggctcgtaaccagacggcagagcgcctggggcgaggaggtattacaaaactcgtgccaagtaaggagaaaactaacagcgccgtaacactactcaggtccctcccggccccggatttctatgaccggcgttctaaagtggataatcctaggctcatcgggttcaactcctctcatctaacggatcctaagaaatccgaaagggagaggactttggctcaaggttcccaagctagtggtgagcagacaaggattcgaactgcacccttcgagaaacttcatgtctgaaaaagttgcgaaacacaagggcgctcaagtgatcccacggttcagcccgctgcttgcacaggtgggaaacctgaggccgaggcggggactcccattacctcgataatcttgataaagcgcgggaacaccgggttgcgggtgatggcgatgagcggcaggtgcggaaacacatcggggatcgtcatgggcgtgagcgccgttatgaccgggccttccccggcgcccgcgctgccccccgcgccgccggctccttcctccgcgccgccctcggaggcgtcctcgccccccgagaatgcgcctccgccgcggctgctcgcttcccaaaacccccgccattggcccccaattgccgggcctcggccccacagtgcccaaggaggagaggcgtcgcaggtccgctggcctcggagcaaccacgctcctgctgcagtgggaacccgccccccggcggcggccagcatcggccgccgcagcacccagcaccgcgccgctccccacagtcgcacgtagccagtgctcgccgccatagcccggccatactggcggctcacacaactcgcgtcatttccgctcgccgcgaaacgcacgtgacgcccggcgcgtgcctcggtacccgatgggcgcgtggctcgaaacagccgcttcagggagctgggcctacgcggagaagagggggcggagttcgagcatcggatcgtctccgcctcttccggtctcccactttatgcgctgaaggccttttccggtcacgtggaaggctgtgagcaggcgccagcgcccgtacaaaacactggtagtgttgcaaacgcaacgtttaggaactcatgagcagcctgtgcacatgcttaggcgcgcggacaacatgcgcatgctcagactctagactggccacgggtggccgggtgcgcatactcaggctctgagcgcactttggggtgcgcggattcgggcttcccgggattcgtctgcgcatgctcaagattcaggcggagcgccgggctgcagtgcgcggaggcccgctcccgggactcattgatgcgcatgcgcagggcttcagcctgcacgtactcggattgtgcagcgactccccgtggcggttgaggggcagtggtggcggcggaagcccaagtcgatgctgatgttgatgctggtggcggctgtgaccatgtggctccgaccgctggtcacagctcagctctgtcggtggggctgccaggactcctggggctggggtgctgccgggggtcgggagggtgctggttcatcttggagccgaggcctgctccccaacctcactgaggctccccttttactctttttaggaatcgaacttgacgcctcgctcaccctactccaccccatcctcccagcccgatattaagctctcctacctctttttttttttttttttgagacggagtctcgctctgtcgcccaggctgcagtgcagtggcgcgatctcggctcactgcaagctccgcctcccggattcacgccattctcctgcctcagcctcctgagtagctgggactacaggcgcctgccaccacgcccggctaatttttttttgtatttttagtaaagacgggggtttcaccgtattagccaggatggtcccgatctcctgacctcgtgacccgcctgcctcggcctcccaaagtgctgggattacaggcgtgagccaccacgccgggcctagccctcccacttctttttctttttggagccggagtttttgctctgtttcccagggtggagtgcagtggcgcgatctctgctcactgcaacccccgcctcccaaagtgctgggattgcaggcgtgagccaccgcgcccagccttacccagcacattttgaaatttcagtaaatgttaggttagtgcatactccaacctgccatggggaccagttgctgaaactccgttcctgccctcagggaactcccatctggactaaactgtcacattcagtagggacctgtgagctgtattcttagggtgtatggcctcatttgatgtttacaggaagattcataatgattccttaaccttattttattttatttattattattttttgtacagatggggtctcactggctgggtgcagtggctcacgcctgtaatcccaacactttgagaggtagaggtgggcagatcactcacttgaggtcaagagttccagaccagcctggccaacatgatgaaacctcgtctctactaaaaatacaaaaattagccaggcttggtggcaggtgcctgtaatcccagctacttgggaggctgaggcagaaaaatcgcttgaattcaggaggtggaggttgcagtgagctgagatcgcactccagcctgggtgacaaagggagactctgtctcaaaggaaaaaaaaaaaaaaagagatggggtctcactgttttgcccaggctggtcttgaactcctaggctccagtgatcctcctgcctcagcctcccaaagtgttgggattacaggcatgagccacccatgcccagccatacccttattttatttttttgagatggagtcttgttctcgtcgcccaggctggagtacaatgtcacggtctcggctcactgcaacctccgcctcccaagttcaagcaattctcctgcctcagcctccagagtagttgggat

SEQ ID NO: 1560642 - DNA, 4001 bp, Homo sapiens
ctcctgtccgtgccccttaaggccttgctgatctctcctcctcacaagcccactttcctctttagaggctctggcctcgtactgccttgaggtttttactttccgtttcctctgcctggaaggctctctgttcctatcctcagcattcaggcctctgctcacatacattatcacctccttggaggacattccccacctaaatcatcccccatcaccctctatcaggtagcttgttttgttcattgcttcgcagtgtcttgtgggagatagggggaagcagggtccctgttgccccctgggggccccacttacccaggatgatgacaacagtcttgaccaggctgagcgtggtctctcggtagcgggggtggcagctgacatgctctgccatgcgctgcactcgccgccgcacgtagaagaaaatgcgggtgtacacagccaccatgagcaggaagacaagcaggctcgacagagcccagacggccaaataggagcggctgagcaggggtgccatgcgtgagcagcggtccagggcacagaggcagtgccaggagtgggcaggcagcagccccaggcccagggcagccacccacacgcccacaatgagcatgaccacgcggccacggggcaggcggctgtgcagctgcacggccatcacactgcggtgccgctccacggcgatggccagcagtgtggccaccgacgcagtgaggcttgtgtccagcaagccctgccgcaggaaccagccctcaagtgaaagtcgggctgtgcggggaccagtgtggaacatgaggaagaggtaggccacgcccgcgaagaggtcagccgcggccagattgccgagcaggtagtagatgggctggtggaagcggcggttggaggcgatggctgctatgaccagcagattggtcagcagcaccagcacgctgacggtcagccccagtgccaccacgaccacatccttgggccgccagtgggagctgagctctttgccactgttgttatagaagaagccgatggtctcgttgtagtagcactggcccatgatgaccatctggggacacaagagatcagtgcatgtggcacttcttggaaggacacagggaggggcggcagctgcagaggagggtcagcgcaggaaggacaagggtctcaaattcagatacctcgaagcaaagtggcagtggtgaggactacggtggcctggaaaaagcaagctccatggggctggggtggaggtggaggagcagctgtttcttacctactaataagacctgtgtgcaagacatcacccaagtcaataggtttttgaaccagaagtgaaacaaaacccatctatggtcgaatcccagcccacctgccgccaatgtgtgacccggtttgggttgtggggagaggagggttagggaaagacaaaggggtgtgagctgcgggaagagatgagggaggatcactttggtgccggagtcagtgtagggagcagagacccgggagcgtgtgcacacaagggtgaggtcacttgctagaaccctgcgagggggcggtgccgaggcgtggaggtgatcggagtggacagagaggcggccccagaagttagtcggcgggatttgggcgcgagtgcttcccaagcgggcggggcaataggctgttccgggtgggacggaggacactggcggtctccgggacaaagacagcggttggggaagggatggatggccgggcctccaggcgtctccagactggggaaggggtagggggttaagggatcagagggcggcgtcctggccccgcaggcacgtgccgcgcccttcccccgggcccaggcccgcacccgcccgcctcccgtccgtgcaggcctcacctgggcctccagtcacgccgcagacaaggcgggctcgcgggggttcggggcgggctcgaggcccatggcccggcgactgcggcgggagcggtagagcgtccgggtgcgccctgtgcgggttgctgagagggcgcgggaggcggggtctccccggcgccccgcccccaccacctgggggagccctgccccgccccgccacctgggggagccccgcctccacggccgcgtcgggggcggtgtcgcccggaaccgcagcccccctgtttcctccccgcctcgcggcccctcagtcgcccctatttccggcgcgggacccccaccccggtacctgcacacctcatgcgcccgcagtttcgagcctgcggggctgagtcactcggcgacccgaaaattcccgccgtgaccccgcgctgcccgggcggagctccaggtggtcttgggtccgcgcccccgctccggacccccaaccctcccagccccaccccgctctcttcttcgtgtccaatcggccgccgagttacaagccactccctgatccgacttggctcccaccgcccggacccccgcccagcttcggctttgccagctcgcagtatcagcgagccgcggcctcctgtgcgaggcccacctctgcggccccagctgatcatcgggcgcacgctagggttttgcaatcccgcccccgtacccctcaccctgggacagcgctgccccctgcaaagcccggccctgccctgccctgccctgtggcttcctccctcggcctccctgcggcggccccgggctcccacggtccggagcacacagccccattgtcccggttatcggtactttgttatactgtatttgattatgcaggaccggatcggggacgcagagctccgggagggccgggctggcgtgactcagccgggtgctgcgacccagctccaactgcctttacgtaggtgctgcagggtgtttgatgatgcaagaaggaggccttgaggccgggcgcagtggctcacgcctgtaatccctgcattttgggaggccgatgcgggacgatcacgagatcaggagatcgagaccatcctggccaacatgctgaaaccccgtctctactaaaaatacaaaaaaattagccgggcatggtggcaggcgcctgtagtcccagctactcgggaggctgaggcaggagaatcgcttgaacccgggaggtggaggttgcagtgagcggagatcgtgccactgcactccaacctggagacagagcaaaactccgtctcaaaaaaaaaaaaaaaaaaaaaaaaaaaagaggccttgattcccctaatctgtaaaatgggggcaaggagtgctacccatgctggcctctcccctagcagagatgcacccaagggcatataggacacagtttattagaggccatcagacctcaggcaccaccagcatgtggagtctgagctgcccacctcctccaggaaggtcacttcgagtccgtgaaggaggcaggcaggtgtgggggagtgaccacaaccaaagtagcaaaagcacccctgtcccaggtgtcagagactagggtggaccccaaggatctcataacctgcactgaccctgagtattgaccctgagtgacctctgagcccgagtggccctgatgcttggcagtgacctgtgtctagtggggggactctgggacattatccccaaaagggttttaggcctcccctaggtcatgtattaaatagtttttccttataggaaccctctggacctctcccagcattgaactcctggcggggtgtttggccactaggtggtgggaggtagggatatatgggtccgtcttcacaatctgggcctcttccttatttaaggtgccagggtggtcagagatggtcctcggcttcctcaggctggacgtccgggcagcaggtggccctgggcacagcctcgctgtccaatttcgagagtagccgggctgtctcctgggtaatctcaaaatgcttgggcagcggggtgcggcgcagggggctgccctcaggggaggcagctgcagggctgggcccccgcccccgcaaactccctctgggcactgatgtgatgggggtctcctcgcacagcttggaagccaccagggccagactggacagctggt

SEQ ID NO: 1560643 - DNA, 4001 bp, Homo sapiens
atatgataatgaaggttgtaatccttctcttattctccctgttttcatcctacttttaagtaataaatttggcattagtgggaggggagcagggaggaaggagaagtcacctgccccccaaagctggggcctgacagggacccacgcagagtcccctgccgggggcagacaggagaagagaatgaggggtgtggaccctccgtggggttgatcaattcagggggccaggccctggagagcaggtggagggcacggagctttcaggctgtgagccagggtgaaggagtggggtctggggtcaggttagactcatgccagcccttggggtgttggagagagaagcagaaaccaatggtctgtccccaaacagcatggaggtcaacggcccggaatagacattcaccctcaggtgtgccccactggatccgacctcctctaagcagtgactccctaccaggataagggagccgggcaagcagagaggggaagagagaaagacagagagagatagagaaagacagagagagtgagagagagagagagagagagagagagacagacagagagagagagagcgcgcgagccagccatcttggcagccattttgaacccctccccctcctgcccccaggcacacatgttgggaagtgggatgtgggaagacagaccccagctctgagtccggtggaagccaggcggaagggggggccctgcctggaactgggatacagaaacacccacgcagctggcatggctgggggtggatgggggttggaacaggaagaaagggtccaggcaggtacagtgaggtgttggccagggatggggcagtgtgaggacccggactggaagtgtagagacaggggtgtgtgtagccagcggctgtcttcagatgggggccaggggtgcactggagagatacctgggagggcattttctggacacggctggagcaaacacagcatccccccaccccaccacttcaggcctggactcgggtcccaggaccgtcagatgggaggatgacaaccaaaccctcgcagctcaatccaatgcgcacctggggtgggggtggggagctgtcctcaaagcacgaataatccgagtggatcaaacctgccggcctcccgtgctttaacccggcaccacggagagaaggtgctgcccggctgcaccccctcctcctgacagcggcgccccccggactgcggccggctggacacccagacggacccctccccatcccccgcgccactgcctcccagagaaaaacaaccccctcgcccagcatcctgtggtgccagcccccgacacggctcctctggggcgcggggccggcgcgcggcgcgcacacgcaccccctccgctcacacccagacacctacacaaacagggcgccaagcacccgcgcgcacacgcaccggggacacgcaggcaccgccgcgccgcttccccacaaaggctggcgcgcgcgcgggcacacgcagccacgcgcgggcacactcgcggtcccctccccccgccaggcaccctgcggtagcccgtccgcacccccgcgccccgggcgctccgtgggggccgcccctcccaggcccctcgccagtgggggtgaggtgcgggctgcccccgacgcccctcccgctcaggtgcggtgccccgcgcggctcccgtgtcccctcccccctcgcggccaggacaggccccggcctcccatccttcccgcctcccctcttccacgcgccccgcacacctggcccaggtgcggcttcgcccctcgccctgggcccgcagacactcacctgtccagcgcctctctggggtcggcccagcgtgtctctcctgcggctcggcgaacccgggccccccgcccggcacatctcccggagccggggctggggggaagcgggtaggaggtggcgggacgagggcggcctccgtgtcccttccttcccctggcccagcaccgccgccgaccaaaaattaggaaaaaaaaaaaaaaagaaaagaaaagaaaaaaaagaggcggattacacggatccaaaggcggccccctcgcggcggcggaggctcgggactgggggcgatcgggtctgcgcccctcccggggagggaggcggtggggcgggggcggcgtcagagcgccgggggctggggcgaggcggagcgccccgaggcggcgccggcagcggcccgcatctcccccgcagctccgcggccccgacggaggcggcacgtgtgcgcccaggcgacttcccagccccctccgacgccggcggtggacgaggggttaacggggcagccggggcgcccctgcaggcccccgccgcccggcggcgccgctccggggcccgcgcggccccatcagccggggcctcctcggcagacggcggggcgggggcaccgcagcgccgacagctcccgcgccgacggctcgggctccccgcagtggccgcggggagctcgggttgggggcgggcggcgcggagctggcggaggggggcggcgcggctggaggcgggtgccgcggcgtcgcgcccccggtgcggccggagggggggcgccgggccgggcccgtgggcaccgcaggacgcgcggaccgagccggcgccgggcaccagcaatgacaagccgcctgctcgccccgctccccggcgcacccgctccgggaggggggcggtgggcgcgcgcaaaacccggcccggagtcgccgcccgggactggccgccgcaacccgcttgagcgccccaggagccggcccgaaaacccgggctggactttccttcctttcgcctcctctcgcctcctccctggaaaagcagggagagggaaagcgacgtgctggagccccgcgttggagcggggagtgggggaagggagacaggcgtaaggaagacccggagcggattttccagtgaagtataaggaaaggcgccgagcccggggaaggagggcgcaaatggggagatctggaagggttgtgcaaaacccgagttggattagataaagatgggaggaacggtgttggagcggggggttggggggtagatgcgacatggccaaatgcacccggggcacgcaaatttcgggccggattctttctcgggagacggagtaatgcgtcaggcctaacgcagtggaaacaagcaagacccggcccggaactcccgggacctgggttcgcatggtggggggttctggaagggggatgcttagtggctgaggcgacttgggctgccctcatcttcctggcagcgacgtgcaagggggacgggcaaaaggaggactggactcgggtacgaagggatttggcgcgctggctgcaccggagcggacaggtaaaagcggtttctggatccaggggcgctgcgaagggaatgcgatgaggccgctaccctgggagaccagacctacaataaaaggcgagggaggcacgcaaagccaggactggagcgcgggacgggatgagaccctcagcagaagatcctgggccaccgggacaggggcttggagctgaccgggcagcaggggcggagggaagcgttagggggaggtttgtacctgtaaacgcctcaaagtcttgcttttggggagggggtgcgaggggaaaaattgaattttatgttctctaaaagagtaaaaacccggcatggattttcaacacctaacaactccattgcagctggtggactctaagaagtagggcaagaagcaggcttgggttcccaggcatcagaccaagtgaggcgaggggcaggtttcgggttgaggctgcagagggagcccccgcaccccctctctggggtggggaaggctgttggacccggcttggctctctggagagcgaaagttatgactgccaagacctatagctggggctataaaactgggccccaagccaaaaataggcacttcggcagaacaggcaactttgtgcagggtgggggctggagggaaatggaagtgggaagaatcctggagtggagggaacaggggggaggggg

SEQ ID NO: 1560644 - DNA, 4001 bp, Homo sapiens
aggctctgacccaatgccctttaggaggtgggcctttagaagagactccccagcctcatgggaacccctcccccatggcacttagaagggtccccactagtttttaggggacaccatcctctttcccaaggggcccccatccctaccagacccttcccctgagtcgcttcctccatggcctctgcaggggcccctctctctgtccccatgggctgtggtgttggtgtctggttgggctgatagccaagccctccttctctgccaactgcctctccctccttccccctcttcccagccggtctgcctcccagttctcctcttccctcccccaaggctacccccagtccccagcgctttagggctcaacacagtcacacctgcttgcatccattctcccagccccatctcacctgtgaaagcgccctatggcttcccccaggctgcatccacgcctgaagactcacagccgctcctggcagccagcagggcagggatggtcacccccattgtgcagatgtggaaactgaggcccaggcaggcgagggtaggcactctgggtccagcaccccaaccacgacactcactctgcagtgtgatatggggtgatggttgccagaggtcctagatacccagagtcacccatgctgtcacccttaggaagcacaacccagccgcagcctccatcctggcaccacacacacacacacacacacacacacacaaccatggcatagcgttcacccatcccacagtgaagaccgagcacctgccgacttccaggcgctgtgctgggcgccactttgcagtaaacaagaggggcccccttgttcagacaggtgtccaacacacacaacacatgtcactgcatactcacacacagtgggctcatagcctgtcagagacaccaaacagatcaaacaagtccccacccccaccccaggccaaacagagagagacatgtcaggagaccctacacacatcacagtcccacacaagcccccacaccgctacagtcagggacacacagtcaggcctgcaacacacttaagagtcacagaaaagagtcaccgcacacaatgggggtcacagaactcatcacagcgtcacacccccaattacaaggcactcagcgacagccacacacacactaacagtctcttattcacaccaacagtcacaggggagagacaaggtgccatctacaaccacatggccacatccatggaccatgacacagactcacaatgccacacaagaaaggtgcacagcgcacgaccacagccacacacacatacacaccatcagaatgaacacacaacaggagccacacaatgacagtcctatgcacacaaccacacgaacaccaagacagtcacacacagagacagcagccacacggggggccaatggcagtcacagcatagccagacacacacacacaaaccatcagagtgacacccacaacgacagccgcacaatgacagtgacacacacacacacacacccgcggacctcccgaaaccacacaatcccagtcatgcagccacacgatgacagttacacaaccacacacagacacacaatgacaaccacacaatcacagttacccacagccgccctcaccaccggtgctggctcctcggcccggggtcccctcccccagcccggtcccctcccccagctcgccgcctcccctcccccgcccctccccgcgctggacccagagggacccaaccctcaggaaccggagaccgacaccgggggtgggaagcccacgggaggggatgaggggcgcccccaccccctcctctcaccgcgtcgaggccgccgccgcctgagcccccgctccgcctagactgccccggcgcggcgggatggacagacggactgccagccaggctggcagacgcgaagaccgagacgcggtcggccgggcctggccgcgccgcgcagactccgaggtggagggaggggcggggcctccgggcgtctcatttgcatagccccgtggggcggggcctccgtgatcttggaggcggggcgtgttagcatcgattgtaggaaggaaccaagaatggaagtagagagggaggaccctggggtgggcggggctccgagggtaataggagggaggggcttcagagtatgtccctgggccgcgcctctccctctctgggcctcagtttccccattcgccagggccccccagaaaggaaggctctgtggccagtgtggaagtctgtctggctgctcgtgtctggacagaatgactccttgccttgtcatatattaaatctggcttcagatgtcccctgattccaagcccacacatcccgaatgacccctggggtctctacacccctcccccccaacaatgaggggtaaactaggagggcagggggattcctaggcacaggaagcagcaagactaacagtcggggctagaggagggtctgggctagtttattttctctctggaggggtcttcagggagagcagtcccggctgctcaagctgtggagagagagggtgggtcagggcctggccaggtccaggggactccggggctgcaggtcagggaccgcatgcccagatcaggatctgggcctgttctgagggtctagactgtgggagtcaagggcaggtcaggagggaaatgggtggagggggggactggggaggatctgcaccgggtgggaaggagcggccgctcttgctgaaaggtggctgggagaggtcctggtcacagtcggagtcagagtcccaggaggggagtggagggctcaggcactggtgccccttgtggcctgcaggagggacaggttccctgaatgtgaccctcaagtaacccccaaatataggccctgtgtcccttcatagtatacctcattgatacttaaaccatgacccccaattcccttgaatgtgatccagtgtgacaccaaattatgacttcaatgacccttgcattttacccaattgacacttttttttttagagatggggtctcgctctgttgcccagactggagtgcagtggcacgattatggctcactgcagcctcaacctcgcaggctcaagcgatcctcctgtctcagcctcctgagtagctgagactacaggtgtgctcagccacaggtgcaccatcacccagctagtttttaaattttttggagagatggggtctcactgtgttgcccaggctggtctcaaactcctagactcaagtaatcctcccacctcagcctcccaaaatattaggattacaggcatgagccactgtgtggagtccccatggactcatataagatccaagtgactctgaatgtgaccatgaatgactcctggatgaaacctccagtgactccttaatgtgaccccagaacactacttaatgtgaccatagaataacacccatcagatgtgactcccaaataggctctctgaacatagcctccctgtgaagctagacaatgacctcccacccctgagcaattctcagcctccctcacctcttaggctcgaggccttgggacaggcccccgagcacaaagtgaggctgtctatggagttctgcagcacgtgcacagcagacctgcaagaagacaaggagctgggggcgctgggagactccacactgctcagggtgtagacagcagtacagctaaggttgggggccgtggtggggtgagtcctagggggtgagggaagtctggactcaggtgggctccaggttctggtggtcactgccagatcccgttgggggaacgggttcagaggagggtcaggggtcagactgcaggctgggcatcaccatatatcactcagttccttctggaggtcatccttccagcagccactggctccctgcggtatctcttcagtctccggacaggcggctgtctcatgaccctgctgcttcatcttggtcaggatctggggtggggagggatgagagaacagcagtcataataataatgacaatagtgccaggcgcggtg

SEQ ID NO: 1560645 - DNA, 4001 bp, Homo sapiens
atctcaggctcctatgtaactgagacctcagctgcacaccaccacgcccagctattttttctgtttttaaaattttgtagagatgggtttttgccatgttgcccaggctagtcttgaactcttgggctcaagcaatccatctacctgggcctcccaatgtgttgagatcacaggcgtgagccaccaccccagccttaagttactctaccatcctgagccaggtgtgtgccaaaatggtagcttttttgttttagagacagagtctctgtcatccaggctggagtgcagtggtgtgatcacaactcactacagcctcaacctcctgggctcaagcaatcctcccacctcggcctcctaagtagctgagaataaaggcacgcagcacacgcccaactaatattttaattttttctgtagagatgggatcttgctgtgttgcccaggttggtctcaaactcctggcctcaagtgatcctcccacctcagtctcccaaagtgctgggattacaaacatgacaaacgtgagccaccgcacagggcagggggctccatttattacatttattgtcttctttttttttttctaagacagggccttgctctgttgcccaggctggagtgcagtggcatgatctctgctcactgcaacctccacctcctgggttcaagcgattctcctgccccagcctcccgagtagctgggctcacaggcataagccaacatacccggctaatttttttgtattttttagtagagatggggtttcaccatgttggccaggctggtcttgaactcctgccctcaggtgatctgcccacctcggcctcccaaagtgctgggattacaggcgtgagccacagtgcccagcctaatttttgtatttttaatggagaggggtttcaccatgttggctaggctggtcttgaactcctgacctaggtgatccacccgccttggcctcccaaagtgctgggattacaggcgtgagccaccgcacagggcaaggggttccatttatggtcataaactcctcactatgtgcctaacacgtttccgtattctgtagatattaattcctatcagctccaggagtggaaaagcggaggcccagagaggttaggggcagggcaccagcctcaccattagcagaggtgaactcagaccctgaggcttcggagcccacgcggcacctgcacccaaccccaccccctccggcctccccgccccctccaggcccccagcccccgacccccagcccctctgaccacaccttggtcagaagggctcccctcctagcacctgcccacagttcccacggcctggacccccctcggttcctctggagctcctactcgacccgcacagcccaagtcctctgccccaccccccatccgccggacaccccggtcctgccccgccccgaggccactgccggggcagctgcgccggctccggtcccccagcgcgggggtctctgcgggcgggcggaaccgaggcgtctcccccgggccccagcgcgacccccacccacctccacgaagtagaagcagggcagaagcgtcatgctgtccttcgggatcttgttcttctccttggtggagatcatggtgccgcgggcgccgcaggccgtggctggaggggagaaagcggcgctggaggggggcgcgcaggcggagcccgggggagacacggtggccggcgccggcgggggaggggcggtcggggaaactgaggctgcagagagcggcgtccgcgtggcctccccgcgccccggcccagcacgcggcttccgggcgcccctacacccgggatcggggggtcggggccgggatcgccgaggagggcggggggtctccgggcgggagccagtccccgcgtggtggtggggggcatccgggagaactggggttccgggcggcggaggagactgggtccgcgcccccagccccacagcccctcacctggcgcggccggcgcccagcacaaagcgcgtctcctccgtggggcggggccgggagccgggaaggggagggggacgggggaggggagggtccggcccggagacccccgcgcgcgcccagacgccgcagcccagacgccgcagccaggggcgggggctctttgtctgggcgcgtcctccgcaggccccgcgcaccgtccccgcctccctggcgccgcctcccaccgccgggggtctcgggggtctcaggtctgcgcgagcggctggcggggctcgggggtcgcgtcctcctcccttcgggcctgcggcggtgacggtcccgtcctcccctcccgggtggctgcggtcggcccggggggcgccatcgagacgggggcggaggcgggggcgggggttggggtttcggggtctctgactgtctccgtgtctctcacggtctctcgccggctccgactgcccccgccccgcgcctccgcccgcccctccgcggagcccgccgctcgctggtgcgcgtttccatggcgaggctcccagggcgcccggagcatcggagacaaaagagctgggggagggggactggggggtctcccggtgcctccctcccttccccccgcactcaccctcgccccctccgccgcgccggggtccaccctccgcctggccgcagccgctcggtgcgcacggcgggattgcggggcgcggggctgggggctgggggctgcgggatgcgggcagggccctcgggacccgcactcgggcagtgcctgctgtctgcgtgcatttcctcctccatatgcgcagccctgcggggtaggggctggttgacccccgttgtagggatggggaaactgaggcttgggcaccctgggtcgcaatccgaggtctccgggccccaaacggcaggatttacaaaaatcggtttttgggccgtgcgcggtggctcaggcctgtaatcccagcactttgggaggtcgaggcgggcggatcacgagggcaggagttcgagaccagcctggacaacatggtgaaaccccgtctctactaaaaatacaaaaatttttagggtgtggtggctcatgcctgtaatcccagctactcgggaggctgaggcaggagaatcgcttgaacctgggaagcggaggttgcagtgagccgagatcgtgccactgcactccagcctgggcaacaagagcgagactctgtctcaaaacaaacaaacaaacaaacaaacaaagagtgacttccaggctgggtgcagtggctcaggcctataatcccagcactttgggaggcagaggcgggaggatcccttgaggccaggagttccagaccagcctggccaacatggtgaaaccccatctctactaaaaatataaaaattagccggacatggtggcaggcgcctgtaatcccagccagatgggaggctgaggcaggagaattgcttgaacctgggaggcggaggttgcagtgagccgagatggcaccattgccctccagcctgggcgacagaaggagactctatctcaaaaaaaaaaaaaaaaacaaacaaacagtgactccagagggttggagccctgctagataccttagtttgctcataacaggcactgctgcccccgggaagagggtcgcctgccataaatgcggaaacagttaaatggcgatgggaataggatgggaactcaatggtgttgctacctttggatggactcggaggcagcccagcttcctgggacaggactgcacggactgcctggggaggggtctttggccccccggttcctgcaggggggctcggggaggccctgtgagcagttggtcacaggtgggtcccattcgatgcgatcctgttcctccccaacagccctggagaagggggacgttgcctgctgtggctgcggctgttttcctggcctgtgagaggcggggccagagtggccgttgggaatctgggtgttgcaaggtgaccacaaacagctctctgggggaggaggaggaaaatgcaattgattttcaggagccttctgaggtcaggag

SEQ ID NO: 1560646 - DNA, 4001 bp, Homo sapiens
cctgcccaacatggtaaaatcctgtctctactaaaaatacaaaacttagctgggtgtgttggtgggtatctgtaatcccagctacttgggaggctgagggacgagattcgcttgaacccgggaggcggagggtttcagtgagctgagttcgtgccactgcactccagcctgggcaatagagtaaggctcagtctcaaaacaaacaaataaataaatgtcactgtaaatgtgtgtgtgtgtttcatgctccaaaatgtttaactgaagaggtgcacaatcagattgttgtggggagcagtgatatcgaccatgagccccatgagggcagggttcatgctgagctcagtcactgttaggactccagtgcccagccctggtcgggttcatgtaggtgctcagcgaatattttctataagcacgaaaaacagagacagtgagaaatagagagaggagacagggcaaaggagggcgggaacagctctcacagccatctagaaccctggctgagcaagaaggccaagggaatgggcaggtgggagggagggtccccctgggcttgggaggaggccctgggactgcagcacccgcacccacctgtagacgagggagtcatcaacggaactgttgtactgaacctggtacatgcgtattccgggcacaggcctctgggctggccagcggatgagcacggagttcgaggtgagctcggctgccacgagccgacgctcagccgcagaatcgttggcacctggtctgcccggcgtggcgatgtcagaggagccgggctcggtgagaggcggcggggcagccggcgggggtgccatcagaggcagaggtaccacgcacacctccacgggcgccgtcgcttccccagcagcattggaggcgatacaagtgaaggtgccactgtccctcaaggtggtgatggtcacatccagcgtcccgtccccccggacccgggtccggctggagttccccagcagccgcccatcaggtgccacccagtgcaccaccggctcggggtcacccaccgctcggcagcgcaggctcaccgcctggccttccaccaccagggcccggccccccgcctgccgtgtgatcagcgggggctcacacaggaactcctcctcggggatggaccagaagtagcggtcggtgaggtgttcgggcgtggcgcaggtctctaagtcgtcctcgcgggtcagccgccgcagccagagcagctcgcagttgcagtgcagggggttgccgccgaagctgacggtcagcggggtgggcggcttgggcccggtgccctgcgacctcaggaagagcccgtcgggcgggagtttatgcaggcggttggaggtcatgtccagacggaccagcttgtgaagctgcacgaaggtcccctccgcgatgtggtcgatgaggttgtggtccagcgtgagggtgtttaggttcaccatctggcccaccgcctcccacggcagggcctccaggttgttgtaggacagatccaggtcctccacggtggacaggaaggcgtcaaaggccgccgactccacccggcggatctggttgtttccaaggatcaggtggcggaggttgcccaggccgcggagctggtcgccgcgcacctccgccaggcggttgctgtccaggtgcagggcccggagggcacgcaggtcggcgaaggcgccagctgccacctggccgatggtgttccgggagagagtgaggtgcaccaggctggtcatgttggcgaagtctcggcggcgcacggcggcgatgaagttgtcggtgagccgcagctccaccacgcgccggtcgatggcgggcggcacaaagagcaagccggtcttggcgcacagcattgtcagtgtgggcgccacgttctggcagatgcagcggccggggcagggctggccacgagatgcccccgcccagagcagcagcagaaagggcagggcagcgggcggcggcgagaggagggccgaggagaagggtcctggagccatggtgcagtgggaaggcaggaggggtgggaggtgagacctgccggggaaggagccggttacccaggcgtgggacttggccgccatgggatgtcctgctacgagtcaggcctggatccctcccctaccgcctacagctgggttccataggatggtgagaggaagccactatcagctattaacaacagattacaacacttccatgctgggcacagtggctcacgcctgtaatcccagcactttgggaggccgaggcaggcggatcacctgaggtcaggagttcaagaccagcctggccaacatggtgaaaccccgtctctactaaaaatacaaaaattagctgggcatggtggtgggcgcctgtaatcccagctacttgggaggctgaagcacgagaatcgcttgaaccagggaggtggaggttgcagtgagccgagatcacaccattgcaatccagtctgggcgacagagcaagactccatcttaaaacataaataaaaataaaaatatctctatactggttgatagaatacccctgtccctacttgcgtgtcccaccctcacctctgcccctcctgtagtagctcccaaacctctcatgatctcccaaccagaggggtgacacctggcccaacctgggccctccagtacccactaaattgtctaaaaaatcactgttaactatggtttaaggccctggctatccaagccatactccctagctccaaatcccagctctgatacttactagctgtgtgacctccagcaagtatctgaacctctctgattctcggtttcttcatctgtaaaagggagatagaaacaggccttacttctgtgaggattaaatgtattgatgaacatagcatacttagaatagtgccaggcatataaaatgtgcttattacatgttagcaatcatcatcatgatcatcaagtgcttaatatgtaccaggcatagaacagtgccctattattgagagtaagtactttgaaatcaaacagactcaggttcaaatcctgattccccttttgctagctctgtgacccccaagccaatgatttcccctagctaggctgtaatttcttaatctgtaaattgggatgataattgtaccatcttcattcatgtaccaccgaccatgcctggcatacagtaagtactcaataaatgttaagggtttcccccctcccgcctctggcattggcagggagagtgtcaaagtgggagggactgaggaaaacacatcagagtcttccagttcagcctcaggaaggccttctctgaggtctggtttcatcctgggctcagttgagctcccaagcaaggcagactttcatgctcacatctttgggtacacacaacacacacacacacactcacacactcacacactcacgctatgtctctgctccaggcaaaaccttccggcagggattccccctgcggcggctgcagcccacgacatgtcagttcccatcacaacacagggtgggcggggggtgaagaggaaaggatgggaagggggcgtccctaaaactgttttcaccccaccctgccctgtaccctagcccctgctggcctacctcccaggaatctgtgtttggggctacggccttaggtggctttgatcttcctgccagtggggagggggcctgggacagagaccaggaaagtcagagacagaggtgaagagagacaaggagagaccagggggagggagaagtggactggcaaagagagagagacagattgggagagaaacagagagacaaaaagatgagtctgaaaggaaggtgaacagacagaaaactgagagtgaagaatgagacacagaaaagagagagacacagaaaaaagacacagagatggagagaaaaatagagacagtattagagagaaaaagacagaggaggaaagagacagagagtaagagagacaatgaccgggctgaaggcggaaaaagaggccggatcggggtgtcctaccatctctgagttcac

SEQ ID NO: 1560647 - DNA, 4001 bp, Homo sapiens
aggcatggtggcgcccacctgtggtcctagctacatgggacactgaggtgggaggatcaatttgagcccaagaatttgaggctgcagtgagctatgattgcgccaccacactccagcctgggcaacagagcgtgactctgtctctccaaaagaaaaaagtaaagaaatggtcagagaaatgacagctggtctgggtgagtggcaggaaaaccagagggctttagacgtggtcagagatggtaaaagctggccatggggagacggggcagccagggtggcaacaatgatcagaagtggtcagatatgaccagagaagagaaggggttacagatggtcaggaagatgagcagtggacaaagagaagggagggcatgggttgggctcagatctgggggagatgaccatgtcagagacacgtggtcagaaacggcccaaagccagcaaggtggtcagagaggaggaaaaggacagacatggcagagtcagtgggagcccaggacagctgctcaggaggatggtgcggggagaggtcatcggagagaggaaaggcagcagagatgttcgagatgatcagagggcatcagcaagtgagagaggagaggtggccagagattatcagagggcatcagtgagtgagagagagagaagaggtggccagagatgatcagagggcatcagcgagcgagagaaaagaggtgggcagagatgatcaagagggcatcagtgagtgagaaagagagaagaggtggccagagatgatcaagagggcatcaatgagtgagagagagagaagaggtggccagagatgatcagagggcatcagtgagtgagagagagaggagaggtggccagagatggtcagacagttgcagactgggagttagggtcaggggtgggaggagggcaagagcagtgggagagatggccagagaaagggaaaggtggccagaggaagctagagaggagagatggacagaggctgctggagagaagagtggtggacagcaatgtcaaagatggatggggacggtcacagacctaggcttagattcaggggtggagaaggagcaagagagctggtgaatgatgattagagagaggcacagtggacacagatgtcagcgatggtcactgagaagcagcaggcagaggcgactggagagaggacctgtggacaggggtgtcacaaagatgatcagagagagaaaaagggaacagagatggccattgagaggacaggtggagaaaggagcccagagagaggagtggtggacaagagaggtggcggagacggtcggaccggatagacagcgaaaggctgtaagggttgcaggggtcagagacctggaggtcccatcaactgaggcagggaaggtcagagaggggcaaggatggccagtgtccagagagtgtttggagcagagcaggagctgaaggcagacccatgggggaatgtctttttttctggagaaaccccaagagtgtcaaagggtacctggtaccgtaacccgcagccacaatgctcctcccagcccgtccccaccttgaggtttcagcagccttacctgagctagaagcagccccagggagcagagtcctagctccaggggagtcagaggtcagggctctggagggagcatctggtcatgcttttcctgtccccaaggcttctgtagagggactgtgtcctgactcggctcaaatctgtggcaacggagtctccagaccttaatactcggggttccagacccctaaatattgggcctctagggtccagttttacgggtccagtttgggttgttcagggtcagggtctcccaggtccagtcttgggatgctaagcagccaaacggtggggtttagagtctgagatccgatcccggggttctgcattcagatattggggtgctgagtcaagattgggaggtctcaagccccagatttaagcactcaggtctgcagcaaggacttcaggcccaaactcgggttcaggccccttggaatcccacagtccagatcttggaatttgaggcctgaatcccagggttcaggtccccaagagtgggttccagggtacagtactggaaatccagtcccagatttcaaggtcccaggcccagaattcagagttcagctccaggcttgaggttttagatgtcaaatcttggggttctgctccaaatattggggtctgtgttccaaattgtggggttccggctccaaatattgaggtcccagtgaccgatgttgagattccagccccatatactggggttcaggctccagatcttggggttccacggccggatctcggggtgctggtcccagatcagggttccaggctcgggtttccggaattcccgattcaatctgggggtgcaggcccccgaggtggaggttagggcgcggggtccggggcggcggcgtcccggctggcttcctgggctgcggcggaggctgactgggagggaggggaccggctgcggtggggaggggggcgaccgggcagccccagggccgggtggggcgaggcctgggagcggagggacggtcagacagactgggacacgcgggatgggggcaccgcagcgcaggcgggggcgcaggggggaggggccgcgctcagagacccctcccccgccggggccgaggcgggggccgggcgggggccgggctgggcgggccgggtccaggcgctcccgcggcctcctcgccggcaacccagggcagcgcgcgcaccggcgcttaaaggcgcaggctccgcgcgcacccgcgcttaaaggcgtaggcacccgccccttctctcaaagacgcgccccggccccacctcccatggagtcgcactggcgctgctgggaaagagaatccctggatacagagagactgagacagagagacagagaagaacggagatacagaaaggcagacaaaaagatgggcaggcttagattgatggatagagaggagaaaatggaaagaggcagagagacagattgaaacacacacatattcgagacatggaaatgcacagagacagcgagacacagagagtgatggagagacaagagataaggacaagtcagagaaagacagaaacagagatagagacgtgcgtgcgcgcgcacacacagacacacacatacacactcacacgctctaagacgcagcacctgggctgtgagaatggtatgtgtgtatgtgcattcagtaactattcctagccttgagtgtagcgcttcattccagagccactggccccccaaacctgtctctttctgccccccttatctcagcaccacctccctggaatgtcctttccacggttggagtttccttacctggccatgcccagcaataggcttgatctttcaggccagaggggctccttcccaaggctcctttctctgcctgcaagagggaaaacttgtgccatctgggattagggaaagacctcaagacacactgacagccgggggcggtggctcacgcctgtaatcccggctcgttgggaggccaaggcgggcggatcttttgagatcaggcgttggagaccagcctggccaacatggagaaaccccgtctctactaaaaatacaaaaattagccgggtgtggtggcggacgcccgtaatcccagctactcgggaggctgaggcaagagaattgcttgaacccgggaggtggagattgtagtgatctgagatccagccattgcactccagcctgggtgacagagtgagactctgtctttaaaagaaagaaagaaagaaagaaaagcagagagggatgccttgccttgcaggagccaggccaggtgtccttgcagtgcagcccaccaggatcacccgggggcaccatagatctccaggtcccaacctcagagtttctggttcagtgggtctgaggtgggacccaaacatttgcatttttaacgagtacccaggtgatgctaatgtgacttttcaaagaccatacttttttttttgagacagggtcttgctt

SEQ ID NO: 1560648 - DNA, 4001 bp, Homo sapiens
ttgtctttttgggcctgaagccaacgatagaggtcgctcaggttctggtcacagatccaggggttgccggagatgtcgaagccatcccgcatgtcccagtttggctgccctagggatgcccagagcccctcgggcacgctggccagtgagttattggagaggtccagcatgtccagctgccgcaggccctggaaggcaccggctgccaccctggccagcttgttgccgttcaggaagaggtagcgcaggtccggctgcggcaagaggagatcttttcccagtacttgcaatttgttgccttctagatgtagccgttctaattgcagcggacccctcaggaggtcaggtggcaaggtctccaactggttctccccaaggtcaagggtgcgcaggagggtgaagttggccagcagcccggggggcagtttccggaggcggttcccagacaggtccagatgccccagagctttcaggccgtgtagccacgagacctccaggacctccagctggttttctttcaataccagggtgtccagggtggctgaggcctggaagaggcccgggggcagcccggtcagggcgtttcgggttagatccagcaccctcagctgcggcactggccgcaggaattcgggcgagaggctttccagcccattgctggagaggtgcaattcttggagcttagaggcgccctggaggaggttggctggcaggtgggtcaggttgaagaattccacggccaggtgcacggtgtcggctggcaggtagccggggatttcggcaggtggttgacaggagatggagctgccatggtctgagcggaacacctggcagtctttggggctcagggtgaccccccaggctgaggctgccaacagcagcagcaggaacagagttctagaaacatggggttgaatgccccctgggctgcaggcagtaacagaagatgcttactaaaccacagtgaaaatacactcagctaggtgaaaatacaccagcaaatccgcccacttcttcccatctctgcggctaccagcctggactatgctacctcatctctcacctgtactagggcagttgcttcctcctcctcttccagcttctaccctcacccccgacagctgccagaagtggcccctgttccagggagaattataattctaggaaagttgagtttctgagtgtaactcccgcataatatgaatacacttccccatcaccagcctagcccccatgagctgttaattattcacagtccaacttgctagtttcttctgatctggcttattttctgggtcagtccttgtctccctggctctgtgttttgatgtgaactcctattcatccttcaaagccccagctccaatgccctcttttccatgaagacttctctgctctgggatcctggtctttttgtccactcttgaccaattgggtgcttggaggaagacagacgttcaggttcatgtttttgagacagagtcttgctcagttgcccaggctggagggaactggcatgatcacagctcactgcagcctctgaacatgaaaagtgtgtcctgctttggccaggtctgagggtgggcatttggccttgggaagcggtggtttacacttagcaccacaacccttggaagcctggggcttcccctcctcctccagggcttccctggcccggcagccatcagacatgatctcgacagccttggtcactgtggccccaggcctctaacaagaagcctcccccggctccctgctgcccatgcccacctgggcttctgtaggggtgtgtgtgtgtgtgcacgcgccagtctttctgtcacagataaggttgatctgtgccagccaccaggcctgtatctgctccctgtgacttctatgggttagctggaatgtcctgtatctccgcatggtctggcgttcaaacctgcctaggacaggtagtgtggggacctacctttttggtcgctgtctgctccaagaggacatggtagctctgctcttttgcttctgggttgtcctggcctgcggaggtggccttatacctgcctggactgggggcaggggaaccaaccctggggaagtccccacccccgtccagttcctgataggggctgagcctaagccaggcaggggaaggggaggggtcaggattacaaaattgcttcctggaaattgtttcctgttcaacccctttttgaccctgcttctagaacacaggtttttctttccttgcttcctgatttttggggggcatccaagagtctctctagttgcatcctcacttcccccaacccggagttcaagggtcaaggtttgcaaggcactattcctggagacagggacagctctctgagcaagaggagggatttaccataaacttgagcaacccagaagctcactgaaaagaacaaaaaaactcgtcttgatttcatggtatgttgatattgctttttttaaaagaagtcattttaaaaatacagtccaatagtgagtaatgccaaacgtctctacggtccttagacagtggcttgggaggaaccaaacctggttctgaattccagctctgtcatgaacacctttgctttgtgacctttggcaagtgacttaacttttcttggcctcagtttccccatctatgaagctgaactcaaatctccaagggctccttctgcccttttttctcttcatctgaatctgacatccatgctattgtttccattcttcctcatttcctattaaatgcgtttggaggctacaaatttccctttgagaacagctttggctgcatctcatggacttggctgcagagtgcttgcattcttgttgagttctaaatatttaggtatgatggtgtcacctttatctgcagctatgactattttttttttctttttttttttgagacagagtcttgcactgttgcctaggctggagtgcagtggcgtgatctccactcactgcaagctccgcctcccgggttcacgccattctcccacctcagcctcccgagtagctgggactacaggcatgcaccagcgtgcctggttaatttttatatttttaatagagacaggattttgccatgtggcccaggctggtcttgaactcctgagctcatgtgatccactggcctcggcctcctaaactgctaaaattacaggtgtgagccaccatgccccgtcatttttttttttttttgagacagcattttgctctgttacccagcttggagcagtgtggtgcaatcatagctaactgtagctttgaccatgggtccaaggcctcccaagtagctgggactacgggcacgtgccaccatgcctggctaattttttttgagatggagtctccctctgccacccatgctggagtgcagtgatgcaatttcggctcactgcaagctccacctcctgggttcaaacgattctcctgcctcagcctcccgagtagctgggaatacaggcacatgctaccatgcctggctaatttaaaaaattcttttgtatgttacctaggctggtctcaaactcctgggctcaaggaatcttctcagtctctcaaagtgctggggttatagacgtgagccactgcactccgtcagtcttgtgccctgcccagtctccggagcccagccgttagttggtcttaatcaacatggactgagaggaaggaaggcttgtgaaatgtagtgacacagtaacaaaacgatccattaaaatgaaatgagatcacatccctgcttaaaactctctgatggcttcttgtcccacttaaaacaaaattcataaggctggccaggcgcagtggctcacgcctgtaatcccagcattttgggaggccgaggcaagcggatcacctgagttcaggagttcgagaccagcctgaccaatatgatgaaaccccgtctgtactaaaaatacaaaaattagcggggcgtggtggcgggtgcctgtagtcccagctactggagaggctgagacaggagaattgcttgcacc

SEQ ID NO: 1560649 - DNA, 4001 bp, Homo sapiens
atacctgctggggaccagcagcagcccatgagggacaccacagctaaacccaaggctggcccgctggtccccttcctcttacagggcaaggcccagagcgcagcccaagactgcccatcaagagggtccctaccacctcacccccacctccctgcctccatgttctgttatccaggctggagtgcatagctcactgcagcttcaaactcccgagctcaagcaatcctcccacctgagcctcccaagtagctggaactacaggtgtgcaccactatgcctggttatttttttattttttatttttgtagagatgaggtctcactgtgttgctcaggctggtcttaaactcctggcctccagcaattctcttgccttggtctcccaaagtgctgggattacaggcacctgccaccgcaccctggcctgctcctacaactttgaagggcttccccctaccaaggggctttgctcgcccagcagcagcagaggcaggaggggaggcagttctgataatccccatttacagggcacgcagctagtgacggaaccatcctcttcccccgtgccaagctgactttgaggaggaaagcagaactccccagccacccctcaagcacccacctccgtggggtttggcccttactttcaccttctgctctggcccggggggttacgggcccagagtcggggggtggggggaaacccaacttcccggggttcaggatgtgtgtcagatcccgcctggccaggaagcaggaaccgctgcccccacccaggacacccaggccccctggacagagccaggccaaagctcctaagcatggagcgcctgtccccctgctctgctcaccagggatgccagcacccagcagctcagagcccagcacacatgaccccgcactgaggttggggtgggcgcgctggggttacaccctcaatgctccccaatggcacattcccactgagccaggctcacacagctggggcaagggcctgccagagcctcggagctccctgaggcctgggggtgattactttgtcatttcagtggcttcagcaaacctgtcaggttacagagccctcactggtgacatcacagggtgtcccctaatgacccccagttcttataatggcctccctccttcatcacagtaaataaaggagccatgtgggttggggatttaactcctcctctcgcctacacagagcgctggaaagctggacagaaaaactcccggacagggcgggagcccctcccaccccatgcctggccttgaccggtccctggcccaacccaagcaccctcctaaactgaacaggcctgcctgggggctgagagacacaaagggaaaacaggagtcccctggaagccgcctccacactggcaccctcctccagccctgccccgcaccccgagtccccatctgcggcttacaccagcccccaccccaactccgggccggaaacagtttcttcttcaggggacagccggcctggcctttgtccccagctcccggggccccctcgtctccaggctcagcgcgggcgggccgggttgaaggctgccgcctgcacgaagggcctcctgccagcgctcagcccgggctccgggcgctactccgagcggggcgggagccggggctgcgccaccagagtcgccctcccaggcccggggccaggcgggcaagcggtgctggcccctctctgggtctccgcgcgggagccaccgcggtggggggctcgggatgccgcggccggagaggaggtcggtcagggcgcggcgcggactgccatgcgggggacccggacctgcccggcccgcgcggcccactcacccagacagacgacggccagctgcgcccgggcgcccggcgcgccctccagccccgcggccgcgcgcttctccatgccgggcccggccgcccgcgggcgccgcctcctgccccgcggctccggctccggttccggctgcggctccggctctggctctggctgcggctcgggctcgggctcgggctagggctcgggctccggctggcgtggctgctgcggcccgggtgcaggcggcggctcccgaggcgtctttgtgcggtggcggtgcaggcccgtagggcgcgcgcggccacatcggccgcggcgtcacgggccctgcgggggctcagcggcggccgccagggaagacccccgcccgccgctgcccccgcgccccgggagccccgccgcggccggcctgggcccggggacccccggcgcgcccatgccccgcggcgcgcagcccgcccggccccggcgtccccgggccgccccgcgctgcgcccagcccgcccggccgggtgccgccggtagagcgtccgtgggtctgtcagtcctcccgcccggcccctcgcccgcgcccggagcctggaggccgcgctgcgccagccacgtgacgcgcccgccgagccgcagtggcgctggctgggcgggcggaggcggctggggcgggccgggggcgcacgccccgcctcggggtgctggacagctctgcgcaccagccccgccccgcccgcgccccccgccgcgctccccgcgctccagcccagtgctccaggcagccggtgctcgcctggcctcctcccgggcccacgaattgatccctcctggagccggctgtgctgaggaggaccggggagcgaggactgggaaaaggtgggagagagaggacggcttagggacctcataggggtggcacaaggctaaggcctgtcttcttcgcaaggtgtccctgttcctgcccctccgcttctttcatttgccacagtccaagtgccctgtcacgtctctaagaggaaccccctgtgccaagcaagacctgtcaggggacattggtgaacacaccagaggcctctggagatctcccagggccccctgagcccaccctgttacccactatcctcgtgaggctggggacttgggaggaggcctgcttcttaggctgggggtgccctctggagagctgcccaccaagaggttgagtccaatgaggcaagaaccaggagagacagggggaaggtttgagaaggccatttagggccaagacggatgtgaaatcagaggtccccaaaggctccatggcacagcgggcccaccaacctgagctgaggctcccaacccttttctaacacccccagaccctcatttgatattctccgtttatggagagaaggttgagagaaactgatggtccgttagtgaaagcgtagacagtcactcactcactcgcactgtgcaggttgattggattttaataaaaaatggggggaagaaaaatccttttagtttttctgggttttcttattctctctcttctaattcctttggtgatttttccaaagcagacttcttaggaaatgtattaaaggacgtaaaaatcaaataacaagatacattacagattgatggcatagagcactagcctatgtgtaatttggtttcagaatttcctcagactgctgactgcggatgagcaggcatttatttacgcatggcaaaaatgctcaacagaggcaggggcaatggtagggtggatctgcggtttgttcgtttgttgttgttgttgttgttgttgctgctgctgctgctgcttcttagtttttttagagacagtctcactttttcacccaggctagagtgcagagctgcaaccatagctcactgtaccctcaaactcctgggctcaagcaatcctcccacctcagcctcccaagtaggtgggatgacaggtgtgcaccaccatgtcaggctaattttttcatttttttgtagagacaaggtcttgctctgttgcccaggctggagtgcagtggtgtgatcacggctcactgcaacctcaaactcctggactcaagggatcctcttgcctcagcctcccaaagtgctggagttacagacaggacccaccacacctggccaaaatatgcggttttgttgaagatgctgcctgcttcaatgcatgttttgca

SEQ ID NO: 1560650 - DNA, 4001 bp, Homo sapiens
aaactgggtttacaggtcataagggggggaagtttgtcccatatatgggaactcacttaattcttaccccaacacactatgatgggggctgtaattctccctcattttactttattttattgattttatttttgagatggagtctcactctgtcacccaggctggagtgcaatggcatgaacttggctcactgcaacctctgactcccaggttcaagagattctcttgcctcagcctcctcagtagctggaaccacaggcgcccgccaccacacctggctaatttttgtatttttagtacagactgggtttcaccgtgttggccaggctggtctcaaactcctgacttcaagtgatccgcctgccttggcctcccaaagtgctaggattacaggtgtgagccaccatgtccagtcctctccccattttataggtgaggagactgaggctcagagaagtaaagctactcacctaagatcccacagccttcaagcggcagagctgggatttgaacctcggccatctgggtgtggagccttattattcaccactttggcaggtgtctcagtggcttacttacccttgttcatcccactggtgctcggctgctggctggcccacaaacatgttctcatagtcgggagtggaggggcaggatggcacggccacttggggcttgggggcgctccggctgccgtaccgtggctgcaagcctaaaccgggcttgggcccatcctgagcagcccagggtttgttcagctcccggcttctggccactcggcatcgccagagtctccaggccagcacagggccagcgatggcaagtccaagaagcaggcacccgctgaccaccactgccccgatagttgcagaggccaggccaggggcgcagctgacctccaggaaggcagagaggttgtgctgggagctggttgtgtcccagcagagcagaggcttctggccagagcagttgtctcggcggatgtcgtgccaggactccagggcacagttgcagtcggcctgcaggtcaaggtcacagcgggcggccagcgccccatccacacgagacaaggggttgcgtagcacgttcaggacctcaagcttctgcaggtgggcaaagaaggtcactggaagctctcgcaggccgttcccagacaggtcaaggagaatcacgttgctggcccgcagagactggttgtgaggcaggctcaggctgaggccactgaaattcaggcacgtggcactgaactccgcgttccagtccacatccgcggaggacacggtgcacgacggttctaggctgtctgactcccgcagcagcagcggcaacagcagcgtccatgccagggtgccccccattcaagcaacctacgtagagacaccggaatcctagccctgacctcagccctgtggtcgccctcgcctccaccgccagtgtttattattatagctcagaccagctcaagccgcttctgaaatggtaaaacgcagccccagtctggtcgcctcctttggctggtgggctgcctcagtctccccttctggggaatgggtagataaccccagtgcttagcgggcttggaaggcgaggaggagatccgggccagttaaccccttcttctatgtcctgaacatttggggcgccctcgttggccaggacgggaccctatgcaaataagcggttgccttggaaacggccccgccccctgatcacgctcccggtatctcccagaacggcgggtcgctgggaagtcctgggatagggtggagtgggggctgctgaaagggtcctcccaggtctggtttgcagtccctgcacaggtgcaagttctagagcctcagtcctaccttttgggtcccactgccacgcttttgcctctgcgatgctggaaaagcgacggcgcccagaggctgcgtcctggcccacctggacacgggggccgcagcggccacggccagcaccgtccgcagcgctgctggggtcgctggcgttcctctggctctgcacccagcgactcagggggaagaggaactggtgtctgggtggagtgcagaggggaagaatgaagacagagatccgcccccttgcagggcctcaaggttctcaccagaggtggatggagggcaagagggaggggtggaccagagtcccgcttccctcttgctagaacccagtgacttcatgtcctctattagcaccccaaccgactgccacctcatcaactcgcttcttgatctcagcttggctggttcccagctcatgcagtcatttattcattcaacaagcatcacccacgctgggcccccaagaggcctcagccctgaccaggtcctcaaggagctatcttaagagaggacagagctggacatagacactcctagtcccatgcagttaaggaaggtccagagggaaagacagggtcctggaaggcttcctggaggaggaggcattacagttggggcttcaacgcatgagtaggagttcactaagattccccaaacctatcattggctctccaagctcctccaagcctctcccactgagttcttgcacagtggcacctctatgctggaggggacagtgaggagggctcccagcagcttgggaaaatgtagctggctgggatagcatggttaggagtggagaggatagaaggaattggtggtgggggaagaggtccatgtggagccaaggcaggtgcgtgggcagaggggcactggctcaagaagtccctctggagtgagcctggtgtctggggtgggcaacttggggaggaggctgaggtcccagaagcagatgggggcctgaggcagactggaggggtagtagtgacaaaaatgatactgaggaggggtgggctgggagaaggcctcacctgaacctggtgtcaggtggaccaggtacaacctatgccagcccgactcactgtgccaccttaactgcgtgtgacaccatgtccacagctgtcaaatgcacagaggcttctccgggatctgggaggctgggagtccactcccccacgttttcccctcttttcggcctctgtccttcacatcgccaaactccaagaaatggtcaaaggctttgaacggagaccttgaagaaaaagcgggaaactgcttttcaacatgtccagagatgctcattcttgccaggtgcagtggcttacacctgtaatcccaacactttgggaggctgaagtgagcagatcgcttgagcccaggagttcgagaccagcctggccatcatggtgaaaccccgtctctactttaaaaaatacaaaaattagccaggtgtggtggtatgtgcctgtagtcccagctactcaggaggctgaggcaggagaattgtttgaacccaggaggtggaggctgcagtgagccaagatcactccactgcattccagcctgggcaacagagtgagacctgtctcaaaaaaaaaaaaaagttcacacttaataagaaaactgcaaatcacaaactgtttgtcttcaccaatcaaattggcaaaaatccaacaatgcaatgacattctgtgccagccaggctgtggggtgcgtccatggtgtagcactggtggagggcaccctggcacaggccaccggaatgataaactcatgtgcctgctgacacagcaagtccacttctgggaatccctgcctgaatatttgcatgtttacagtgtgaactgactaacgaataaaaaaatgtggctcagcctggacgtggtggctcatgcctgtaatcccagcactttgggggaccaaggtgggcggatcacgaggtcaggagtaccagaccagcctggccaacatggtgaaaccccgtctccactaaaaatacaaaaattagctgggcatggtggcacgtgcctgtaatcccagctactagggaggctgaggcaggagaatcgcttgaacccaggaggcagaggttgcagtgagctgagatcatgccactgcactccagtttgggcgttagagcgagactccatctcaata

SEQ ID NO: 1560651 - DNA, 4001 bp, Homo sapiens
ccggtggccaggaggagaggagccccagggaggaggaggaggaggaaggtgggaaggcgaagtggaggctgcggaaaggcaggttagaaggcgaaggctgcggaagatgctacaggaagagggaggtgcggtcctggccgcggtccgggggtggggggcgggagttttcaggctcctggaccaggagggaagccggctccggctactcccagctgcctggagcccgagttcctgtctggcggctgcgcggccgggacttgggatgtgaggcgcatagcaatggggcgctgcggaggcgccactgcagctcccagctggagaggggggcggggagggggccgaggggcagccccgaggctcccttccccctcccccttcccagctgggctctccccaggggaattccccaccccgacagaaagtcaccagaggctgcggggagggggcagggaggaggggagggcgcctaggaggagagcagaggtgaggaggtctggggaaggagatgggggtgcagagaggaggcgaaggggtggaggggtgggcaagaggccatcctgggctctggagactcgagtcctggagagagactggctgggcccctggcaggacaggaccccagggaggcaggggcatagagatggggggaaccctgagagcccgggattgatggtgagttggaaggagaggctcccaaaaggagagagctaggattgggggggtctgagactggggagtactatggggtgaggagacaacgatggagggggtctctgggtgatgaaaggtcatagaaggatgtttcagagagtgatgggctaaggagaaggcgactgggggtgttggggagaaaggggagaggctggggtgcaaggcccaaagaggggcggggagggagtgggaggagggagctagaggagagggcggctgaagtgagggtctcctggacagaaggtctggagagggatatctgggggattgtcagagatgggggttagagaaggctgaggagcagatgccgtgtcttagaaggtcctagaagagcaggtgtgagggtcggaagcctggggaggaggcagcaaatggggggcgggggtctccaggaggagaggtttccaggaggggagggcggagggaggtgggagaggcagtggtcctggagagacacgtgcccaaggatagaaggccccaaagcctagtggggtcagggaacgggggtcttggagagacggaggggcaggggtccgagccgcccaccaggagaggcggggtgaccccagagggagaagggctgaagactggggagggggttgtctcactccccaatcaccccctccgtctttcccattttcacttcccaaactccccggttctccccggttgccacggcaaccgctcttgccaggcgcggtcaccaaggaaaccccgtgcccgcctctcccccctccccatcactggcgtgccccccccaccccaagcagcagcggtgtggagggtgggaggggccatggggagaggaagaacctggactcccgccccagaaaggggggcccggacctacgcccggagagccccccaccctaagcctacttcctcagccccacagctggatacgcagcgaccgccggacgcaccccccacaacctgtccccaggcagcggcgacaaccaccccccccacagcacagaactcgccctgcccggagaacccccacccagtcgcctcccccaccggcttctgcctcccattaggccccgccccctgtcctctgccatccccccccatcccggaggaggcctaagaccactgtcccccaattagcgaatgccccccacccaccccccgcggttccgcctccggcccccgcccccgacccgtgccccttggcggctactcacagcgaggagaggggttccttccggggggcagcatgcccggcccgtggggggaggacccccccaatgaggctcaggaatttggggtgcaaggcccgctgcggggaggcgcggggggcggggctgcggccgggcctggagcctctcgcgctctcccccctccccggctcctgggtggggagggggcttccgcagcggcggcggtggggctgggggggccgctctgcctcctcgcctcgcgcccgcctgccgtccggccccgcgccctcgcccgccgcccgccttccttcttgccttcctttctttccttctttctttcctggcttccttccttccagccttccttccttccttcctccctcctcgggcccgccggcgccgctctccccccaccccacccccccccaggccccggccccggccccggcccccgcctcggacggtgcggcagcgaccgagagcagccgagagcggcggagacgggagcggaatactgatgatggtgggagcgggcgggcggagggagggagcagggagggaggcccgggaggagaggaaggggggagagagggaggggagggagggcagcgtggagagggaggaaggaaagaggggggaagaaccggagaggatgggagagggagggaagaaaggagagggagacgggagggaaggggaagggggggaggaaagaagagggaaggggaggaaagaaggaaggaagtgggaagggggtggaagaaagaagagggggagaaaaaggggaggagcaggggagagaggagggaaaggggagagggtgtgggaggggaggggagaggagggggtaactcctgcaataaggtcctggatgaaggggaggggagggcggggggcagggggagtgggtagaggaagaggaaaggagggagaggaggagtggagggggagatgggtagagagatgggcaggagaggcccaggggcagggaagtgaggggaaagaggaggtagggaaggcctaactttgagggctgcaggggacagaggggcctggagggcggcgggggctgtggggagaagaatggggggtgcggtgtgcgttgtcaggaagagcaggggaagctggcaggacccggaagaggcaggaggatctaagtgggacagagatgagaggatggaagagggagggaaggacccgtcggggggaggggggaggagaaagatctcgggggagaggagagaagctggggagctggagctttgagggcccaagactgggtggcaagagcccggggagtagacagagtgggggaggggacagagggcctttcttgaactccgctgtatgcccgcttcgtccgcccctccacctcatgaagagaagaaccttcaaacccattttccagaagagaccactgagctcttggaggagccaggatggggtttgaatgcagtcttgggctgggggtaccctgagggagatggagaatgggtcagttcctagctttcgtccctggtccagacttggcaggtggaggcacctgggaggggcagagggcacagcctgcagcctccctactcactctcctctcacctcccccaggtgttggcagcgggtgctggggacgcatttagagctgtgaagctgagctgcatcttgggtgcagggagggggagggcagatgcagaggcctctgggaggtcaccgtgaccctcccctctacctccccggtccactaccccaaaagcttgggccccaaggaagggggacatcgggaatcaggggcggagaaacccagaaggaggggtggcccctgtccaggacactgaagatccttccagatgttaaaattagcacagaagtttcacccctgccttgttatcccccaaaacgctgactaataactgaggactcaggagagagagaagaaagatgaaggttccttctttcagtgccaggggacccgggacagactctccctcttccccttctcctcggagagccccagggagggaaagtgtggctgtacccctgcaggcagagcctggggagagtcagggttggaagctggaaggaaagtgggccagacacatctataatgagccagggttcccgagagaagcc

SEQ ID NO: 1560652 - DNA, 4001 bp, Homo sapiens
agcaggagaatctcttgaacccaggaggtggaagttgcagtgagccgtgattgcgccactgcaatccagcctgggcaacagagcaagactctatctcaaaaaacaaacaacaacaaaaaaaccacagcatctttgccaaaagcacctaagagcggtgttgcattgtggcaggccaggctggaaggctttccagcctgagaccatgtggctcccaccagccctggctccatccacccatgcctcacccctcctccctcccaggtcctcctcaagccacttgcctccaaaaaatgtggtgatgagttcctgctgggggaagggtgggagagtgagaccctccacacccacagcccatgctaagaggcagggaagaagcaagaaacatccagcagttttcagccctaagaggggttttgtagaaaacaaggcccaacctttttttttttttagacatagagtcctgacggacacagtggatcacgcctgtaatcccagcactttgagaggttgaggcaggtggatcacgaggtcaagagatcaagaccatcctggccaacatgatgaaaccccatctctaaaaatacaaagattagctgggtatggtgccacatgcttgtagtcccagctactcaggaggctgaggcaggagaatcgcttgaacctgggaggtggaggttgccgtgagccaagatcgtgccactgcgctccggcctggcaacagagcaagactctatcttgaaaaaaaaaaaaagagagagagagagagatagagtcttgctctgtcacccaggctggagttcagtggcacgatcatagctcatagtagtctcgaactcctgggctcaagtgatcctcctgcctcagcctccccagtagctgggaccacaggtgcgtgctaccatgcccagccaacttttagattttttgtagagatggagtctcgctatgttgcccaggctggtcttgaacttctgagtccaagcaatcctcccacctcagcctcccaaagtgctgggattacaggtgtgagccactgtgcctggcctcaatctttttttttttttgagatggagtgtcgctctgttgcccaggctggagtgcagtggcccaatctcaactcactgcaacctccacctcttgggtccgagcagtactcaagcctcagcctccccagtagctgggactacagggacacgccactaatttttgtatttttagtagagatggggtttcaccgtgttagccaggctggtctcaaacacctgacctcaggtgacctgcccacctcggcctcccaaagtgctgggattatagacgtaaggcacggtgtccggctgagcctcaaccatttatgcaagggagaaactgagggtctagggtgggggagggtggcatctttgtagcccgtcctgggtcaggccccaggcctgcggattcccagccgagtggttttccaagccgcctctgccagcagacttgaagatctgggacatgtgtaagttcaagagcaccagaggtcaggcttggttgaacccaccccaagtggtaggttctggagctctgagagtctcccggggatgagttgtcaatgtcttcccagatgccaaggggaggggaaagtggttgagacccccaaagtcaagtttatcttcagcctgtttatcttcactctgagacttggccgcgtctgcctggctcccaggacgggcacctcgtgggccaggtttccctttgcaccggccggcacccccaccccagctcctggtgtgtcgggacggcctgccccggccacagggccggcgcacctggagcggctctgccccttgtccagacccggggactcccagcccgacccccaccctgccacctcgtggggtgtccagaggcaaagagccacctactcaccgttccgggagggacgctgggcccaactcctgggtctctgggagcggagctgccgcgactcccgcagagttcccgggcgggccgcgagggtgagtcagggcaggcggggacaggagacccggagccgccccgccccgcccccggacgactcggccccgcctcgccgcaggcgcgcccaggtcgaccctactccaggcgccgcgcgatcagcagggttgggggaagacagccgtcttaggctgctttgccctggtgggctcggggctggcgggagatgcaggggtcttagaactttgcaactttgcagtctggctggaccctggcagctggggaaactgagggagctggggacgctgaactcccaaagccattctacggccacctttctgggaaccaggtcttacggaccctgtcgagaaaatgtggaggccgggctctgtgactcacgcctgtaatccaacactttgggaggccgaggcaggaggataccttgggcctaggagtttgaaaccagcctgagcaatatagtgggaccacatctctacaaaaaattttaaaacctacaaaaacaaaattttaaaaattagccaggtgtggtggtgtgtgcctgtagtcccagctactctggaggccgaggtggaaggatcacctgaatctgggaagttgagaggctgcagcgagctacgatcatgccactgcactccagcctgggccaccaagaaggaccctgtctccaaaagaaaaaaaagaaaaagaggaagtgcggaagggctccttctaaccccgcaaggcccagtcacctggccttaaagcccagccaaggcacaggtgactgcagttttcaggtgctgggagtggagttgcgggaggagaggacggggaggggacggcttctcccttcaagctctggccatgggcgggaactgggctgaaccaacggaagttgagtagagtggggatgccctcctgtctgtccctgcccaacactgtggtctgccctccaggtggggagtggggcacaagcagctccgaagtcctggggggcccagcttctctgcctccccacccccaccctggccgccccacttgggaggcctgagctgggtcttagatgagcaaatctgtggaggtggaccttgatctgttctccgtctgaaaaaccttggaggccgggtgcagtggctcacgcctgtaatcccagctctttgggaggctgaggcgggtggatcacgaggtcaggagatcgagaccatcgtggctaacacagtgaaacacagtctctacaaaaatacaaaaaaattagcagggcgtggtggcgggcgcctgtagtcccagctactcaggaggctgaggcaggagaatggcgtgaacccaggaggcagagcttgcagtgagccgagattgcgccactgcactccagcctgggcgaagagtgagactccatctcaaaaaaaaaaaaaaaaaaaaagataaaaaaagaaaagaaaagaaaaaccttggatgtatctatggccataccaccctaaaagcatctgatcctcgtctcacctcgcaagctaagcagtgtcggacctggttagtacttggatgggagaccacctaggaataccgggtgctgtaggcttgggctggtcacagtggcttacacctgtaatctagcactttcggaggctgaggagggtggatcacctgaggtcaggcgtttgagaccagcctggccaacatggtgaaaccctgtctctactaaaaatacaaaaattagctgggtgtggtggcttgtgctacttgggaggctgagacaagagaatcgcttgagcctgggaggtggaggttacagtgaactgagattgcaccaccccactccagcctgggcgacagaacaggattccatctcaaaacaaaacaaaacaaaaccaaaccatccatggaaatgttcctacctggacttaggatgggagacggagagttctccctgacagggtaaaagaagccttgacttggccgggcgcggtggctcatgcctagaatctcagcactttgggaggccgactcgggtgattcacctgaggtcaggagttcgagtccagcctggccaa

SEQ ID NO: 1560653 - DNA, 4001 bp, Homo sapiens
tttcatactacttttaaaattagacttggtgattttaaaaagtgtataattcaatgatcttcagcaaatttgcagagttgtgcaactatcaccatctcatactactcctttatggtgtacagttctgtaacatcaaaaggttccctacccaggtataagatttgtcccaacaccagggctattaaaaagatttaccagaggctgggcgcggtggctcatgcctgtaatcccagcactttgggtggccgaggcgggtggatcacctgaggtcaggagttcgagaccagcctggccaacatggtgaaaccccgtctctactaaaaataccaaattagctaggggtggtggcaggcgcctataatcccagctacttgggaggctgaggcaggagaatcacttgaacccgggaggcggacgttgcagtgagccgaaatcattgcctttgcactccagcctgagcaaaaagagctaaactccatcttagaaaaataaataaataaataaataaataaaggatttaccagagcatccaagaaatattattaaatacttgatcccgtgaaaccactcccctatctgttaacgatttttaaaattttacagatttcgaaaatcttcttctttatccttggacctaacctatccacagggtccctaaccatgctatgcagttcccacctctaccagaagtgctgggaaaatcacctaggttatctagcttccctcaaagtattttacactgttgtgagatttcctttaagattcaggagctaaagtttattttctttctggtttcctggcggagcaaaggccctgcacgtgtgaacggaaacaaaacccacacagactctagggatgccaaatattaacactgtgggtaggggcaccttccttctcggccgaattccctttcccagagagcctccagagggatcagtcaacgcccactgagcctggatcaaaggtcaagcttgcctggtcaagaaggatcctggatcaagcttgaacccgtttccagaaacaggggcgtcggggcagcagcaagcatttttaccacgcgccctaatgaggtggttgcacaacaggctttgaggattccggtttaacaggtaaataccaacagaggatgagccgagggagatgggatctgctccacggcatcgatggcatttcgagaatgtctgcgtcgcagagcaaacccaaagttttagcacattactcaagagttcaccagaggaagatcgccacgaattgaaatgaacaaagtgagaaaatgggtgctgtgtagtcaacgcatccgcgatgaactcaagctgggcggaaaaattctttgaatactccggctttgttttgtgctaagacggcagaagccccgaatttcggagttggaagacgcgtttctccgtgttctccggcccgttctcggacttcagggccgcccgccgcgcactcagtcccgtagttccccgggcttcaggcgcggacattccggggggcggaaaccagggagccgcggggaggccgcggtccggcccgcgacgccggggcccggagaagggaggcgagaggcctcccggagctcgacggagggaggggagggaacgaggaggccgcgggccggagcggggagcagccccgagcggcgcccggctcggcccccaccctgaggcccggtcccgcgtacctttggcaagggctacggtggagttttcggtgtcgatggtgtagaggatgccctcgtagcggatctccgccttggagatgaggctgatcttgctgccgatgtaaggggtgcccccgctcatggcgccgccgccgccgctcccagctgctcgcagagaggcagatcccacgccactgtcgcccgctccgcacgcccgctcgctccgtcggcgcctacagcagccgcttcagacccaacatggcggcggcgccggctccgctaccctcccccagcctcccgccctcaagccgcggcgcggcggcggcggcggcggcggcagcggcggcggcgcggggcatgctgggagggcgaggccgcgctctcgcgagacttggccggctactggtggctcccggctcattcgtggcctcgggagtcccggcagcgcttgttggcctggactacggtggtggtcttggggccgcgtgagaggaacttcggggaccggctgagtgcctcgtggcacccgcttgctgcgggctggagaggaggcgcgcggccttccttttgactcaggccgtggccgccttgtcgtgggtcctgtgtctttgccgacgcggggccctcggcctggagcgctgcccacccgcctccgagctgtggcgagccgctgctcatccttctaagacgctgaacctgcacctcgtggagctcctacggctccattaccgcagtcatcgcccggggagcttcccccgaggctgcccctggagctggggctctcacaaggactcaagtgtttcagccccttcctgtcccgctcattcagccggtctgaaccagtttcatggcttgcaacgccattgtaactcactaatcccaattatcagtatgtagcttggatcaattccgtgaaccagggtttctgtcgaatctcaaacgttaagggtccaaagccatgctccctgtttcccctctaacctgctccttcaccaccgttccctatttgatgtaaacggtaccatttttactcagctgctcagactaaaagccgtgagtcagccttgccctgtcttgcttccacatctgttctgactacacctctccgttatgtatacacaatatatcctaaatctgacttctcatctccattcctacacttctcccacaagccacgattactcgggctgaattattgcagtagccttctaaaagttgcctctgtgtcaactcttgcccccagtactttattctcaatacagcagccagagagatcttcttaaaatctaactcagggctgggcgcagtggctcacgcctgtactcccagtactttgggggcccgaggcgggcgcatcaccggtcaggagttcgagaccagcctggccaacatggtgaaaccccgtctctactaaaaatataaaaaaattagccaggcgtggtggcgcgcgcctatagtctcagctacttgggaggctgaggcaggagaattgcttgaacccaggaggcggaggttgtggtgagccgagattgtgccactgcactccagcctgggcgacagagcgagactccgtctcaaaaaaaaaaaaaaaaatctaactcagatcatgtccttcctctactcactctactgatcccatgttacacagagagaaaaccagactttggtgtctaaggatatacatgatttagcttctcgttctgttccagtcgcgtctaattcaaccagtacttgagcactttattccagtctctgctcaagcatcacctccagagatgacgtccctgacagccttgtttaaaataataccactcatctccttaactcagcttgtattttctttatagcatgtatctctctcaagtatgtctgtttaattatttgtatgtatctgtctccttcactagaatgtaaacattttgagatagtgatgttgttttggttgctgccgtatcatcaggggcctagtaacagcacgtggctcagggcagctgctcagttaatatttgctgcatgaatgaacagcaggatgaaggcagagcacaggcaggacggtgagctgagtgagcaaatggcgagaagcctggcatcataagagagggacacaggagagagacagagctctgatggggctggtgcacagtggctacaaagaaaggtttggaaatccctgtttcagtacaaggtccatgcgaggaagttgaattatttgtttttgtttttttgagacagtctcactctgtcactcgggatggagtgcaatggtgccatctcggctcactgcaacctctgtctcctctgttcaagcgattctcctgcctcagcctcccgagtagct

SEQ ID NO: 1560654 - DNA, 4001 bp, Homo sapiens
acgcaccgttctacatactgggaatctagtcggaagaaaaacgaagatcctgctcccacaaaacttaacacagggatggatccttccagctctgcccagtcttacatgccaactctgccctctaagtacaccgcagagagggacaggctctctgaatccttgcacttgaaatcgcctttgcaaaaattgtagcgggaaattatgacagtgaaaagagatcagacctaaccgactccattgtgcttctaacctttacgccatctttgcttattcctaggtataggccaaactaaccttgggaagggatttagtttatagtttgactctggaacaaaattggtaatagccctttcccgaaaagaccctcttcttgcctggggaccagtctgcctttgtaggactaacaaataagctacaagattagaaattaccatttaggtaacttcagcctctggctgcaagagtctgaaactccccaaattgctccttgggataacatcactattataaaatctaagatcagtgcttgagatattttgcagaccccgtacttgacggatcagctgacactacccagaccagtaatctggctcaaccagtcctgcgatcccacccaggaacagaagacagcaagaaaacctcacttcaacactcccgtcgatgactccatcgacctcaggaagctccaaccaatcagcactccccacttcctgagcccctacccgccaaattatctttcaaaactcggatcccctaatgctcagcggagactgatttgagcaataataaaactctggtctcctgcatagctggctctgtgtgaaatactctttctccactgcaattcccctgtcttgataaatctgtctaggaagacaggcaaggtgaacccattgggtggttacacactgaccagccggatttagggagagttctcactaatccacagttctgatgcagccacccctgggggaccctcctggttactgaatctcccactgtctcacagagtctggaagtcacatccccaacaagggccttggtttctctcattgaaaaaagaaggaccagaagctgatgggccaggaaactcccagctctgaattccttttccgatctgcacagtgggggacacgggcactttctagcccagatccagaacttccagaatcataaacaatgggccctgcagagacctgggccgcaatttttccttctttgtattgggaggatgtactttgtccacccctagctcaaaacgcccccttccgctggaatgacatgctatgtgacccaaggagaaacaccacaccccagcaccaggcctgcttttcagccagaaaccaagaggcctaggaggctgtgctgctagcatcttgcaagctctgaaattcctaaaactaagtttcacaactcagactggccccctacttcccagcactctagttttcaatcagggaggtcagactgggcccgaagcgtaagggaccccttccctgcccaaaaactctctgctgcatttggcggatccccaccttttttttttttacttcagtttccccacctgcaaactgggaaaactaactaaggcgaggccactgtactgtggatacaagtccgtgcaaccctaaatcccagacacgaacgtgatagagccacctgcagtctccggcctcagtttcccagcctcgtgccggggggcgggactcgaggctcggaccttacgttcgccccgcgccaaccaagcccacagcgcccgcccgcagggatcccaacgactgctgttcccgcctcccggtgagaccccgcagttgccctgccctcaccatggtgccggcggggaccgggctcgccggccacttccgccgccgccgctgcacacgctcccggcggtcgtcgccgcgccgcgcgccactaagctgaaagaaagtggcagagacgcaagccagtcagcaccgggctcgaagggcggtcaaccaatccacgcggagtagggcggggcccgctgggcgaaagggcggggcgggccgtgttcccgccggaggaacgaggacgagagccgtaaagtgccgcggcttgtaatgcaaaaggaggcggagcaacgcgcgccggcgcggggtgcattgtgaggaaatgcgtgcgcaggtgaaaccttcgtcggtctcctgggctccacgctgtgggcaaagccagttaatgcctttcgtttgcagtagagagagagaaatcgaggcttcgtggtgattgggccgtgcctgatgttgcccttccgactcctagttttctgattctgtaattatccagggaacatcatttaataggttggaatcctgaccacgaccctcggggcctcagtttgctccctgtaaatagtagtgtctgctccaaaacgttgcttactgtaaggatgaaatgaatgaaaccatgtaaaagcacttaaaacagcgtctggcacatattaagtacttattacctactctgtgcctgtttctgctcacagaatgaacaaaacacaaaattcgtggccctcagggagacagacagtaaacaaagtaaataggcgaatgctattagttttctggggcctgctgtaacaaatgcccacacactgcgaggtttaaaacaacagaacgtgattttctcacaattcaagagatcagaataatgaagtgaggttgtcagcacagttggctccctctggaggctctgaggacaatctgtgtgtcctatgcctctctcctgggttctggtggctgctgggaatccttggagttcttggcttgtagatgcagccttccgcgttctgcctttgtcgtcacttggccttctctgtgtgtctctgagtctcaaatgtatctctccttttttttttcttttttttttttgtagtagagacagggtctccctatgttgtccaggctggtctcgaactcctggggtcaagcaatcctccctcctctgcctcccaaagtgctgggattacaggcgtgagccaccgagcccggccgctcctttttcttgtaaaggacactcctttctcttattaagtccaccataaatttcaggataatgtcatctcaagatccttaattacatctgcgaagaccctgttcttttttttttgagatggagtctcattctatcacccaggctgcagtgcagtggtgcgatctcagctcactgcaacccctccctcctgggttcaagggattcttctgcctcagccacccgagtggctaggattacaggcacatgccacaatgcccagctaatttttgtatttttagcagagacggggttttgccatgttggccaggaggtggcctcgaactcctgacctcaggtgatccttccaccttggcctcccaaagtgctgggattacaggcatgagtcaccacgcccagcctcgtttttaaatgactgatgctatttattgacattattcataatatcaaaagactgaaaaaaacccaatgcgaccaaataatagagtaatacagctataaaaaggaatgaagacaatcttcatatactgacattgaatggtgtctggatatcttaagtgaaaaaaaccaaggtagagaacagtttttacaatatgtcctcttttgtgtgcaaaaagagaaatacatgcatgtgtatgtgtatatatatttgcatgtgtgtgtgtatatatatatatatatatattttttttttttaaccacaccaagcacgtgaaccaaatttgcttatatttttaataagaaacataaaggccaggctcagtggctcatgcctgtaattgcagcactttgggaggccgcggtgggcagatcacctgaggtcaggagtttgagaccagcctggccaatatggtgaaaccccatctctactaaaaatacaaaaaaattatctgggcatggtggcgggcacctgtaatcccagctactctgggggctgaggcaggagaattgcttgaccccgggaggtagaggttgcagtgagccgagaacgtgcc

SEQ ID NO: 1560655 - DNA, 4001 bp, Homo sapiens
gtgagccacagcgcccagttaattgttgtacttttagtagagatggggtttcgccatgttggccaggctggtctcgaactcctgacctcaggtgatccacctgccttagcctcccagactgctgggattaaggcgtgagcccccgcacccggccccaaaccctttctgaaagatgattctcccactggcccgaataactgaatatggacaaatgtcagctcagcctgcagcactgtaggggcagaccaccacggtggaacagagtcccgagctggcagcgtccgggagctgcaagtgtccctagccaacactggccagaacggggaccctggccctgcaaaggtaaggcactgagctctgtcaataaccagtgggctcagaagaagaccccaagatgatggaccccaaaaaacaaccctcagttacaacctcctgagagcccttgaggctgtggtaccctggctcctgactcacagatcctgtgagataataaaatggtgctgtttcagctgctaaatgggtgatttgctatgaagggcagaaaacaaagggaagcagtgtgaccagcaagagcggccgctcactcatgtccttccatgtccggagtcagcatggtgtagactgagaaaacattttattcatattcctttttctttttgttttgagacggagtcttgccctatcgccaggctggagtgcggtggcacaatctcgcctctggggttcaagcaattctcctgcctcagccccccgagtagctgggactacaagcgtgcgccaccatgcccagctaactttttgtattttagtagagacagggtttcaccacgtaggccaggatggtcttgatctcctgacctcctgatctgcctgcctcggcctcccaaagtgtcaagattaaaggcatgagccactgtgcctggcctcctttttctcttttgagactgggccttgctctgtggcccaggctggagtgcagtggtgcggtcatagctcactgcagcctcaaaccctagggtgaagccaccctcctgcttcagactcccaaattgctgggattacacacgtgagccgccccgtccggctggggcactgtgatttttaataactctcatgccacccagttgtctacaatccagggacaaagaggtttgggtccccgtcttacaaaaaaaagaaaccaaagatccaagaggctattgaataagtgacgtgttgtctgactgcttacttcctgctgagagctgcctcaattacattacatgcctgtaaccattcattctcaccaccccctgtgaagtgggtggagttaccagccccatttgacaaatgaggaaacggaggctaggagaaggcagctcacttgcccagtcaaaaatgctaggctgggcatggtggctcatgcctgaaatcccagcaatttagggggctgaggcaggcagatcgcttgaggccaggagtttgagaccatcctggccaacatggcctctctactaaaaatacaaatattagccgggcgtggtggtacacattaattccagctactcgggaggctgaggcacaagaatcacttgaacctgggaggcggaggttgcagtgagctgagatcgcaccactgcactccagcccgggtgacagagcgagactgcgtctcaaaaaaaataatgaaaataaataaaagaggtgcttccgcatgcgtcctcatcatctctgttgctgggtttatttgaaatttttaaagagggggtaccgacagcgggagcctcctcaccttcgcggcctccctggaactttacccggatcgtcttgtcgatgtacttggacaagtccaagatgctctcctttttcttcttctccttatcctgcggggaaagcagagcgcatgagacctggagcgcggcccgagctccacgccccccggctccagattccgccgcgcgctcaccgccatcttgtcgcgccgtgtggctcttcgcaggcaccgccccgcgccctttgacctcccccacgcgcatgcgcggcgcatgcgtggcccggggtctcggggcgttgctgggaaacatctgccgttggttgcggcgggcaccggccgacatggcggcagcggtggcggctgcgctggcgcggcttttggcggcctttctgctcctcgcggcccaggtgagcgcggcaccggtcccgacggcaccgcgggctgcggcccttcggcctctctgtccccgggctacgcgcaggaacgaccccgctcggcccgtcttgggggtccagcctcggggatccgccgtccccgcgttgtcggccggcggtgccggggctcggccgtgaccttgcgggtctgtccccggctcctctcctttccccgcctcggaggccctccgccgctgcagcgccactcacttcccaccgggtctgaaatttgtgccccctccatcctccggttctgcttctccgtttcggggtctccagttgccgccggggacgcctctctccggctctgtggccttgagcaggcggctgcccacccctctccgagcctcagtttccccttaggcggaacgggcacggtgctaagctaacctcaccctagggggtgcggtgggggaacccagaggcgtcccgcgcgtcccccagtaactggcagcatcctggagcggccaggagtccagccctgcactggggtcggatccccgctccatcttttactccgtgaccttggacgatggaattcgtgtgcagaaggaggaccgactatggtgtggattctggaggttctgtccagggtgaccagcgcccagggccaacaggccttcattatgttcattgtgtgtcatttgatgtaaagagtgtcaggttctagtggggacagtctacgagatcgcactgtcataactgcatcttttattttcttaattccaaatcttccctctctcctgagttcggtggctcaggcaatggaacctggagcagccccacaaatgcagcccttaaccttcactaccccctcagagttctcactcttaaggcgtcgccgccacctggctcctcagtctccactcctccagccccaccgctatccctctgctgtggctgcctttgtccaccacatccccagtccatcctcgacacagcaggggtgaccctttcaaagtatgtcagaccgtgtcgcatccagatgagtgcgccgtccagttgtgacctggctgctggggaagcctgcagctcattgcagtcgcttcactctctagtcttttctcttaccctgagatgcccctggtctctgcaaggctgtcgggccccctcggaagctttctgagaaccccagtcctacccccagctgctctgtcagccccctttggactccccccattctgcagccaggcacctagagctccccagacatttggaaggagggggaaagccagaggtggaagaaagatcacagaactctgtggagagagggactcagtttgcctgggaaggcttttccgaagcagatctattttttttttttgagacggagtctcgctctgtcgcccaggctggagtgcagtggcatgatctaggctcactgcaacctctgcctcccggttcaagcaattctcccacctcagcctcccgaatagctgggattacaggtgcatgccaccactcctggctaaatttttttttttttttttttagtagagacgaggtttcaccatgttggtcaggctggtctcgaacttcagacctcaggtgatccacctgcttcggccacccaaagtgctgggatgacaggcgtgagccaccgtgcccggccccgaggcaggtgttctgaatgatgagtaggagtttgccgggtcggcaggaggggaagggtgttggaagcaccagaagcagcataagcgggggctgggaggtgtgagagctggcaggttatttggggttggcaaggggtgggctgtggctggagtgtagggtggaataatgctggaaggaagggtttacaccctgaaagatgt

SEQ ID NO: 1560656 - DNA, 4001 bp, Homo sapiens
cggtgatggtaatcctccggccctggtagtaatctcccagggtcacagcgttgccctgcttggtggccacgaccctgacggtgcgcacgctgtcctggcactcaacgtaggggttgtagcctgggttcccggctgccagctgggcattgagctggttgtcgacgctggccggggagaaggcatcggcgatgcggtcccggcagaaagacttgtacttccagatgacgatgggttgcgtgggggtcgaggtcatctggtaggtacagggcagggtcacaggctggaagaggatcaccacgtggtaggggttggacacggtcacctggatggccctggcaggagctgagggcaagaggagagacagcaagggttgctgtgagctcagggaggtgcttcaacaggaacgccacctgtcaccagcttgacactcgcaagtatgtggtttacagagtgcctggcacacattgttccttaattgccaggaccagtgaggtagccacgataatcatgcccattttatagacccgtggggctgaagtggcaggtgcacggtgacacggccagtttccttggactcgcccgccatccctcttcccagcctgtggcctctgaaccacaccagtcccctcttccctttgccattcacccacaacaaggggcctctgtgtggcctgggcaggcaagcccagatggccatgttgatgcccccagcgcccaaggccccacttcaaaaccgactacgaaggattccaggttacccggggccttttgaatttggagggaaaaccatggagttgtttgcctgaactgctttgccatggagggactaaagcccccacaatatctccatcagcctcccaccacctcaccctactctaaagtcatttcaaatgactgaaccaaaagtgtctcgggaaagacctcatcaccacccaaatatcccatccaggtgaaagcctgccagcagaagtcggtttcaagtccgtaaatccatcccaccagactcttacgcacgtataatccggagcccgcgggaggtgggtggggtgcgggggatggggagtccccagtcccacacccacccgaggcctaggcattgttccttcgtctctgtccctctaggaagcgtctgatccagccctcccgtgccctctccccgttactccaaaacttagaaatccccgggtgcgcccaagtcccatcccggcttttcttttcccagagatcgggcggtcttccactccctccccacaaagagttccattctccctgccgctccgggtctcaccgtccagggagtttcacttcctgctatcttccagataagggcgcggggagcgctccccggcacaaatggggaattcctctcactcccgcgcgcaacagatcgcccaagacccaggggatcggaaggtcccagcctctgagacccccgcttcccgcttcccgccgcctccaactccatccatccccctctacagttccctccggcgttccgcagcgtcagaggccccgtgccccgtacctgtgcaccaggtgctaagcagaagccacacgaagacgaccgcgtcccggcctgcggcggccgggtgggagcccagccctctggagagcccgccggccaacagcgccatcgcggccgtctgggcgcgtctggcccgcgcgtcccttccaaagtaccttagggggcgcggcgcgcaccaaggccaggaggggtgcacgctcctccccttcccacttccgttccttgtccctactccaagtccgtcctgttgcattctggaagttttaatgagcgtaaacgacgtggacaaagggcatgctttcagatatgggggagaaaggtgcttgacccgccgcggtcctccgagccacactccacccgctgcgcgctccggtgaatggttcggcccaggtacacaagggtgggagccgagggctgggcttaggggtgagcggcggggaggggttcctctgcctccctccccggaagtgggctgacccaggtgcgctccgtcccccagggcccgaaccaagtgactggcccgctgggagggcgcctgcggaccacaggtcccttccggcccccatctgctccggccaaaccaagcgcaccgagatccatgcaaccgagacccacttggagcgattcacctgttgagatagggcgggtcccgccgcgcacctgttccctccctgcccaaacccctctccccggctggcgatggacccgcctaggtgcgccctgccgggaggagcgagtctaagcaaagtcctggctgggagaggcttgttggtggcgcctgacttctccacttccactggggttcctccggaccgggtggagggggggcgcttcgggcctcctgtgtctcccagttagatgacctgaggaaccctctaaagtccccggaagggaagctctgccccctcagggatgcccaaggggaatcagggccaggaaaagttggaattccacttcggaagttttcgccacctcccccacccgttcccaacttgtggttcggcccctgggcatccctagcccccgggtcagccctccggaaattctggctcttaaaggggccgagcgaaggcgcggggcttgggaccggtttccgcttaggaattcccggaacgagccacctgcgaccgagggcgggggcgcggcgcggcgatcagcctgcgcagcgctgggcgtgactctgctgtctccaggtggcggcgagggaaagcgcatcctgggggaaccctgggcgcttcctcgcgttagactcccccaggttgccaactggccagtggctggtttcggtacccaggcgtgctttgttctactggccctgttaaaactcaagccagatcacgtccacctgctcacagccctcctgtggctcctcctcactctcagcagaaactgaccttccccctcttatctcacctcctcccactctctctggcttactcagcttcggacaccctggcctcctcgctgtttccaactatacttctcacagtcctcagagccatcgcccgtgctactccctctgccagaacacccttcccgcagatgtccacatgatcttcctcctcctgtaggacaccattgcagtgacaccttccctggccactttttataaaatttcaacccgttcacgtcccttcatcgtttaaaaaaatatttttatgataaaatatgcaaactataatatttatcgctttaaccacttcaagtgtaaaattcagtggcattaagtatattcacaatgtcgtgtaccaatcaccactctttatccccgaaactgtttcatcatccccaacataaactctgtgaccattaaacagtaactccccattccctgctacctgtgcccctagtaatttctattctactttgcttaccaaattgcccattctaggtgcctcatataagtggaatcgtctaacatttgtcctgtgtctagtttatttcacaaagaataatgttttcaaggtccatccatgttgtagtatgtcgaagccatgtagcatgcagtaagatcaaaatttctttttacagcggactagtgtaccattgtatgtatatgctacgttttatttatccattcatttgtggatggacctaggttgtttctaccttttgactattgtaaatagtgcagctgtgaacactggtgtacaaatatctgctttcatttcttttgaatatatgcctaagaatggaattgctgggtgacttggtagttctatttttaaccttttgaggaactgccaaactgttttccccaatgactgcactattgtacattcccaccagcaatgcacggaggattccaatttctccacatccccaccaaaacttattatccattttcttgattatggccatcctggttagtgtgaagtggcatctcattgtggttgtaatctgcatttccccaatgactaacgatgttgagcatatttccacgaatttattgtccattagtatatcttctttggag

SEQ ID NO: 1560657 - DNA, 4001 bp, Homo sapiens
ctagacgtctggcccgggcagcagcgacaaacagcaacgctataaatagtggagtggaagtcactcaggcccctagcaccccagaactctgcaaaggagggcaatcggggaggggaaaccaagacgcatcctgagggggcttgaaacaggtatatgactaacgaggttcttctccccacgcctcagtttctccatctgtacaatgggaggcaaattggcttagacttcgggctgaagggcacagaaaccgtacttttgtcttatgaagagattttggcgtacgattttattgaaaaaatacgttattttaaagccttttaaaagtgattaaaaaacaaaaacaaaaacaaaagactcgatttctaagagcatttctaagcccgcactgtctgggaatctagaaccccgccctcccgcacatcccggtccgggactcagacgccatcctgagcctggccgacaggtggcgccattttcacaggcctcggcagctggggagggaaggctcttccctctgactgtgggtccagcagggtgctgaggtggagggggataacgggagtcacagtccaggactgagaatcccagagcctgagttctagcccgttcttgcccttccacgatgtgtgtccagaagccagcgtttcttggtctttgggcctcagtttcccgcctgaccaggagaaaggtgccgttcttgcagacatctcccagcccagagggtctcagtggcggagcttccagctccggttcaagtgcgtcgcaatgaaggggccccccagacaagtccattatccccaggctaagggggtctagagacgagggcgcgcgcccagaccccgagaggagagcagtgggggggtgcagagaggggggtgtccagcgcgtgggcccctctcaggtgggtggggccgagtggaggatgaggccatctggtggggagcctcggggatccccgatcttgccgtcatccctcccgccttttctccaggttaaccccttcccggccccgcccccgccgcggctcgggttactaaacgcattcgcagagacccaggcgggagaggagcccggggcctttgtaacggagcgctgggccgccaggcggggagggtgggtgggggtgctgggcagacggcttccttcagtcccgtcacccgcagacaggaagggcgcctatagcccccagatctatagggaatcctggatctctcgcggtgaaatcactggagcctcattcaatcccagagtcctctaattctaggaaacttgagcatccccaaccgttctgaagcctgaggactcccccacccgaccccactccccacaagcccctccaccatcaacgcaagagtctatgtcttcctgaccaattcgaaaaacccaaaggtcgcttttcatgaacacagagcccccaaatcctagaaaaccaggacaactcagcggcctcataaagtccctccagaatcccccaacacctttcctccttacgcgcccaagaaacttggggcgctccatcctagctcgaagaccccacacgtctctatcattctaggagagctcagccccccaccccctgccccaataaactagagacctttccccgaactaaccccaggattctctggagacttagccttctccaccacaataaaggggactctttcccctaaaaatctcagtactccccgaatctaacccctacaaattgagggcgcctaataaatccaagggccctctttgcatctccacatcgaagcagtgggttcgagtttcccctgaatccgaaagccgtggtcctcctggaccaccagacttattgggtggaaggggcacaaggaagcagggggcttacctggccgggcggctggggacccccgggacctcgacgacctggctggggctggggctggggctggcggcggaggtggcggctgcgaagagcggcagcaacagcaccagcaggagggggcggcggccgctggtgccaggcctcggcatcgtgtcgggcgccgagtcccgctccgggcgggcggtctgtccagcgggtcaggctagccccggccccgcccctgcccccgcccccgcccccgcccgaggccgactcactttctccacagtccagccacgggctgcgaacttcccgccaatcacagcccggcgccgccagcgctcgccgcgcggccaatcaggaggcagcagggacaggtgccggactaggggcgcgggggacctcgagttccccacgcggtggggggaaattaggactcggatactggctccgtgaaccttctcgtggaacagaggtcccaggcgtaggggtgcttaaaaatgggagggatacgggagcggggttgggggcagggtcccctaagctggactccatctggcagtcctcagctctctgctcccagttctgggagaattcggtcagaatttagctccctcgctggcgtagaagctggaagccccccacgggtacccctttccacgagagagactgaggattctgcaaatggagcaccaaccctgcaccagcccccaggtcctgcccctctgagggtcccaagttcacattggatcttctcaaagaattgatctcttctcaagaccctgggcttcagggattccaggctcaccatctgcaaaagcttgctccccgaagctctgtccctcagtgaacccagccaggctctgcccctgatccacaaactctgctcccagggtgctcctggctctgccccctcctgcaccccacttatcgccgcccccagagggtatcagacccccttccttgcctgagtctttgaatgctcccaagagcagcctcccaccacccagaattgcagactttctccttagagagttcccagttccggctaggtgccctggcgcgggcctgtaatcccagcactttggaaggccgaggtggatcgcttgagtccaggagtttgaggtgagcctgagcaacatagtacaacataggaccccatctctattaaaaatccaaaaattaggccgggcgcggtggctcatgcctgtaatcccagcactttgggaggccgaggcgggtggatcatgaggtcaggagttcgagaccagcctggccaagatggtgaaaccccatctctactaaaaaatacaaaaattagctgggtgcagtggtgggcgcctgtaatcccagcgactcgggaggctgaggcaggagaatcgtttgaacccaggaggtggaggttgcagtgagccaagatcacaccactgcactctagcctgggcgacagagcaagactctgtctcaaaaaaaaaaaaaaaaaaaaaaaaaaaaaaaaatccaaaaattagccgggtatggtggcatgagccagtagtcccagctactcgggaggatgaggtaggaggatcacttgagcctggtaagtggaggctgcagtgagttgagatggcaccactgcactgcactgcactccagcctggacgatagagtgagaccctatctcaataataaataaatacataaaactatataaaagagagtaccgatcccttccttgcctaagagtctccaccactaggagctgcaagccacaggggcccttaaaccccgtccacaccggggttccaggcttcaagccttcaaactcagggtctcaagcccagcttgagactcaaagctcttgggagcattcaaagactcaggcaaggaagggggtctgataccctctggggatggcaataagtgaggtgcaggagggggcagagccaggagcccccaggaccccctgggagcagatcctgtgggtcaggggcagagcctggctgggttcactgagggacagagcttcggggagcaagcttttgcagatggtgagcctggaacccctgaagcctagggccttgagaagggatcaattctttgagaagatcattataaattcaaggctccaccctatattctctgaaatacaagccccttctctccctaaggcaccaccctcagagct

SEQ ID NO: 1560658 - DNA, 4001 bp, Homo sapiens
ctctgtggaatcccctcccctcccagctaaggattaagtgccaaaggctttttattaatggctgcctgtaaggagcacaatgtctggagtcctcttgcgagaacccacttatcaagaccaaccctggggttctctgaagataaatgggatcagaagttcctggggaagggggtgagctagaagaacaggacttctggacaatactacagagttatctggggaaaggcacagtttgggaggtgggagggaagaatgagagggaatttcactggaggagtggtctctaaagtctgttgccatggttggagagcgggtctagggcctggagcaaaaactcagctcccttaggtaggagtgtggggccatgactccagggtggtctaatgggggcttttaattgagtagtggggcctaggagaggcttaactaggaatcaaaattgcagaatggtaagggtctctgatggagggggtgggaaaccagccaggtctgagggtatttcccaggctccagaggcatttctctgccttctcttggcctgaatgcaggcccgcaggccagctccctgggggtgcctacacccagggtgggccactagatggccacagccaacgtcatgccccacagccctggccaagcggggagttgaggacataggggtccctttgaggtcagcccccacttcacatgccactccttgcacccccaagggcttggcacccgcctgggcatggcgcctggcacaggcacgttggggctgggccgggaaagagtgaaagaaagagggaggaaggggaggagagagggagtggcagcgggcgggggctcaggcgggagatgagctcacgccggccgggctgggctggctgggggccaggctgggcgagttctccgctccaggggcccccactccccactccatagggtctgcggggtagggggcaggaaggcccgatcccagagagtctgcccacttttgcatcctggaacaacaggtggtgcgccctcccccacctcacctgaacccccaaggctccccatctctaggagtgcctggtgcatacacctcctgtcccctccgcccccagggggcgccccttccgtaagccctcttatctggatttctgtcgcacgtgggacccctgcaactcaggtcctgcggagacacccccaccccacccccgccgccacacacacacacacacacacacacacacacacacacaacccccgtctctgtcccctctccctcttagttcttcggattaactttcttctctctagtaccccacctcacaggcattcccatacagaaccttcccacccaaacacacagaaactgagacgtcccccatgcggtcctgagactcttgcttggtccccggggactccttactcagcgtctcagaattcgagcccccctcccaaaagttctcaggcccctcaattctgagatccccattttgacgcaaagcatgaaagctggcgccaattccctcacgtgggacatcacaggcctctaagaaccctcattgcttgcaaaatcggaaccctcaggacccaaccccaaaagccaggaatttggggcccccttcctcaaatagcccctgatattcccttgcactattgcatatggaatctgggctccctctccctggaggactgtctcctccatccccagggatcctcctcccccccggagccgctctctcgggaccaccaccccgcactcacaggcgcggaagccgggtccccccggggccgccccgccgggagcgccgctgtccacgctggtggcgttgcggggcgcgcaggtcggggtacagcgggagccggtcggcccatggacgcagcgcaggccgcacacgaccggggtgaagcgcacgcggagacgctctccgagccggcccagtccaggctgcggccctagctgcgccagcagcaccaatagcgacacccagagcagccgcacgccgcccgccatggctgcagcgccgcgctccgccgcgccgccgccccagcccgcccgaggggcccggccgcacccgcccgcccgcccgcgggggaggtcgcccgcgcccccgctcaggccccccctcctcaccactccctccccggcggccgcgcgggggcgcgtggggctgggcgcttagccagaggctcgcaggctgggcgctagactcgcaggggtgagcggggcgccccctctgtccccatccgcgcaccaacaagtggaccgggcctgtaggggagcggcggggaagggaacaggtgggggcgggcgggtttccccccagacagagctgaatccataaagaggaaatccattaagagtagtgggggccacatttggggagacagctaagagttgatcctcttctgcccggggcacagagaaaggggcttcatcttgatagggggctatcatggtacatctggacagccaggtgggacatctgagggatgggagaagggtcgctacacctgggcacataaaggaattgggcgtctagatcctgggcaggaggctggaggtgggggggatacatgtgaagatgtagccacatctggccagaacgccacacctggcgggagaagtcacaatggataaagggaggctgtgggcgggggtactaacatctggcccgaggctcacatctggaagactttagggggaggggtcacatctgggctgaaggctacagcaagaggagggttttgagggtgtttgagatgaggggtgttctagactaggggtcaagagctggagcgggaggagggcagggggaagattcgggaaacaggaggaggcctttggcccccagccgccccacaatcttgagcatttggtgcccaggcaggcgccaacccgcacaatcgcttttgttgtctgggctggttcggcggagctttctaacgggccagcgccctccctcttcggccgcggggagcccggacgcctggcttcccggccccacccccgcgggtcagtgcctctggcctgtgtctggtcctgtcccgggctcacctcgcacggccggacgctggggtccctagagggggcctcgtcctgggggtgggtgctgagctacaacggggggcgggtaggcggcggctggaccgtgggaaccagacggctttatctggcccggaacccccctcgccccaggcggaggaaaggcggatgtgcttacccggggccttgccagcgggggcacgctgtgggggcctccttctcagtagtccccggccccctggcccccggggccgccgccgcttcagtagagctctggcctcctggagcctgggtgggagaggacggaaaagctgctgtcaccgggttaaactgacctccccaccaaagggcctccatgccaggaaaatgtctttcagtagcggctctgcccaaccctccccccacaacacctatttatggggaccaggcctctagtgggagagaaacaaagaccctgagagaaagagagatgatgggggttgggggagagaaagagagaaggggcagagagacttagacatagaggcaggcagtgagacacagggagaaagagagagaggaaaagagacaggtaactagaaagaaacagaaagagacagaaataatgcagagatgggaagagcctgagataggcaggcaagggatgaaatagaaacggacagacaggctgatagcaaaagaaagagccggggagggaggggggagagagagggagaggggaagggaggaggagcggaaacgggggcaaagctaggagttcctgagggaggatttggtaggggagggactgcccactcacgtcagtggctgccagttgagggacacctgtctcttcctcacgctggggctgggactgggcactgcaggcactgggttcaggcaccgctgggggcctgcacactttttgggctggcagcttcggaccctgcagaaggcttcggagacagccagggactaagtggggaaggaggggaccaagtacttc

SEQ ID NO: 1560659 - DNA, 4001 bp, Homo sapiens
cgtgaccacatgtaggatcccaagcccacccctttcatgtttgcttcgctttggggttccaggccccatatcccaaagcagttggattcttaagcttcccagttctgtagcgttagccccgcccccacctcgtggatcccaggctccacccacacagggtactaggccacacgccgtgaccacagagcccaccccagaccaagaatggcaactgatccagttgcaccccccaccccccactcctgctccttcttccaatccaggagggtgtgcaggactgacggggaagcccttcacccccgctcactgtgagacacacaggctgactcacacggctacacaccattactgccacctacagcaatccatgcctccatcccacactgacacccagaaatctgggtccagcaccgtccagggacacacagtccctggggcaggtgacgacggcactcacactccattcacagctattcgtgggctgtcccagagcccggctctgccccatgactgtactccatgaccctgtttttgtataacccccaagacccctgctcacatgaccctgcaggacagcatatccctacccgcttcccccctcaccacctcctaccctgtggctggagcatttgctgggggcgctgctgaaatttctcccttctgtccgggatccagcgcatcttcaatgcttgttgctaggcaacatcctctggctcaccactgcaacttccggcgttagcctcccctccccctagaatttggagtccccagctccccatccctcccatcagtgtcactatctcccaggatcgtgtctatgtcacctcttgaatcctaactcatctcaacccttcagaatccctcagagttctagtccccccgcattccagaatcttccacccctccccccatgccctctcacgcacaaaaacacacagagttaatactatactaggataatactatctctagcatttaaaaaacccagctcttcagtgttctagatttgctaacatcccaaattctcctctctctctccctctctctctctccccccccaccccctcccccagaataaggccggctcacgtctgtaatcccagcactttgggaggccgaggtgggagggcagatcacttgaggtcaggagtttcaggccagcctggccaacacagtgaaaccctgtctctactaagaatacaaaaattatccaggcatggtggcgcacgcctgtaatcccggctactcaagaggctaaggtgggaggatcacttgaacccgggaggcagaggttgaggtgagctgagatcacaccactgcactccaacccgggcaacagagaaagaccctgtctcaaaaaaaagaaataaagaaaataataaaaatttaaacatgaaataagaatagaatgaccagcatttcagcaacacgagcgttctggattctccggcctggaaaaaaaaatgactctaatattctagatctgtgagcattacaaaacaccaccatattctagatttcctgaccttccaggccctccccctacatactagatttcctaacatgccaatatcccccaatattctgaatatcctggcatgtaaaaaattttctagagtgtgaggctgggcatggtagctcacacctgtaatcccagcactttgggaggctaaggcaggagaatggcttgagcccaggagtttgagaccagcctgggcaacatagtgagacaatgtctctacaaaaaaacttaaaaagtagctggctgtggtggcacacacctgtagtcccaaatactcaggaggctgaggcaggaggatcacttgagcccagaaggccgaggctgcagtgagccatgattgcaccactgcaccctagcccgggcaacaaagcaagaccctgtctcaaaaacaaacaaacaaaaacaaaattagggtttgaggtgcacagctatttcagaacaccccggtttcagaggcactcaccttttacgtctcccatttgtgttccagattctctgataatccggaatctcctgccattatggatttcttggaacgcaaacaaaccttccagtgctctggaagggcggatagtccaggatctctcccattctctagatttcctagtaatccaggttcctttctgtatcctataattctcagcattccagacatcctggcatgcaagatattcctaccggtggagattcatgggtatgaactccccttgacactcccctattctagaatcagtgatttttcaggtcctttttgtcagaaacttctatattctggattctctgataagcaggggagaactctaatattgttaatccatgagcactccagaatatccttgtgtccgagatgtcctaatgttcgagacccctctctactatgtttcagaagctctggcattccagaaactatggaattctagaattagcatgttctagtattctctactcctagtctgtccccactttctgtcccttttttattggcacaaggaaaaaagatgcagaaaatctcctcaaggaagtgccgtaggaacgggcattatttggggaaaaaaaatcccaaggccagccaggaaaggtggctcacgcctgtaatcccagcactctgggaggccgagttaggtggatcatctgaggtcaggagtttgagaccagcctggccaacatggtgaaaccctgcctctactaaaaatacagcaggacacatgatccaggctgcaataatggaaggccttcatcacactggccacagtaattggttcaggaatggccacctgacttaattcaagccaatgaaaatcagtcttgtgatttttgctgttgctagggaagaaagagttgctaagcagctgcttagagtcaccttgccacagagagaaaacctgattgaagatgtattccagaggtaagtgaagttaggagataaaaagatattctgggccggacacagtggctctcgcctgtaatcccagcactttgggaggctgaggtgggcagatcacctgaggtcaggagttcgagaccagcctggccaatatggtgaaactctgtctctactaaaaataaaaaaattagctgggcatggtggtgcacacctgtaatcccagctactcgggaggctgatgcaggaggattgcgattgcttgaacccgggaggtggaggttgcagtgagctgagatcataccactacactccagcctggatgacagagtgagactttaaaaaagaaaagaaaaaagaaaaaaagatattctgaattagtgtttgaagccccggatccagccatgcctgaaggcagagtaaaagccaacacattcctcccctgcaacaccttttttgttttgttttgtttttgagacaggatctcactctgtcactcaggctggagtgcagtggtgtgatcatggctcactgtagccttggcctcctaggctcaagcgatcctcccacctcagcctcccaagaagctgggaccacaggcatgcaccaccatgcctgcttaatttttgtatttttttgtagagatggggttttgttatgttgcccaggctagtctgaaacttctgagcacaagcaaactggcctcccaaagtgccaggattatagatgtgagccaccatgcctggcctccctttgcttaaacaagagaggtagatgttcctgattttgcatatatcgggttgggtcccacatcttccccacccctttcctggggagtcccaaacctgctaagaataagcaagatgttggcagtgaggactttattggggagggtgactttggcttccagaaaagagggaaggtggggacctagtaacaataaccatttattccaaggaggccctggccctgaacccggggttcccacaggaatcagggaggcacctgagtcccccaggaccagggcatcccaaggcatcatggcagctgcgttgttcaaaaggaagtttcattgagcttcatcttgggaggtgtgag

SEQ ID NO: 1560660 - DNA, 4001 bp, Homo sapiens
ggcgggcacatggaccccgacgtgggggtactcacctgtgggaaagaaggcagccagtggggaggaggactaggtgccccgctcccacctgcttagctcaagaaacccctcaaatgggaaggagggagggggagggggaaaggaggaggagagaagtttcagtaggcaaaggcagatggcgggggcaggcccagaaacttccaggacacgggaggggggtcctacgttagagtaggaggcgccccccaggtgctaggcagcgcactgtccctgagctctttgtgacccaggaggggcgctgttgcccagcctctgagcaaatattccttcttccagaattccctcacctctgcagcctggagagggaacaagacagggagcccctaactgatcctgggatccccagaaaccccaagattaaccctgttatcctcagatctaaagatccaacccagagactcctcattaactcattgatgccatgtgagcttggaatccctccaagatggactctgacccttcacggaaggcccccagcccccacccaggctgaccctctgcacctcaagaatgaccctgcggttcttcccattgctgtccctgaaagtgctccataattgcttgagtgacccccactcccactgcaaacatcccccatagcaaccctgtgaccccactactgacactatgacctcaaatgctgaccctagacccccaaacactgaccccactgcccagtccagtccagtcatgccccaaccctccctctggcttggaagcccccatcctcatcagcatccacgctttttaaaatttgtttatttttttagagacagggtctccctctgttgtccaggctggagtgcagtggtgcaatcatagtgcactgcagcctcaaattcctgggctcgagccatcctcctgtctcagcctcctgagtagctgagagtacaggcatgtgccaccatgcccggctaatttaaaaaaaaaaattttttttgtagaggcaggttctcactctgttgtccagggtggtctggaactcctgggctcaagtgatcctcctgcctcagcctcccaaagtgctgggattacaggcatgcaccacaatgccccgcgatcatccacagttttgcatactgttttgacatccctgtttgctcttggttccagagtccaggatgtcccagcaaggtgtgagactgttggcccctctgccctgtcttcctcagctaggccctggggaagcaggcctggcccctcactagtgggtccctgctggtgaatgaatgaatgaaggaatgaacaaaggaatgcaggctgggtcccaggcccgggatcctccacctttaggcccgctcccctcttaccccagcactgttcttgcagcctggtgagtgccctggctctgtcccgtcagggctggcagtctgggccagggtgtggtttccagcgtcaggccaggctctgctgtctcgcgagggtccggcctcaatgctccaggccccggcgttgggccgcgcctcctcgtgggcctcggaaggccaggatagccgaggtctccgcgtaggtcccccccagggaaagtgagcggctcccgggccggcccgccttctccccgcccccggcggcccggtttcctccctctcacccctggcggcgcagcggccggaggatgctggcccagtgcagataagggccaggctgcctggccgcgcctgataaggagcctggctgaccccggaggaaaccagcgggcggggacctagcagcgcgggcctcccggccccgcccccagccggcgctggcaggactcggtccgccacccctcagggcttcgccttccgctcccccagccactgtagggaccccgggcctctggggacccgggccccagggcagccggggagggaggtgcctggatgcacgcagggggtaaactgaggcagggaagctgcctcctcttatgtccgagtctgccctttggctttgcacactccctgcccgaatgtctgtgctgatgggggtgagggagagccctttccggcccgttggggccgcgtgaccctgggcccccacctcctctcctcacccagcctggttcctctttttacagaggcccttccctcctctccaccacccctacccgggagtggggcacccaaaggggaacagttctaacagtctggccttgggtgtccagcctgggcaggtgtcccaagccctcagcacagtatccacacatttccaagcccaggagggtgagaggaagagccatggctgtcaggggtggggtggggaagttggatttcctagggtgctggggctggtgtgaccttccagtagatgcccaacaggtccccacaactataggcctcttggctacaggatcacataactccaacttggtggtccatggccctcaccccacagcacccggccccttcatggggggcagttatcctggcttggtggtaaacctcaagaccctactggagcctcccacagggagaggctctgggcacagccaggcagcagcagctaccagactgccacccacttgtgatactcatgctttggcccgtctgtgtatctgggcaactgcaagagcccccaggcaggcaggcacccagcagcaggactaccaacccccccccccccccgcccaggaatggggtggagcccaggaccccacgatcaacacctccattgctttcctccaaagaagcaggaactaaagttttatgcagtaaaggccgggcttggtggctcatgcctgtcatcccagcactttgggaggctgaggctggcggattgcttgggctcatgagtttgagaccagcctgggaaacatggcaaaaccccatctctacaaaaaatacaaaaattagctggttgtggtggtgcgtgcctgtagtccctgctactctggaggctgaggtgggaggatggcgtgagcctgggaggtggaggctgcagtgagccaatattgcgccactgcactccagcctgggccacacacctagaccttgcctcaaaaaaaaaaaaaaaaaaaaaaaaattaagcgctaactctgatatcgctacaaggagggtcctaagattagcctcattacagatggggatgaagggagcaggagccagagaggggatcctgccccaggactcttcgttaacgttactaaaccccactctggagggcagggaggggtacagctccccctcactgggtgtctgggcagcagcctgcgaggtccctctttgtgtgcacgcccccctcgccccgggcctcagggcaggaagcacctggtctggagcggatgcacagggcgcctggttccggtccagcttccgccactgtggcccctggagagctgggccaaagaaaccaggcggcgaggaggcagcggcgcgaagacacgtgggggctaccgggcaggagcgccccactatgcgcaagcccgtggcctggagagcgctgaaggtgggagggggaagaggggcagaacccccgcgggagcgagcgcacagctgccgccccgtggccgcttcgggaatcgctggctccggctctggggtggctcagtgaccctcgctgcagaggggccgaccactgtgcagatggtcagctcctacctcccatacagactcaacactccagccaggcaggggcgaacgatccccagaggaacagatcccagtcatgcagctgtatggaccaatacacaaaccacaggcaatcgggagaaggtgacgtgacatctctttattggttcagtctatgcctggcccagcggcagccccaggtccagggggggtctggttggaggtctctggacagtcaggggcagcatcagcagaaaccctgggtgtcggggggctgtgggagtagcagcactggtccccgcgttgacaggtgccctggtgggaagatggtgggtgtgaacccctgcccggagctcagcagcccctgatgggatcctttcctgggatgggaagcc

SEQ ID NO: 1560661 - DNA, 4001 bp, Homo sapiens
ccagaagcccgtgaagatccaggccgcggtcattcttgccggggagtcccgaaccgcaaccccgcactgccagcgagaattgtccgtggactagggagagggacaagggcgggattagctgtgggcgtggtctcagatggggcgtggcccagagttgggtagggtctgggaggggcggggcctcaaataggccaacaccacaggaccgacaggcaggaattggcggatggacgcccccaaagagccgctcagagcggaaagaacgaccgaagcagggaggagcggggtcacggaacgggggcggaacctcaaagagctgagtcggaggagacagcctggttgacaggcagggatggggaggtctcattggtggagcagaaaaagtgcataggacgtgacctcgttccaaacccgagctctccccgtccgccccacccagttctcaactctctgctcctcgcgcttgtaattgttaatagagaaggcctggcctgcaaggctgtgtcgtagggtcccggccaggctgaaagggaggggtggggccgcgttaaaggggcgtggccagatccagaaaggactataaggaggcggggctgggccggaggagcctgcagtggtgtgcgtggcccgggggtccccactcactggtctccaccgcccccacggcctcggtgcagacgtccacgcccggcgcgcacttcactgtcttcatcttgttcggggagcatccgtcatctgctttctgcacgcagctgtagcactccagggcctgcgctcctgggggagcggagccgaatagacctgagccctccttgctaaagcgtccacccccaaggagaaatagtccttcccatgccctctgtcccgggattagacagtcttattgcacacacttttccagggcaggagtagggaaaagctttccacaaatctggaagcacgggaatcactggacccttttccttcacacccactatgccaactgtgggcacatccttccgacagccctgtatgcccactgtaggcgatccccgccatgaagcccctcatcccggggtaggaaggatacctcctcacggttttctgctcagaatgagagaacttttcccacagtgtgtgggagaacttttcccacagtagactgtgctcagtgagggatcccttcccacagcccccttctgctcaaatgagagaacactacccacagcttctctgcccaggacagggaacacttttttctttttttctttttttcttttttttttttttgagacggagtctcgctctgtcgccaggctggagtgcagtggcgcaatctcggctcactgcaacctcccctcctggattcaaacgattctcctgcctcagcctcccgagtagctgggactacaggctcgcgctaccgcgcccagctaatttttgtatttttagtagagacagggtttcaccatgttggccaggctggtctcgatcgtttgacctcatgatccgcctgcctcggcctcccaaagtgctgagattacaggcatgaaccaccgcgcccggcctaggaacaggggacttctttctgcagcttcaggataggaaaattttgcccacagctccccttgtccgtggtggggaacccttcctacggcccatggtggaggacccttccctctgcctcccttgcttaggatgggggaactttgcccacagtgccctctgcttatgtggggatccttcccacagccttctctgtacggggccagaggagcctcctccctaagagcccccactctaccccctccacctctccgggcagcagacccacctccgcgaagcagcagcagcagcagccagcctgcagtccagatcatggcctgggcacctgctttcctggcggggtccatggctccgtcctgctcccttggcgtcccccctggatgtgccgcctccgagctcgggccctcttacctgagcccaggatgagtaacctcgccccaggcaaccccagccttgcccaaccgggccaactcagcgtcggctgtggggcggggccccgcccctaggcgcgtcatccaagggagagcggtccctgccctgtgaagttgccaaggagggaaagggtgggagctgaggttccctgacagctcgcgggagaaagtctgtgtgtgtttggagtgggagagtagtggggcttaaagacaggctggggctactcgacattcagtgttcggtaactgttaaatgagcatctacagtgtgcccggctttggtctaggtaatgctggagatgaagacagaaccagtgcctgtcctggcagagctcacagtctgatgggggagacagatgctaatcaaataatcgtacaaattggtgtttaccaaagagactaagacactgaaggaaaaagtgtagtgatacaaggagatgtgcagtctagaagtgggggctggtcggtgagggcttccttgaggttatctgagatgcaacctcaagggcatgcaggatgtagccagctagagcaggtcaagagagggacacagccctttacaagcagagggaacagcacgtgggagcacctggaggtaggaggtaggatggaccattcaaacatggaaaggagagcagtgctcctgagctcagaagtccatgagagaagggcaggaactgagatgaaagagtcaggcagaggccgagacactcagggcatcagaggccccgacaagagatttggattaattttgagaatagtagagaacctttaagagggtctaaatgagctggaggacataatagatttgcttcctaatatgatcaacctgagaaatagtgcagctagccatcaagaagtaaatggaggccgggcgcggtggctcatgcctgtaatcccagcaatttgggaggccgagctgggtggatcacttgagatcaggagtttgagaccagcctgggcaacatggcgaaacctcatctctattaaaaaaaaataataaatttaaaaaaattagccaggtgcagtggcgtgcacctgctgtcccagctactcggaagggtagggcaggagaatcacttgagcccaggaggtggaggttgcagtgagctgagatcacgccactgcactccagcctgggcaacagagtgagaccctgtctcaaaaaaaaaaatttaaaaatttaaaaattaaaaaaaagtaaatggatctgagagtaggatatatgattttaaaaaaggaaaaagaaaaagaagtgaatggcaaaagagagtggttggttcggccaatggaatactacacagcaatagaaaagatccaacacctgatatatgcagcaacatatctcaaaaactttgtgttggggccaggcacagtggctcacacctgtaatcccagcactttgagacaccaaggtgggaggatcacttgaacccaggggttttgagaccaggctgtgcaacatagtgagatcccatctcattttattttaaaaaaagaaaaaacttggtgttgagtttagaaagccttaaacaaacaaacaaaacatactgtgtaactgaatatatatgaagtttcagaacagacaaaactaaccagtggtgatagaaatcagaacacatgttacctttgggagggcatggccccagaaggagcaacagggaggagcccccacgatcttcatctaggtgacagctgcatgtgtgtacagatacgttgagaatcactgactcaggcctgtcactggacgtatgttattcttcaataaaaacaaggtaaagaatgtcactgtggactctgtgtaaaaaaggaaaatgactctagaaggggtgagagagaaggccaggaaaccaacagggggccgtgtagttttccatggaagaaagagaaaaacagcccctaacagctgggagttggcctgacacacatagtgaggccatggagttcaactgcgcctagataatttcacagagcaccaacctggacaaggccacactgcgacagtaaaggatcaagaaacaaatc

SEQ ID NO: 1560662 - DNA, 4001 bp, Homo sapiens
atctgtcaaattgtacatctatcagactggtaaggatcagaaagctgggaaaagacaagtgttggcaggtatgtggggataaaggaacccttggcccctgatgctcatggcattatttggagggctggggaataaaacactatttctggactctgagaaacaaaggagttgagagttctgaccaggatctcaggcccaaagcagcattgcaggggtctgacactacatggtcaaattgggtttataaatacccatttccagtataccctacataggtattacaaaaatgtccaccttcatctacaaaggaacatgcacaataatgcagcattttttttttctgagactgggtctcgctctgttgcccaggctggaggacagctgtgctcactgcagcccccacctgccaggctcatgcaatcctctcacctcggccacccaaatagctgggactacaggtgtgcgccaacacacccagctttgtagagatggagtttttccatgttgccccagctgttatcaaactcctgggctcaagcaatccacccacctcggcctcccaaagtgctgggattacaggcatgagctcccatgcccagagaatgcagcattattgtggtgatggtaggttgagacaatgggagcttccctctctgagaccaagtgaatgcaaaacatgctggggatgtacgctatggaatatcacgcaggagttggaagaagttgattagatgtacacaggatgtgaggcagggtacagtggctcacgcctgtaatcccagcacttcgggaggctgaggtgggcggatcacctgaggtcaggagttcaagaccaagctggtcaacatggcaaaatcctgactctactaaaaatacaaaaattagtcgagtgtggtggtgggagcctgtaatcccagctactcaagaggctgtggcagcagaagaattgcttgaacccaggaggtggagggtgcagtaagccaagatcacaccattgcactccagcctgggcaataagagtgaaactccgtctaaacaaaaaaaaaaaaaaaaaaaaaaaaaaaaaaaagtacacatcatgacagaatgacagaatgtgtacatggatagattgtaaaatcacagtgctgattattacaaatagtatataacataatatcacttgcataaattaaaaactcaaacagaggtcgggtgtggtcgttcatgcctgtgatcccagcactttgggaggccaaggcagacagatcacttcaggccaggagttctggaccagcctggttaatatggcaaaaccccatcgctaaaaaaaaaaaaaaaaaaaaaaaaaaaaaaaaaaaaaaaaaaaaaccccaacaacaacactacacacatcctgggagaacacacacacaaaccaaaagatacatattaaccaccttagaatgagaattgcctataagaaggttagggaatgaaagtggggaattggtggaaaataacagtgtaggagggggtacaaagatcactgaccttggcctcagagacccaggttggaatctttaccccttcatttactagctgtccaatttgttgaactcagagcctactaccttctttataaaatgaagtataatacatctcatagggtcattgtgaagatcaataaaattattaccataagtattaggcaaatgctaagctctttataatcgttggttaccctgttcctctaccactatccctccctcccacacacacttcctctcactctctctccactacctaaaggatcaagttcaacctctttagctggcctttaagcctcccccgaccacaccccaccccaccccagataagcgccacccaacctttccaattttatctaggacagctcccctgcccagcagtccagctagaggtcacgtcggccacccttttctgcctgcaatgcctcagacacacatgctctgtaacccagaaatctgtggccaagaaaggtgccaagacccgcagaaaagctgggacacaggaaagagaaacgaaggctgacaacagatctcacgggggtgagggagattaggccaatcagagaagacagcacacgccagcctcagatgcagaacaactggacctggacctaacaagctgagtacaagtggagacgcaaccagaaaagattgaagtgaaatcctcaagcaaaaaaaaaaaaaaaaaaaaaaaaaaaaaggatggagcagtagtcagaggggatgccacccctacaaaagacaaacaaattgatggaatggaaccttgcagggagagagaggaccagcagagagagggaggcgtaggaaaatgaggagtggggcacaaaggtggggctctcagggagaagaggagtcgattttagagggggagaagaaaaggacacagagctggctgtacagagaaaaggggccaaggcagagaagatggcgggatggtgtgagacggagttcacagaaatacccagagaaggcgacgattacacagaggagcccccagaggggcgaactcttgaggaagatgaacgcggagggtggagccagccagaaattcagaaaaactagaggcgtccccggtagcgaaggaagccgggaaggggccaggctatcagggcatgaagcacgggagaaaatgggtccgaagagggagagcgtccgagagaaaaggaaaatcagagattaggaaaatcacaaccgacacaaagacaagaagagacacaaggaaaggggtgcaatctgaggaaggagggcccggtaagcaacccggtaatcacagcgctgggagagaacgcataaaagaagggtagctcaggagttgtggggcaccggaagagacataacagaaaacgcaggcctccactcagcaaaaacaagccacgcgcgaagtcgaggtacaaggcaagggaaggccagaaacgaggcaacccgtgcacagaccgggcttggtcaacgccccaggggcggggccaggcgggccgttcctggggggcggggccagcctcggtccaataaggggtactcgacgccccattggccacctgcctcgaaagggggaagacagtctgggcgggcaggacgtgcggagggagaggcagcggtggcgcgaggctcaactcgaagcgctattggtgggactgatagtcttgtgcgccaagaagctggcagaagggaaggggcgggacatcagttcaggatctcaaaccgcattggtcgtctgcctcggctgagagaggcgatgcttgaagttcattggtctttgtgagacagggtaagaaaagcagcgcgagcttggcggttcctctggccactttctcacagtgtctttgggcgtcttcttgactgaatctgactccattggaggctgtggtaaccgtgaactagctgcacgaacacggtccctcctgcctttccgtcctcctccctcttagccggactccctaacccaggcatcccctctcctccccctcgcgcccctcccgccctcgcgccccctctccccttccctgcctcgcgggccccttggcgcgttcccggttccccactcgctccctggggcacgggaaggggggagggggacatgcatgaaattaattgttggtagtggccacaggagcaggaagcgctggacacagtgacttcacatgtttacacaaaaacctgaataaggtgtgagcgcaagagagacattagtgccccaaggagaaggtttttggcccagatcagggcctagcacatgacaggggctcagtaaccatttgtggaatgaatgaaggagtgaaggaaaataacttgaaagtggggcaggtggcgggtgcggtggctcatgcctgtaatcccaacactttgggaggccgaagcaggcaggtcgcttgaggcaggtcaggagttcaagaccagcctggccaacatggtgaaaccccatctctactaaaaatacaaaaattagacgggcgtggtggcacaggcctgtaatcccaggtactcgggaggctg

SEQ ID NO: 1560663 - DNA, 4001 bp, Homo sapiens
ttgcttgaacccaggaggtggagggtgcagtaagccaagatcacaccattgcactccagcctgggcaataagagtgaaactccgtctaaacaaaaaaaaaaaaaaaaaaaaaaaaaaaaaaaagtacacatcatgacagaatgacagaatgtgtacatggatagattgtaaaatcacagtgctgattattacaaatagtatataacataatatcacttgcataaattaaaaactcaaacagaggtcgggtgtggtcgttcatgcctgtgatcccagcactttgggaggccaaggcagacagatcacttcaggccaggagttctggaccagcctggttaatatggcaaaaccccatcgctaaaaaaaaaaaaaaaaaaaaaaaaaaaaaaaaaaaaaaaaaaaaaccccaacaacaacactacacacatcctgggagaacacacacacaaaccaaaagatacatattaaccaccttagaatgagaattgcctataagaaggttagggaatgaaagtggggaattggtggaaaataacagtgtaggagggggtacaaagatcactgaccttggcctcagagacccaggttggaatctttaccccttcatttactagctgtccaatttgttgaactcagagcctactaccttctttataaaatgaagtataatacatctcatagggtcattgtgaagatcaataaaattattaccataagtattaggcaaatgctaagctctttataatcgttggttaccctgttcctctaccactatccctccctcccacacacacttcctctcactctctctccactacctaaaggatcaagttcaacctctttagctggcctttaagcctcccccgaccacaccccaccccaccccagataagcgccacccaacctttccaattttatctaggacagctcccctgcccagcagtccagctagaggtcacgtcggccacccttttctgcctgcaatgcctcagacacacatgctctgtaacccagaaatctgtggccaagaaaggtgccaagacccgcagaaaagctgggacacaggaaagagaaacgaaggctgacaacagatctcacgggggtgagggagattaggccaatcagagaagacagcacacgccagcctcagatgcagaacaactggacctggacctaacaagctgagtacaagtggagacgcaaccagaaaagattgaagtgaaatcctcaagcaaaaaaaaaaaaaaaaaaaaaaaaaaaaaggatggagcagtagtcagaggggatgccacccctacaaaagacaaacaaattgatggaatggaaccttgcagggagagagaggaccagcagagagagggaggcgtaggaaaatgaggagtggggcacaaaggtggggctctcagggagaagaggagtcgattttagagggggagaagaaaaggacacagagctggctgtacagagaaaaggggccaaggcagagaagatggcgggatggtgtgagacggagttcacagaaatacccagagaaggcgacgattacacagaggagcccccagaggggcgaactcttgaggaagatgaacgcggagggtggagccagccagaaattcagaaaaactagaggcgtccccggtagcgaaggaagccgggaaggggccaggctatcagggcatgaagcacgggagaaaatgggtccgaagagggagagcgtccgagagaaaaggaaaatcagagattaggaaaatcacaaccgacacaaagacaagaagagacacaaggaaaggggtgcaatctgaggaaggagggcccggtaagcaacccggtaatcacagcgctgggagagaacgcataaaagaagggtagctcaggagttgtggggcaccggaagagacataacagaaaacgcaggcctccactcagcaaaaacaagccacgcgcgaagtcgaggtacaaggcaagggaaggccagaaacgaggcaacccgtgcacagaccgggcttggtcaacgccccaggggcggggccaggcgggccgttcctggggggcggggccagcctcggtccaataaggggtactcgacgccccattggccacctgcctcgaaagggggaagacagtctgggcgggcaggacgtgcggagggagaggcagcggtggcgcgaggctcaactcgaagcgctattggtgggactgatagtcttgtgcgccaagaagctggcagaagggaaggggcgggacatcagttcaggatctcaaaccgcattggtcgtctgcctcggctgagagaggcgatgcttgaagttcattggtctttgtgagacagggtaagaaaagcagcgcgagcttggcggttcctctggccactttctcacagtgtctttgggcgtcttcttgactgaatctgactccattggaggctgtggtaaccgtgaactagctgcacgaacacggtccctcctgcctttccgtcctcctccctcttagccggactccctaacccaggcatcccctctcctccccctcgcgcccctcccgccctcgcgccccctctccccttccctgcctcgcgggccccttggcgcgttcccggttccccactcgctccctggggcacgggaaggggggagggggacatgcatgaaattaattgttggtagtggccacaggagcaggaagcgctggacacagtgacttcacatgtttacacaaaaacctgaataaggtgtgagcgcaagagagacattagtgccccaaggagaaggtttttggcccagatcagggcctagcacatgacaggggctcagtaaccatttgtggaatgaatgaaggagtgaaggaaaataacttgaaagtggggcaggtggcgggtgcggtggctcatgcctgtaatcccaacactttgggaggccgaagcaggcaggtcgcttgaggcaggtcaggagttcaagaccagcctggccaacatggtgaaaccccatctctactaaaaatacaaaaattagacgggcgtggtggcacaggcctgtaatcccaggtactcgggaggctgaggcaggagaattgcttgaacccaggaggcggaggttgcagtgagccgggattgcactactgcactacagcctgggctacagagtgagactccatctcaaaacaaaaaaaaagaaagaaagaaagtgggacaggggagccaagcatagtggctccagcctgtagtcccagctactggggaggctgcggcaggaggattgcttgagctcaggaggtggaggctgcagtgagccatgatcacgccactgcgctccagcctgggcaacagagcgagaccctgtcaataaaaaaaaaaagaaagtggagcagggaatccatgagaataaggtaattattgggggtgcaagagagggttctgatttaaaggggtacaagaacaaaataagactaaaggaatgcaaggaggcagttgctttgcagggcatagatgagactaagaattgaaattgaactaagaattgaaaggggcataaaactactggtaggcattggatgaatgcatgagagtggggtgagcattgttgaagaggatgccaggaaacactgttgggacggaacagggtgcttgtgaaaaggggatgtaggactcgctgaaggggtatgtgaggacatgagtaggttggaacctaggatgtgtgtgtgggtgggaaagtgtttggattgaaagaaaagaatgtttgaattgaaagaatacagaatgtcgggcgcagcagctcatgcctctgatcctagcactgtgggaggccaaggcaggaggatcgcttgagcccaggagttcgagaccagaccagcctgggaaacataatgagaccttgtctctataaaaataaaaaacaattaaaaaaaaattttttttttgagacagagtcttgctccgtcacccaggctaaagtgcagtggcgcgatcatggctcactgccagctctgcctcccgggttcacgccatt

SEQ ID NO: 1560664 - DNA, 4001 bp, Homo sapiens
tggaaaatcacacagacacaaagcgtatgtctgtgaggatgcttgtgcctgtatgataaccatatcaacacagagagggaccagatgcacagaaaatcatacccagagaggtcccaaatcacagaagcacaaataaaaccagaggccacaattatgcgatgtttagagatacaggaaaatgagatcacaaaaacatacagtttaaaatcatatatggaggccaggggtggtggctcatgcctataatcccagcactttgggaggctgaagcaggaggatcacctgaactcgggagttagagaccagtctgggcaacaggtgaaaccccgtttctactaaaaatacaaaaattagctgggcatggtggtgcacgcctgtggtcccagctactcaggagtctgaggcacgagaattgctggagcctgggaagcagaggttgcagtgagctgtgatcgcgccactgcactccagcctgggcggcgacagagggagactctgtctcaaaaaaaaaaaaaaaatcaaaatcacatatggatacaaaatgtatagacccatgtaacacagatacatggagagaaaaaaaaaaaaaaacacatcaaaaggcccaaacaattggtcaggcatggtggtgtccccctgcaggcccaactacttgggaggctgaagcaggagaattgcttgagccaggagtttgaggctgtagtgagccatggttgtgctactacaccttagtgtgggcaacagagtgagaccttatctctattttaaaaacaaccacaagaaaaaaggccagtctcattggctgatgtgagtggattgcttgagctcaggagtttgagaccagcctgggcaacatagtgaaaccccacctctacaaaatcatacaaaaattagccaggcgcagtggcacatgcctatagtcacagttactcaggaggctgaggtgggaggattgcttgggcccaggaggtcaagacttcagtgagctgtgattgtgccactgcactccagcctgggcgacagagcaagaccctgtctcaaaaaacaaaacaaaaaacaaaaactgagcatatatacatagagataaatataggcttacaaatcacagatacataaacacagacacagatacacaaaattacacacgcatctcttttacaaagaaagcaaactcagaaacagacccacaaacgcatttgttcagactaagactttaaaacctatacagagaaacacacacaagcacagagactcataggacatactgaacctggacacatacagaaatcaaactctctcccattaaggagcagaaacacacagatttggttgtgtgcaggaatagcctcctttctacatttctaattccctgtctttgtaaccacttccattctgaaatgagttatgttcctgtcctagcccacaatggggtagaggttgcctgaaggtgaagccagggtttctgccagtttcggaaagagtcctgagggctccctggaaatacctttgaattgggggttgggcaaggaagagaagaaaggctgggatggtgggaagagagacaccaggaaaaatgactgatgggagaagaacaaaggcagggaagagaaatgaaaatgacatagcctccaggctcctgcccaccaagacccaggagtccaggcccccagcctcctcctccctcagacccaggagttcaggcccccagccccctcctccctcagacccaggagatcaggcccccaacccctcctccctcagacccaggagtccaggcccccagtctctcctccctcagatctaggagtccaggccacctgccccttctcactactggattcagaagtttgcgtacctgtcaggcagagcgcagccccaaagaggcagagcagaatgactctggggacccccattgccattgctgagctgggccacctgggacagctcctcccgctgtgatgtgctgcctggctggttctccttactgagtcctaagcatcccggccacccagcctggccagtatttcttcgtcccaccctccctatgtgggcgggtctcttcctaggtaatcgtgatggaaacagggtgatcctcagttgctggagatctacacttctgggtctgagggaggagagaactagaagtctggaacccttaattttgaatgattggtgtcttgttggccttcttccttcacccctcccagcactctgctctaatctgagggtggcacatatggccttttgacttcccttccctccccctaccccaacacacaccacccacacagcttccaatcctgggatgtctccacacccaaagacacgttcatcgtcccatcatctaaaccttctctgaaccccatctccccactcatccacacaccctcagcctccagcaccttcctgtctcccagccctgatcaaactaggctgggctagcgtctgtctcccctaccgggctgtgaactcttcgggggcctccaggaatgtctgagataccgtatgactgaacgaatgaatcaatgaatgaagacacaaacagagaggcaccaagagacatacagggagagacagacacaaaagagaaacagagagagaggaagagagagagagagagtgtgccttcgaggaagcaattacacatgagatgcagaaagacagacacagcctgctgtgaacagatgtgactgtgtagtcacacagacaaacctagaggtgaagagggacaccccgatagacacgacatgcccccaggtgtttcagaaacatttattaaatgaatgaaatcaagaagatggagatacagcagacaaccagagggtcactgtcccccgaggacacaggcagacacatgtggatgctcagacactcagcaggtgaggaggtccagaggaggccccagcaggtggttggtgctgaggcagagaccccaggctagcacctcctggtttgtctcacttcttgctgcctggagatgctgcctgctggatcaggctagtggatactagccacagagtgggcaccagccatgtgcagacacccagagtctcagacccacatctggatggcagagtccacgtaacactggtgaccaaaagagccttaatggtcccctcagatcgactaaactttagacaggtttcttcctctcggccctggatcacgctttttgtaggacacttactttagaaaacttgtacagtcatccctcggtattgttttctatttctattttttttattgttttttggtttcaaaatattttttatccaaagttgactgaatgcgtggaggtagaacctgtggatgcagaaccccatagacacagagggccaaatataattgcaaattctttctctgctccccccgcaccccctctctttttctttttgagacggcgtctcactctgttgcccaggctggagtgcagtggcgtgatctcggctcactgcaagctccgcctcccaggttcacaccattcttctgcctcagcctcccgagtagctgggattacaggcatgtgccaccatgcctggctaatttttgtatttgtagtagagacagaatttcaccatgttggccaggctggtcttgaattcctgacctcaagtgatctgcccgcctcggcctcccaaattgctgggattacagacgtgagccactgtgcccggccttctctgcgcctttgaaatgtaggtaaatcttctcctggtctcttgccagcgttacaacccaggaatgtctttttcaaggacctgggaattatccctttgaaatcatcaagggagatagcacccctatcgcccagtctctgtgggagggtaggagcctcactttgataattgacaatcagcaaactcagatggcccaatcacagagaaaaacatttgcagactcaggaataactccatgtgatggacacatcccattgacagaataactccatgtgatggacacatcccattgacccacctcccccattgtcctccaatattttt

SEQ ID NO: 1560665 - DNA, 4001 bp, Homo sapiens
ggccatgcctcttccctcagaccaggggccatgcctcctcccccagaccagggttatgcctcctccctcagaccagggcatggcctccttcctcagagcagggccaggcttctccctcagaccagggtcttgcctcctccctcagaccagggtcatgcctcctccctcagaccagggtcatgcctcctccctcagaccagggtcatgcctcctccctcagaccagggccaaatcttctccctcagaccagggccaaatcttctccctcagaccagggtcaaaccttctccctcagaccagggtcatgcctcccacctcagagcagggccatgtctccctgttgggcctgtctggtatcactaccctcatggctgccctgcctccatatcccttgcccaggcccttccacccttccagccccttaccaactgtcattctgccattgccctggaagcaggcggtctggtcctggtgacactggactcgtcgggacctgccgatagcgcagtcatcctggtggaccccgatacaggcgtagcactcggcgccgctgagcgtcggcgggtcgggtgctggcaagagagcgtagatgcacactcaggcagtggtaccctggcacagtcgtgcgggctgcgcactgcgccagagcccgcgcctagcacgtctcgggggttgggatcctagcgcgccaagagcaggcgcccagcggaggccacgccttccccgaggctgccaggcctctcatcgtccctcccggagcccagccccgctctcccgcgcaccttggctcaggttggggagggcgtcatgagtcatgaggtgggcgttgcatttgtcagttgtgcagccgcgcaccaccgagtagtctggcggcagcgcgtccgcgttcgattgcgtctggcccgcaggaggcccggtccagcagcccttccgcaccagggtcaccggcgcgcgataccctgggggcgggatcggggctcgtgctctgcttcccgaaacccttctccctccagtctcagcgttcttcctcctccctctatcctttcactttcacctacacctcctcccctccctccttccctccttcctctcacccccagaccttttcccccgagttcttctcttcctccactcttcctccctgtgcgcctctcccaccttctcttccttgcttccccattgtttcctcccctcaccgctcgtccctcatccactttttcttttgtggggcggaggacggagcctcgctctgtcgccaggctggagtgcagtgacccgatttcggctcactgcaacctccgcttcccggattcaagcgattctcgtgcctcagcctcccgagtagctgggattacaggtgcccgccaccacgcccagctaactttttgtatatttagtagagacggggttttgccatgttggccaggctggtctcaaacttctgacctcgtgattcgccagcctctgcctcccaaagtgctagagttacaggcctgagccactgccccagccctcatccacccttttctttttcttcctcctcttcttcctctccctccccatctttctatctttatcttttcatcttctactcaattcccctccctttctgctcccctctcccccctttttcctccctaatctctcatccctgtcccccggctcccgctccttaccggtgtccagagacaggatagcctcaaagcactcatgaggacaggagatgctgggcagcttcatggccctgaggtcaaaggggccaaagtaggtgtgctcaaagctgtagcactgcagggcttgggaccctggggagagaggcgtggcagagtcagcagggccagtgtgagcctgtcccaggaactcagagctccacccagcaaatgacaggcacacgggcctggcccctctgctcccagggaagacacgccttgagagaccaggtgctgctattgcagctggtcacagctgtgtctgtctcatggcagagtaatgacctctctgcagctgacagtccagttttttccctccaggacactccaggtctccaccctcttccaggaagccctctccctagctatgacttagaataggaaggaaaagtgattcattcttgctctgcccatccttccccaagcttaactcacaaagtggacagcacagtaagagacccctgacaagaaacatgcactccaggacaggtagagtgaagtgtggtcctgtagtgccctgtaaacccatacatcagccccagcaacacacaaactgacataaacacacaataacaacacatacacaggttcatccaagtctcacaaatatacacagaatatcctgaatgcacccaggcagagttttacattctcacacaaaacaagtacgcatctggaccctgcaatataaacctccctaactaaggcacagcacttcacacatggaaaatcacacagacacaaagcgtatgtctgtgaggatgcttgtgcctgtatgataaccatatcaacacagagagggaccagatgcacagaaaatcatacccagagaggtcccaaatcacagaagcacaaataaaaccagaggccacaattatgcgatgtttagagatacaggaaaatgagatcacaaaaacatacagtttaaaatcatatatggaggccaggggtggtggctcatgcctataatcccagcactttgggaggctgaagcaggaggatcacctgaactcgggagttagagaccagtctgggcaacaggtgaaaccccgtttctactaaaaatacaaaaattagctgggcatggtggtgcacgcctgtggtcccagctactcaggagtctgaggcacgagaattgctggagcctgggaagcagaggttgcagtgagctgtgatcgcgccactgcactccagcctgggcggcgacagagggagactctgtctcaaaaaaaaaaaaaaaatcaaaatcacatatggatacaaaatgtatagacccatgtaacacagatacatggagagaaaaaaaaaaaaaaacacatcaaaaggcccaaacaattggtcaggcatggtggtgtccccctgcaggcccaactacttgggaggctgaagcaggagaattgcttgagccaggagtttgaggctgtagtgagccatggttgtgctactacaccttagtgtgggcaacagagtgagaccttatctctattttaaaaacaaccacaagaaaaaaggccagtctcattggctgatgtgagtggattgcttgagctcaggagtttgagaccagcctgggcaacatagtgaaaccccacctctacaaaatcatacaaaaattagccaggcgcagtggcacatgcctatagtcacagttactcaggaggctgaggtgggaggattgcttgggcccaggaggtcaagacttcagtgagctgtgattgtgccactgcactccagcctgggcgacagagcaagaccctgtctcaaaaaacaaaacaaaaaacaaaaactgagcatatatacatagagataaatataggcttacaaatcacagatacataaacacagacacagatacacaaaattacacacgcatctcttttacaaagaaagcaaactcagaaacagacccacaaacgcatttgttcagactaagactttaaaacctatacagagaaacacacacaagcacagagactcataggacatactgaacctggacacatacagaaatcaaactctctcccattaaggagcagaaacacacagatttggttgtgtgcaggaatagcctcctttctacatttctaattccctgtctttgtaaccacttccattctgaaatgagttatgttcctgtcctagcccacaatggggtagaggttgcctgaaggtgaagccagggtttctgccagtttcggaaagagtcctgagggctccctggaaatacctttgaattgggggttgggcaaggaagagaagaaaggctgggatggtgggaagagagacaccagg

SEQ ID NO: 1560666 - DNA, 4001 bp, Homo sapiens
gtgcccatgtagagttgttctgagttcatgcagggatgttgctgcagcagtgaatcaagagaaacaagtttccagaggccccaggcacaggtgaggctgagaggatctgaagtgacacataagatgtgtctgaactctttcttaattcaactcttgcatgcaattatctgagcctggtgatgattagagtttaaattctaaactactgatgctgtatcattaatgactaattgtctattattaaaagtttctgtctcttcttgtcaattctttaagttatagctttctaggaaattgaccatttcatctgttttcaaatttattctaattcaaaaaatattttctattcttgtgtagtctttttctttcttaatattatttgtgcctgttctcttttttattcatcttttgaaataatctattttttaattatctcagaaatggatcacttcaaataagcagttgttggcatttagcctctattgcatcagtgttttctatttctttaacttgtgcttattgttgacctcaaccaactttctttgtatttattctattattctgtgttctaacttcaagttggacatagccttcattcttttcatttttcccttcttcttcttcttctttttttttttttttttttgagatggagtttgctcttgttgcccaggttggagcgtagtggcatgatctcagctcactgcaatctccacccccagggttcaagcgagtctcctgcctcagcctcccgaggggtctaggagattagtgattattagttctagcgggttacagtgaccggtagcacaggagggattggcttcctttttctgaaggtgaaccgggtcttttctgtcctttttctaagtagcttaaataacacatggtcaataggcacaattttcacaggcctctaactcatgacccactaatcccctagacccccgttggaaaaaaggagaacgtgtaaccctggagatcgatgggtcagggctaaacccccaagttgcctttttagtttgaggggaggtacacaggcactctcccaaaccagtgtttcaaactttttatgatgagccgaatctgccaacaccagagcttccaaaaaggacaaaagaacttgtttctccagctagcggaaagtgtagctcatttcctcaatgttactttctgttatgtatgtgagggaaccactatgggagactgatggccttgggaagctagagagttggtgcccactgatccagttcctgacccaattccagttcagaaggcccaaattagcaacttctgggtcctaaaaacttcaattattggacaatactgtgtagctagagaaggaaaagacttcaccattcctgtaggaaagctcgattgtctagggcacactccagctgtcactctacacacaaacccacacacttgtgtcacagtcacagattcattccagtcctgtcatacaccaagcactttcttctttttgacacatacacacagtctgtcatacaaagagaaacacacctgctgtgtcatgagcacacatgcagtcacgaagacataccctggccatttcatgtgcacagatgcacacacaccccattccctgtgtcacaagacatcccagccgtggcacgtgcactctcatacagacgcaacgtcaccattcgcacggtagggcacatccttggctctatcacgcacataatattgcacacaccccctacaccatgtctgtcaccaccacggacggtccatcacacgcggccagggagacgcctgacctcgttttgccccaccccctccctcaagtcttcatacccagccacactgtcgccttcttcggctgctcgcattcgcctcattgcttctcccacccttacccgcactgccgactggggcatgagtccgcaacgccctctgcgcctcgccctgcttcgatgtctccttccgaaactacacgcggaacccaagaatcactgggatgcgcaaagcggatcaggagcgcacgctcattcggcccagtgacctgtgggaattgtagtcccgggccggaaacgcaggagacgccagaaacccaagtttgggacggcgcgtcccaagggtttctggaagttgtaacctgtgctccgagtgcgtaggcgcaggaacccttcgggggaatccctttagcagggagcgtatattgaagagtgcgtgcggaggtgagagcaataaactgataacggaaacagatggcatacttcgttttcagttatcaaatttcaaaaactaaaaatgtagatggtacacaatattgttgagaatgtggggaaatgagagctttcacacgtagtgggtggaaatgactacagctcttttacagttttgtgtagtagcattcacgaagtgtgaaagcaaacccctaagcaaccagcatttttacatacaagaatctagcctacaaaaatgctggcatgaaagacaaagatgtgggtacagtaatgcttaccaaagccgtgtttgtaatactgaagaattcacattgtaatactgaagaacctcaatgttcgttttttgagacactgttagtctgtgctagccaatatgatagctatttgtggctatttaaaattaaatctattaaaattaaataaaattcgaaattcagtttcttacactagccatgtttcaaaggctcattagccaagacagctagtggctactgtattggacaagagggatataaacatttctaacatcacagaaagctacattgaacagtgctgggttaggtaataattcaacgttaaaaggaatgaattaaatctataactgacatgaaatgaagtagaagaatgtgttgaagtggaaagggcaaatggcagaattatatggatagcatgatcccatttctgtataaaatagctgtgtctttatacatacattcagtgtacagaaaaatctggaagaatacctgaaaatattaactttggtcatttctgtagatagggaatgagtagggggacactttcatttctgacattatttatcatcagttatttgaatatttaaaaactgcaacaattaactgaatgttgctaaatccaaataaatatttttattacttattttgaaagatttttggctgccttctactatctcagcgacgtactctttcttgaaatactgaactactttagcttaatagacctccctcatttctgttttatctcctcactgaaaagcattagaacatctctacagctataccactctgaatgctcccgatctggtccgaaaagcattagaacatggaattacttgagtgattaaaagtaaaacaataagaaattgattgtggcatcagaaaaagtgaaatcagttggatcaatttaaaatcccaacataagttttttttaaaacgtttttctttttactttgtaattacaaaagcaatgcatgtttattacatgaaatatgaatatagaacaagtgcaataacagaaaagatccctgtagcccatggagtggctgaaaatgatgattgctagtgggtattggtgtctttttgggcaatgaaaatgttctaaaattgattgtgatgatggttgcatagctctttgaataaactagaaactactgaattcggccaggcacggtggctcacacctgtaatcccagcactttgggagactgaggtgggcagatcacctgaggtcaggagttcaagaccagcatggccaacatggtgaaacccctgtctttactaaaaaatacaaaaattagccaggcgtgatggcaggtgcctgtaatcccagctaatcgggaggctgaggcaggagagtcgcttgaacccaggaggcggaggttgcagtgagctgagatcacgccattgaactccaacctgggcaacaagagcaaaactctgtctcaaagaaataaaaaagaatctactgaattgtacactttaaatgggtgagttttagagtatatgaattatatctcagtaaaagtattac

SEQ ID NO: 1560667 - DNA, 4001 bp, Homo sapiens
atggagggtcgggggtgagggctgagcccagagtcagggctggacgtgatggaggggccggagcccggaggggcttggagctggggccaaggatgcgtgggggctgctgatgaacaggcagtagggacggcctgtgcgcaggccccgtggccccaccctgggaggctggaatagacaggaggatgggccagggccggccctgggagagttggggtgagttggagggaagcgaaggccggggacctggcttcggggagctgtgcatggagctgggaccctgcctgcaatctgggaggcttccaggaagaggtggcatagggaaggagccgggagtccaagggtcagagaggcagggcgcggggggacgcctcaccgtacacaaggagctgcacggtgtgctggaaggtgcggcccccgcaggagcccacgcacacgcgggtcccggccgccgacagcgaggcgttgcgcacggtgaggacgctgcggcccgtgtccgactgcaccgcgcccaggctggtgtccaggccccgccactgcaccgaggccccgcggtccgcgcaggccaggcggcaggtgagctggcgcgaggcgcccaaggccacggccaccaccggctccgggggctccacctgcaggggcttcacctggagggactggcctgcggcgaccgcggctctcgctcagccccgcggagtcccggaccccgccccgccaccggccctgcgtcccgctccacccccggaccccgccccgcctctgcccggttcccggaccctccgctgcacccccggacccctgccccgccgctacccggactcccaggctcggtccctgaaccccgccccgaccgccgcctctgccccagtcccccgaaccccagctgcctggagccagtttcgctgcgggtcagggggccgcgcggagccccgcaacttcccctctcagcccctgcctcctccgagccccctcctctggcaggatcaccaatcaccccctatctcggagccccttaactctgagcacccctcgtctctcccgcgccccctccgagcccctcctctctcctgcgccccctcttaactccctcctctctcccgcgtcccctccccgctcaccgcgccccttcctctcccccgggccccctcccctctcccgggccccccttctcttccgaaccccctcccctctcccgagccccctcccctctcccgagccccccttctcttccaaaccccctcccctctcccgcgccccctcctctctcctgagtcctcttcactttactgcgccccctgctctctcctgcgccccctcccctccgcgcccctcctctctcctgcgccccttctctctcctgagccccttctctctcctgagccccctccactctcctgcgccccctcctctcccctgcgcccctcctctctcctgcgtccctcctctctcctgagcccccccactctactgagccccctcccctctcctgagccccctcctaactccctcctctctcccgcgtcccctccccgctcaccgcgccccttcctctcccccgagccccctcccctctcccgcgccccctcctctctcccgcgccccctccactctcctgcgccccctcctctctcctgcgccccctcccctccgcgccccctcctctctcccgcgccccctcctctctcctgcgcccctcctctctcctgagccccctccactctcctgagccccctcctctctcctgcgcccctcctctctcctgcgtccctcctctctcctgagcccccccactctactgagccccctcccctctcctgggccccctcctctctcccgggccctctcctctctcctgagccccctcccctctcctgagccccctcctctctcctgagccccctcctaactcactcctctctcccgcgccccctccccttctcaccgaggaggagccccagaagccccgccagcaggagggccagtccgaaatccatgctcagtcccctctgtcccgaggccgcggggaagccgcttaaatagaggcgcccactccttcccgccgcccggcgaccccgctccagctgctccccgggggcttcccaaggggctttcctggcctgacccccgaccctggaggcggcagagaggcaggggctgggggccaaagatggggcggggtcccggggccactcaggacgggcaggcaggaaggtctgggtctgttccaagcctcatattcaggcacgggaagatcgcagacggaggccggagggtcgaggtcaagtgcatggaagtgggacagaggctgggcagcgccgcccccaccccgacggcgggtcccctgcactttcttttcttttttttctgagtttcgctcttgttgcccaggctggagtgcaatggtgcgatctcagctcaccgcaacctctgtctcccgggctcaagcgattctcctgcctcagccactccagtagctgggattacaggcatgcgtcaccacgcctggctaattttgtatctttagtagagacagggtttctccatgttgggcaggctggcctcgaactcccgacctcaggtgatccgcccacctcggcctcccaaagtgctgagatcacaggcgtgagccaccgcgcccggcccgcctgcactttcccgggcggccgcacaggggcggtggagagcagccctcccccgttccggagctgcaggccgggtcttgttggctggggtcccctgggggtcaggtgaaggtcgctggggatggaggccccctggactgaagtctcctggccgtggtggagctgtgagaccctccaggacgtgggacaagtcaccccatctctgagcctggcttccttccatcacacgggcagaggccgcccacctagcaggcctggctggagcctgggagcccgagtaggggctgcctctgttccttggtctacactgagacctggatctcggtccacaagagggatctggaagggatgctggctggactcccactcacagctgccatcagcgagtcctgggaacctcatcttccaaacgcactggaatccacccacctgttcctccaagccccgcacactggttctgtctccgctggtggcttgtttacccccctgcatcaccgggaccctcccagggcctctgggactctgcccgggctgctcctcaccttacccaggttctgcccaccccctcaccccctcgccccccaccctcctccgctgtggttcccagggtgctctgctcctagctcaatgagggcctgtggtggcagtcgtgatggctggctcccctccacccaggggccggtcctgtgaccctggaccccatgcaccgcaggcacgcgggaataaaatgatggagcattcctgctgacctcagggtctgtctgtgcctcagtttccctggccatggaataaaaagcagcagccagtccatggggttccaagcattgccaatcggcttacctgtcagaggagggaaactgaggcccaggggcagggctgggaccagaggagggaaactgaggcccaggggcggggctgggaccagaggaggaaaactgaggcccagaggaggggctgggatcagaggagggaaactgaggcccaggggcggggctgggaccagaggagggaaactgaggcccagaggaggggctgggatcagaggagggaaactgaggcccaggggtggggctgggaccagaggagggaaactgagatccagggcagggcctgggtgcaaaggagggaaactgaggcctaggggaggggctgggtgcagaggaggcaaaatgaggctcgggggaggggctgggtgctgaggagggaaactgaggcctagaggaggggctgggtgcaaaggagagaaactgaggcctagaggagggaaactgaggcccggggtggggaaacagtcccctcagaggtgagggcccaggtgtgtgagctcacagccctgtctccctgggtcccatccccctcctg

SEQ ID NO: 1560668 - DNA, 4001 bp, Homo sapiens
ctcgaagccactctctggcaacaactccctccaagctggggtgtcagagaactgtggggagggaagggggaacgaccgcatcggggtacgggggtgagactgaggggtgtggcgagtggagtgagggagcagatgtcccacggccggggcctgggggtggcgggcagggacccagagccatcaatgactgggtttcacagtatcagcattcccgacatgccgcgtgaattcctgccgccctctcccaccccacagacggcccctggtgtccgcaccctcaccagaagctggtccccggtacaaaagagtcctgttccctcggggagagggtgttttagcctgcggggggctttcagggtaagtggggagtaagaaaggggtcaggcactcctggctggcctttgagcagggccaggaaggcccagggtgggggctagcgagcccctggcaccctgctgctccatgggttgccttggggttgcagccagggtttccaagcaattgcttttcccagccttcaccgccctcttcccacggacagagacacatgcacagacacatccaatcgcggggatgaaatgtgacagatgtagccccagccagaaggggcaggcacacgcagcggagactcatacagacacccagacaggaccctgaacacacagacaggcacagggacccctgtgcccacagggatgggctggcactcacatagttcccaaggcgtgcatgcaatgcctctgctgctgtccacacacacctggacagacacagccctggcattcagcacacacacacacacacacacacagcccagcatgcatgccaggctaacaaagatgcaaggaactgcacacacacactgaggatggctatagacgcgtccactcagacacgcgccgatggacacctggccgacgctgcccttgcacctgtgacaggaaggtacaggagagagatgcagatgaggatgagcacgtgcccgggcagacatgaaacaagcaggtagaccatgcactcttaacagcggggaaaacaagttctcgggatgggggccaaatcaacctcagctattacagtgtgtgtggccacagtccataaacatatgtacagcagatctgttggattaaaatgccaagggaaggatgggatgaggacaaatgcatctaaaaagtttctgtagttggggccgggcgcagtggctcacgcctgtaaacccagcactttggaaggccaagttgggagaatctcttgtgcccagaagtttgagaccagcctgggcaatatagtgagagtcccgtctcttaaaaaaaaaaaagtaacgaaaaataaaaagtgtccttagtggggattaatgaagaaaagtcgactgaggcttacagaggaaggtgcatgggcagccatgtgtgtgcacgcacacgcacacacacacacacacacacctgctatgtgcccaggtgctagaatgcagtcactaacagcccactgcccccatccacctcccagattgcagcctgcaggtgtctgatcacctggacatccttccattcttcggccagatgcagacctcctccaccccatctgccccgcactcgggaaccccaaggaaacctctcctgcaaaatcttcacccacaaggggtgctgagggggggccctttgttttttctctctgtggtttcttcccagagccccatcgctgccccagcgatggtccgagcccatccccaaagcagccccaagccacacactcctgcatcctaaatcagtagcggtgcacagcgatgctccctcacccagagcacctgaccctgctcacgtctgggtgccactgccccggtgccctgctccccttgccctggcctccctgccaccatactcacttggactcagttgcttctgcacctctgctccgccagcccagctcgcagtcccctgccttccagggtctaggcccccacttgccagcccctcccctccccctgggtgccaggggccgcctgcctccagggcccagctcctccctacccccgggggaggggggcacaaaggggcccttgtcaccacggggctcggactgggcagcctgacgcctgggttctcctagctctttcctggaggggtcgggagtggctgccttgctctctccccatcttccatccctgtacaccctgattctgggtcccgggggtgggggggcagtctaatctctttggaagtcccaggctgagggacagaggcattgtcctcagggaatcttggtggcaacattaggtgggcagcaggaggagacaggtcctttccaccctcaacgtcagtgtcacctcctcttgccatctgaaatgaccttccgtgttcaccaactcctttcatgagaacgtgacctccaccaggccagaagcttcgtcttggatattctcaatccatccttgctcgtagacaagctcctggcaggcagttgagcttaataaacagtgtgggtggttgaatgtgttccccagagccccagggcaccttcagactcaaggcctgtgcacctgctgctcattcttcctggaaagcagtccccaccccatagcactccccactctggcactggctgccgttcacccatcctgtaggctcagcagcctgggtgccgcttccctgggaagctttcccatcttcgcccatcagccaggcccctccattgcaatgctgtcctttccttctgtagccttggcaggctggcccgtgtgcaccctaggtctgcccgcctctgcctcccactaacccaggagctctcagaggcaggggctcaccagaaacctatctgcctctctgtctgtcatgtgcacccttctgtccccggggcagtgcttggtgcacataggactgtgctgaccaagttgggcaaggaccctctgagtgcagattccaccccttggtcatgacttttgcaaggtgggtgggggctcggggcagctggaggtggcgtgacaaagtgcagcagtgatttcaccatgagctgttcagcctcactgggacatctcctgtcctccttcaggccagagcagtggggagggggggtcctcgctctcaagggagaacccagggggtgaggggcggggaaatccctcagaccagggagagaagcgttgtggggctgggggggagttggagggggagggggagtcccacccccaccccaggcttcatgatgtcagactctgcccgtgcctttcccagtccgggacaaaggaccattgagagtcgggcggggcttgaatgcctgggtcctggagaagagaggggcctggtgcctgggctttggtggtggtggtcggggtgacaaggagatcctggggggtatttgcatgtcacagccttcagcatcaacacccacctagttggagctggagtcgtgtgctggtgcagtgtggggctccatctcctccctgggtgtgaactgaaggctgttgctggggagaggacagtgtcccacaggagcactcgcaatagtcgctgacatcagcaactcgggtctccaggagacctgtgggagcgaggcggctggagcccatgagaggaaggggctgggtgacaggacctgtgactggcgggcaggtgccctgtctaaggggacaactgacccgcagatccagtggccggtgctgccgtatcagctgatcttttacgagagagcaggtgtatcagttttccagggctgttacaacaaagtttcacaaactgggtggcttaaaaaccggaattgaggccatgcacggtggctcacacctgtactcccagtgctttgggaggccaaggcgggcagatcacgaggtcaggagatcgagaccatcatggctaacacggtgaaaccctgtctctactaaaaatacaaaaaattagccgggcatggtggcaggcgcctgtagtcccagctactcaggaggctgaggcaggagaatggcgtgaacccgggaggcggggctggcagtgagcggagattgcgccactgca

SEQ ID NO: 1560669 - DNA, 4001 bp, Homo sapiens
tttgagacagagtatcgctctgtcacccaggctggagtgcagtggtgcgatctcagctcactgcaacctccacctcccgggtgcaagcaattctcctgcctcagcctccccagtagctgggactagaggtgcacgccgccacacccggctaattttctgtattttagtagagatggggtttcaccgtgttgcccaggctggtctcgaactcctgagctcaggcaatccgcccgccttggcctcccaaagtgctaggactacaggcatcagccaccttgcccggcgtcatttttttgtatttttagtagagacatggtttcgccatgttggccaggctggtcttgaactcctgacctcaggtgatccacctgccttggcctcccaaagtgctgggattacaggtaagagccaccgcgccccacctggatgaatgttcactttcttatgtgcacagtcagggtttgtcccccaatttgggagcaaggatctctctgcacatttctgcttttctctggacatatgcgcctttttgtatactccttgctctttgattgctggtgtctttgtacccatccaaccacataggcacgctcacgtgcacactcaagtaccctttgccttctcaggaactgatctgtagttcgaaacacttgcacacttcttttttttttttttttttttttttgagatggagtttcgctcttgttgcccaggctggagtgcaatggcgtgatctcggctcaccgcaacctcctcctcccgggttcaagcgattctcccgcctcaacctcccaagtagctgggattacaggcatgcgccaccacacccggctatacttgcagactttttgcctgccctgggacctaaaacaagacctttgacactttcacagcttgacagctcattgtcccctcacccaaactcccacactggtcctctgaggtccctcctctgctcttctgcccctgcgtgtgcgccagtataagcctttgtttctcttcagtgcttgagccctctgcacgcctacccctggcctccaatccccattgctccccccgtgagcatgctactagccatttgcacactcgttgatccaccacagccggacccctgtgcttgggcctcctttatgcaacatgaccttttgcacaaaaaacacaggcctcatgggacctaccacccctcccttcccaccccagagtacagcattctcaggatcccatcccccacgcataaagagagccctctctcaccagatcggaacttggagcgaatgatttgggaacgctgggaggaagccgccagggtcattgccaaggccgggatggggacctggacggagagggggcagggcaggggccccatagagggctggctcagagtggaggtcaggaggccgcccctgagagtgaattcagcagggaaagggcccgaaggaggtgggaataggagcagccttgggccataacttccggatcccaggggctgtagaggagggggctgcacacccggacaccttgctccgaggaaggaggaagctggggacccagacacctggtctgaaagacagggctgagggtctcaaccctgggatcctgggaggggagggacctggaatctgggactcctgggtcctgaggaggaagggttgcgggttgggacccctgtgtctaggaaagggaggaagcagaggggcctggagtctggaatcttgaaggagaaggaggttaagggctggaactcaatactcttaggagatgagaatccaagatcctgggtggagaggggaacggggccctgacaggtttctgaggaatagaagggcccctgtgacctgcatctgagaaggagtgagtagggtgtcagccaccaggttctctggggaagggactgggaccagagaggggatagaaccgttgaggagtgcgccccccccgtccaccccaggggcttctcaccaggtgggctcggcgaagctgtgctctggggcgggttgagtctagaggccgaggctggacaccacaggctccgccccaccagcctgggaccgcctccaacccaccttcctggggtgtgacgggagccccgccggggaccctgagaaggggtgggagcacccgctgggagggcctgtgcgggccttgggggatgctggggggtgagagcggggacgtcagggttccccggctcgctcctcctgcacgtcctggggttgtggggtcggggggaacggtggcaggcggactgacagaagcaggtgcccggagaggggcgccgggtgagcagcagcggcaggtggtcgtgtcctggccctaccggcaggtgccacctgtcgcctactttttccctgacgcagcaactggagtcaagttcaggggagtgaaaagttcaaacggggggcccagattcctggatccaagaaaggagagggatggggacctggagtcctgggtttaaagaaaaagaggcaggggcctctggggtgttgggaacagggacagaggtgttcggattcggcggtgtgcccggcaggcagaaaggtccagagggggctggggacttagattcctgggtctgagggaggagggggctggagtatggatttgggggggtgtcgaagggagaatcgctggttcccactggcaggactgagggccttataatcggcagagcaagcttagggccgtgttctgaggggtgtgggaggctcctctgctcttgggttggattacatgcaaaagggcgagccaaggccgtggctataaatacctcctcagactcggcaggggcccagacaagggccctgcaaccttgttctgcagaaaatcatcattagcgcccctgagtcttaacaatcgaggcgctgccgataccacggatacctttattgctccctggcattcacatcctaagcccatgctcccaccgtcccatccgctacttcccgaaaactcaatctcccaacattccacgcgggataagaactacaactcccagaaagctttgcgctcaggcgggctcctgtccgtagaagcccgtgacatttcaaggttcgcgcgctcgtttggtattggttctcaaggagacgtggccacgggaggcccatggcgataattggctggcagctcctgctgctcaagatcccagaggaggcggcggagcctacggagttcacggtgcaaggcatcgtccgtcactggaccagtgaggcgcaggcgcgagctccccagggggaggatgaggggcgggtgcgaggagaagctttcgaagatgtcccctgtgaggccgaaggcggcgcggttagagtctgaaagtgggagtgaggtagttgcatcgggaagagccgaggctgcgtcacacccaaaggaagaaaaaaactacaaaccccagcaactcctggggcggggtccgttcacacgctactctaggagcccctgggcatgatggaagttgtagttcagacgatggaaggccaccgttgcctgggaaacggcttcccaaatccccgagaaagggctgggaacttgccttacagattcctaaaggtggaggagtcaagttcaggggagtgaaagtcccgagacctggactcctaggggtggtgggtgggtggctggtggagggaatggactagggatgcgaaccccagagaataaagggagctgggggcttgaactcctgtatcttgacgggggaaggggctgggtcctgcacttatgtcctggtggggagggacaggggtccagaatctggggttagaaggagactggggatctggactccaagatcctgagaaaagaagaaaggtgaggtggttcacgcctgtaatcccagcactttgggaggccgaggcgggcggatcacgaggtcaggagttcgagaccagcctggccaacacggtgaaacccccgtctctactaaagatacaaaaaattagccaggcgtggtggcgcatgcctgtaatcccagctactcgggaggctgaggcaggagaatcgct

SEQ ID NO: 1560670 - DNA, 4001 bp, Homo sapiens
attctgggtctccaagggcgcaaacatggggctagatttctgtgcatgggggaggaggaactaggcgttcagactcgggtctgaagggcgaagggaggggctgggatcctggactcttaaaccctgggagaagagagggttgggggccccaatcccctaatcttggactcgaggtttgagggaggaggatgctgggacctgaatttctgggtcccgggagaacagaagtgggtgtcatacctaggatgtggctgctgcgagtctgtcccttcccacagagatggcccaggaggacccagggcggacccctcggcttgggggtccgccctggatccctgtctcggctctgggggcatgtactggtggtatgtcaagttccccctgggcttggactccctccaacgttgggagatcttgggagactcctgaaagagcaggtgtgatgttttaggcttcagcgcggctcccaccttccggccccaggactacatgcaaagtatggggtcagctcggtgccaccgaagaggagcaaaaatggcagcagcaacaagggagacaaagactaggctctcagagggacctctccctccagtcgagactcaccttctttggggacctccaaggaggacaatattctggctcggggagcaggaccccagggctgaagaggaaaggggccgtgcccgagggcaaggccggggccagaggagggtctgaggctgagatccacgggtccggatccgagactggagagacggtgaaggaccctgagaggcctgcaggcagcaagccaggccgggaggagcaaggctgtgtggaaagcggggctccagggtgccggagggcaggccagggagcaagacttgattgctgggagatgggcgcctgaactggatctgagggcggaggtgtgggggggctccggttgctacattctcaagtaaagcaggaattttctatcacaaaggggtgtggtagctgaggatcacagatgtctgaggttttgctaggacaggggtggggcctgcactcctggttcttggggagagggagaggctgaaagctacatccaggccggccgcggtggctcacgcctgtaatcccagcagtttgggagactgaggcgggcggatcacttgaggtcaggagttcaagaccagcccggccaacatggtgaaactccgtctctactaacaatacaaaaattagccaggcgtggtggcacgtgcctgtaatctcagctactcaggaggctgaggcaggagaatcgcttgaacctgggaggtagaggtttcagtgagcttagattgagccatgacactccagcctggcgacagagcaagattccatctcaaaaaaaaaaaaaaaaaaaaaagctatatccagagcttctcatgtataccaaatgtggagaccaggatgcctgtcttctccaaagaagcaggatccaagttcaagcatctcattagggtggagaagcaggaagcagagctcctaggggtggggtggccagagacctggaccctggatccttgggaaaggacaggatgggattttggtctgtcccaggggatggagactgagctgcaggaaccaatgaggggtatctggcagctgtattccaggatatcccagtggggagtggggggtcaccatcccctcccttttggggcccatacttactctgctcctgattccgtctgtggatccgaagctggaggactgtggagggaggagggaggtgggaggaggaaggcgggaagggagtgtccaggagcctggcctggcaggctggtgggagctgcagttgttggcgggatatgcgtgcccagcccccttacacagcctgtgcaggcgggtgggcgggcagcaggctcccttcctcgggcctcccgcctgctccctgccagcgcagcgccgcgggccagcgccattctggggctacgagccagccagcgtgcaggctggaggcagccctgcccccggctccacctgccccctccatgagcaagcgtgtgcccaccccaccccctgcgcaatcgctatcttggcagcctggcccctttgcacctcgcctccctttatccatgcactcctgctactttctgtgctatctcggggccttcccacagtcaacactctccgcatatccacattttcagtatgcatctctctgggctctagttttgcacacatgccatttttacgcacttgcatgtttttgcagactcttcatccttgactcactctgcctcagcatccatgttaacactgtttttttttcctttttttaatttgttttatttttttagagacaaggtctcactctgtaacccaggctggagtgcaggggtgtgatcatagctcactgcagccttgaactcctgggctcaatccatcctcccacctaagtctcctgagtacctgggactacctaaatttttttgttttgttttttaattttttgtagagacagggtcttgctgtgttgcccaggatgaatgttaactatcttttttttttttttttttgagacaaagtctcgctctgtcacccaggcttgaggacaatgtcacaatctcagctcactgcaacctctgcctcccaggttcaagcgattctcctgccttaacctcccaagtagctgggattacaggtgctcaccaccacacccggctaattattattattattattttttgagacagagtatcgctctgtcacccaggctggagtgcagtggtgcgatctcagctcactgcaacctccacctcccgggtgcaagcaattctcctgcctcagcctccccagtagctgggactagaggtgcacgccgccacacccggctaattttctgtattttagtagagatggggtttcaccgtgttgcccaggctggtctcgaactcctgagctcaggcaatccgcccgccttggcctcccaaagtgctaggactacaggcatcagccaccttgcccggcgtcatttttttgtatttttagtagagacatggtttcgccatgttggccaggctggtcttgaactcctgacctcaggtgatccacctgccttggcctcccaaagtgctgggattacaggtaagagccaccgcgccccacctggatgaatgttcactttcttatgtgcacagtcagggtttgtcccccaatttgggagcaaggatctctctgcacatttctgcttttctctggacatatgcgcctttttgtatactccttgctctttgattgctggtgtctttgtacccatccaaccacataggcacgctcacgtgcacactcaagtaccctttgccttctcaggaactgatctgtagttcgaaacacttgcacacttcttttttttttttttttttttttttgagatggagtttcgctcttgttgcccaggctggagtgcaatggcgtgatctcggctcaccgcaacctcctcctcccgggttcaagcgattctcccgcctcaacctcccaagtagctgggattacaggcatgcgccaccacacccggctatacttgcagactttttgcctgccctgggacctaaaacaagacctttgacactttcacagcttgacagctcattgtcccctcacccaaactcccacactggtcctctgaggtccctcctctgctcttctgcccctgcgtgtgcgccagtataagcctttgtttctcttcagtgcttgagccctctgcacgcctacccctggcctccaatccccattgctccccccgtgagcatgctactagccatttgcacactcgttgatccaccacagccggacccctgtgcttgggcctcctttatgcaacatgaccttttgcacaaaaaacacaggcctcatgggacctaccacccctcccttcccaccccagagtacagcattctcaggatcccatcccccacgcataaagagagccctctctcaccagatcggaacttggagcgaatgatttgggaacgctgggaggaagccgc

SEQ ID NO: 1560671 - DNA, 4001 bp, Homo sapiens
aaaggcgttctggggtcctcaaagacggggagctggggaagatgcagaaaagtgagggtccagaattctgggtctccaagggcgcaaacatggggctagatttctgtgcatgggggaggaggaactaggcgttcagactcgggtctgaagggcgaagggaggggctgggatcctggactcttaaaccctgggagaagagagggttgggggccccaatcccctaatcttggactcgaggtttgagggaggaggatgctgggacctgaatttctgggtcccgggagaacagaagtgggtgtcatacctaggatgtggctgctgcgagtctgtcccttcccacagagatggcccaggaggacccagggcggacccctcggcttgggggtccgccctggatccctgtctcggctctgggggcatgtactggtggtatgtcaagttccccctgggcttggactccctccaacgttgggagatcttgggagactcctgaaagagcaggtgtgatgttttaggcttcagcgcggctcccaccttccggccccaggactacatgcaaagtatggggtcagctcggtgccaccgaagaggagcaaaaatggcagcagcaacaagggagacaaagactaggctctcagagggacctctccctccagtcgagactcaccttctttggggacctccaaggaggacaatattctggctcggggagcaggaccccagggctgaagaggaaaggggccgtgcccgagggcaaggccggggccagaggagggtctgaggctgagatccacgggtccggatccgagactggagagacggtgaaggaccctgagaggcctgcaggcagcaagccaggccgggaggagcaaggctgtgtggaaagcggggctccagggtgccggagggcaggccagggagcaagacttgattgctgggagatgggcgcctgaactggatctgagggcggaggtgtgggggggctccggttgctacattctcaagtaaagcaggaattttctatcacaaaggggtgtggtagctgaggatcacagatgtctgaggttttgctaggacaggggtggggcctgcactcctggttcttggggagagggagaggctgaaagctacatccaggccggccgcggtggctcacgcctgtaatcccagcagtttgggagactgaggcgggcggatcacttgaggtcaggagttcaagaccagcccggccaacatggtgaaactccgtctctactaacaatacaaaaattagccaggcgtggtggcacgtgcctgtaatctcagctactcaggaggctgaggcaggagaatcgcttgaacctgggaggtagaggtttcagtgagcttagattgagccatgacactccagcctggcgacagagcaagattccatctcaaaaaaaaaaaaaaaaaaaaaagctatatccagagcttctcatgtataccaaatgtggagaccaggatgcctgtcttctccaaagaagcaggatccaagttcaagcatctcattagggtggagaagcaggaagcagagctcctaggggtggggtggccagagacctggaccctggatccttgggaaaggacaggatgggattttggtctgtcccaggggatggagactgagctgcaggaaccaatgaggggtatctggcagctgtattccaggatatcccagtggggagtggggggtcaccatcccctcccttttggggcccatacttactctgctcctgattccgtctgtggatccgaagctggaggactgtggagggaggagggaggtgggaggaggaaggcgggaagggagtgtccaggagcctggcctggcaggctggtgggagctgcagttgttggcgggatatgcgtgcccagcccccttacacagcctgtgcaggcgggtgggcgggcagcaggctcccttcctcgggcctcccgcctgctccctgccagcgcagcgccgcgggccagcgccattctggggctacgagccagccagcgtgcaggctggaggcagccctgcccccggctccacctgccccctccatgagcaagcgtgtgcccaccccaccccctgcgcaatcgctatcttggcagcctggcccctttgcacctcgcctccctttatccatgcactcctgctactttctgtgctatctcggggccttcccacagtcaacactctccgcatatccacattttcagtatgcatctctctgggctctagttttgcacacatgccatttttacgcacttgcatgtttttgcagactcttcatccttgactcactctgcctcagcatccatgttaacactgtttttttttcctttttttaatttgttttatttttttagagacaaggtctcactctgtaacccaggctggagtgcaggggtgtgatcatagctcactgcagccttgaactcctgggctcaatccatcctcccacctaagtctcctgagtacctgggactacctaaatttttttgttttgttttttaattttttgtagagacagggtcttgctgtgttgcccaggatgaatgttaactatcttttttttttttttttttgagacaaagtctcgctctgtcacccaggcttgaggacaatgtcacaatctcagctcactgcaacctctgcctcccaggttcaagcgattctcctgccttaacctcccaagtagctgggattacaggtgctcaccaccacacccggctaattattattattattattttttgagacagagtatcgctctgtcacccaggctggagtgcagtggtgcgatctcagctcactgcaacctccacctcccgggtgcaagcaattctcctgcctcagcctccccagtagctgggactagaggtgcacgccgccacacccggctaattttctgtattttagtagagatggggtttcaccgtgttgcccaggctggtctcgaactcctgagctcaggcaatccgcccgccttggcctcccaaagtgctaggactacaggcatcagccaccttgcccggcgtcatttttttgtatttttagtagagacatggtttcgccatgttggccaggctggtcttgaactcctgacctcaggtgatccacctgccttggcctcccaaagtgctgggattacaggtaagagccaccgcgccccacctggatgaatgttcactttcttatgtgcacagtcagggtttgtcccccaatttgggagcaaggatctctctgcacatttctgcttttctctggacatatgcgcctttttgtatactccttgctctttgattgctggtgtctttgtacccatccaaccacataggcacgctcacgtgcacactcaagtaccctttgccttctcaggaactgatctgtagttcgaaacacttgcacacttcttttttttttttttttttttttttgagatggagtttcgctcttgttgcccaggctggagtgcaatggcgtgatctcggctcaccgcaacctcctcctcccgggttcaagcgattctcccgcctcaacctcccaagtagctgggattacaggcatgcgccaccacacccggctatacttgcagactttttgcctgccctgggacctaaaacaagacctttgacactttcacagcttgacagctcattgtcccctcacccaaactcccacactggtcctctgaggtccctcctctgctcttctgcccctgcgtgtgcgccagtataagcctttgtttctcttcagtgcttgagccctctgcacgcctacccctggcctccaatccccattgctccccccgtgagcatgctactagccatttgcacactcgttgatccaccacagccggacccctgtgcttgggcctcctttatgcaacatgaccttttgcacaaaaaacacaggcctcatgggacctaccacccctcccttcccaccccagagtacagcattctcaggatcccatcccccacgcataaag

SEQ ID NO: 1560672 - DNA, 4001 bp, Homo sapiens
gtcccgggtcgcacctgcgcaaacagcgaggcctgctcccgagagtggccgaaggggtcaatgtgccaggccacacggggtcgcccatcattgccaaatgtgtcctccagaaagcgcagcccaagtgtcatctggtccacgatggcaccgtagtgggtggctgcctcatcgttcatcacccagccaccattggcgaactccaggcgccctgtgccaggacaggcaaggtcagggtcagcggtcagagccaggagtgggagtagggtgggtgatactgggaatgtgaaagcctgcctgtgtacacatttctggcggaaggacaagaggggtcgctcccaggccatagttcccagatatgggaaagaggccccctgcatggcaggcttcccagaggatgcacagcaggtggggctttgtgggatgtataggaggtctccaaatggagagtccaggcaggcggagcgacacgcatgttatacagcttgcacgtggcatgacaaatctcagaaaccagagatgcagaagcagaagctgggctgggcttcctcttttcacttccttggggtaggctcaccctggcgcacaaggtctcgcacgacttcctgtgtggcatttgtctgctggtgccaccaacgggagaagaaggcaatctccacgtaaatgaagcgacgggtgggatctgccagcaaggcagagatgaccgagtccaggatgtactgcacaccggcgtgctggatgtcattcttgactgtggataacagggataaggctctcagggaacagcagagccaagggggttattcctagacagaggagcccaaaccctggatattagggtagcactggccccaccctaatgtccaggacccagagggattacagggaccatggggatcccagggaccagtccccatcctctactcacttccataaaagtactggtccacggttttgagccagcccacgtcatcatgtgtgtgaggcagcaggtgcacgttcagcatgttcggctgcactgtggggcatgtctgcacagggaccccaaacacacataccttgtcaataacccccgaggtcgggggctgcagagtaagtcttgatctagaggtgagtgactcagagaggcctgatctcgcctatgtgcagaggaggccaggccctcccaggcaggacacacacatacatagttgtgctcatagatacaactccactttgcacaaccccacagggcagctctcattcacactccgggaaaataataatagaagtagctgatgtttgttcagcatttgccgacagcagacggccaccgtgggaggtggggtgatgttatccccagtttccagatgaaggcactgaggcttagagaggataggtgacttgcccaacgtcacacactcaggaagtgtaagagctaggctggaatttcaggcagactccagagtcccagctctcagccagcacctccccccacacatacactgctcaccccctgccacctcctgcccctccaatcccacagttaagtgcagacaaagtctaggcaagcatcccggagacacggaggcaggtacaatcagacacagtcctatactcagatgcgcacagccagacctcgcaatgacacaaagcacgcactcagaccacactgtcatatcatcagccattcactagacacccacaggacagacccacccacacctctagactgtattctgggtttcactctgcctcctgtacgtttcagctcggaggccccactcacctcgtatcccccggcccgagcaccggcagccgccagcaacaaaaggaaaaagcagagaggcgggagcggtggccgcagggcgcgggacatggtccaggggcctgctgagtccaggcagccgcgagcgcagacccccgaagcccgcgcgtaggcgcccatggctcagcagcttcctcctggggttccccggccctggaaaggccgggcaaacgccccgcccccagacccggccgggccaatcggggtggggggcggggccagggcgcggtctggaggctcacgggagagaggctgtagccctgggcaatcccgggggtcgttacaggaaggtaggaaaatgccaccctcagggcactggttgggctaaaggtgacactggcgtctcacgggctatgaagacggaatgcctcttaatgccggaattccaagacggaatgcctcttaatgccggtaggagcagaagtgcttttcctaagggggccgggttttcctagccggtgtagtgtgtccatgggaatccagggtgtccgtcccatggaccttcagcgctagggtcctggaaggacctagcttgcctaagaggaggatctgatgaagagtcctatactgtggggattgggacgttgggtaaatacccctggagtaccagggatgggatccagcctggttgagaaggatccctgggtgttccggagagaaaagagggtctgacaagtggggaaggaccccgagtctttcatgcctttcccaattcctaccagttcattctctgataagaaaacaaagcccagggcaggcgcagtggctcaagcctgcaatcccagcactttgggagggccaggctggtgaatcacttgggcctgggagtttgagaccagcctgggcaacatgggttgttttgtagagacgggtttgaaaacacaaaatttgtaattttacacaaaatgtaaaaatacaaaaattagctgggcatggtggcacatgcctgtaatcccagctacttgggagactgaggcaggagaatcacttgaacctgggaggcggaggttgcagtgagccgagatcaagatcatgccattgccctccagcctgggcaacaagagcaaaactctgtctcaaaaaaaacaagaattaactgggcatggtagcacgcatttgtggtcccagttacgtggcaggctgaggtgggaggattgcttgagcccaggagtttgaggctgcagtgaacatagattgtgccactgcactcagcctgcatgacagatcaagaccattttctttcttaaaaaggaaaaaaaaaaaaggaaaccaaagcctagattatctaggtcagcagggccatctggtgagttgccagagggcagaagtcactgtcttgtccctagcacctgacttaagacacaaggtttatgaagtaagcaaatgaacagccagaagcctccagactggggccccacaccaggcctatggggctagagcccttcccgccaggtaggaggaacaccccactgaacagaagaggctgacagccagagtgaaaaactttattaacaacaggtttcaacgagaaagcaaatgaatacccctagaaacatggacagcatctcccccagcagcaggcaggggaagggaggcaggaggggtaagcctagggtgttccctaggaaagggccaggttccctctatccagctgggggcaccgagacggcctcattcagggaagtccaggatggcagctgaaggcagcaggtttagcagccaaagcccaggcctagtggatagacagggtccaaaatgtgacccttctaggctggtatcaccatgggggcgtcatgggctgaggattctgcagataggacatcaccacggcagagatggacagcctgagacaggagagaggtgtcagtctaggatggccaggctggggtccccccaccccttactcaagagtcacttgttctgtagggcaagtctcacatgaagctactcatcatttgcttcgtgtcctccgagctccgagagttggcaaagctgatgaaggagcagtagacagcgacccaagcacaccacttcagctagggaaaggtaagtgggtgggcaggttagtgaaaggcacaacaatgagtccccgaagccacctttccagacaccagatcatgcccactgattccatctgatgcagctgggaccttgccccacccggaattcctcagtcccacctgctcatggcatactc

SEQ ID NO: 1560673 - DNA, 4001 bp, Homo sapiens
acgttggccaggctagtctccaactcctgacctcaagtgatccgcccgctgcggcctcccaaagtgctgagatcagaggcgtaagccaccgcgcccggttcattctagatgttctgtccactgctgggtcttgactggggcccttcccttccactggacacaccagtcatagcagtttctcatcaaaaaaccccctcctcagagatctccctgcctcttcccccttcaatgccaatttcctcatctgtcaatcagggacaaaaacaccagttcctgcactgtgggttgctgaggactgagggggttatcactgggtcacggcttgcatttgaaaggtctcaactgtattattactgttgttatttatagctgcatcccaccccccatgcctggcacacggctggcacttccccaaataacaagaggtagggagcagtcagggggaccccagcctcacctttcacaatgctggagaaggtggcagagtgtcgggacacaaagaccttgagctgttcatcaaggttgcagacgccaggatcgacatcccaagaccggatgcctggtgggaaggagggatcaaggcgggagttcagccgggccccccagctcccagaatatttcaataattagcaccccgtgggtggggagcgccccagcctcctcccttcactcacagcttggagactcagaagtacccaacaccttcaggtctcgctgcagctgagccaggggacccagagcacacctcatcattttacacacaagattcatcagcaacaaagcctccacctcctccatctccacctcctcgctgctcctatgccctgccagacccgtttccactcaccgcccttgcaacagctgtttcccctgcctggaagtccatccccctgccgcccccacctgttcctactggccagggggcccttccccctcagcaccttcgggtgctaagactgactgtcctctcagtcccttgcagccttctcatccttcctgacaccatgtgagctggaagcttgttccatctcctcactcgctttgggtccatccccaaaccagacctgtgttggcagggctgaacctgtctatcatcccggccatatccctgtgtccactgcccaaaggcctggcgcatagcaggtgctcactaaacactcctcaagcacatgaaccgaggtgcgtgttcctgtcccattttacatgcaatgaaacgccaggtccagatgctccgagggatgggggatgaacacccatctccacccacgggcgcatcacgcccgccagtcccactgagccaagtggctgcaggtgaacctggcaggtgcgcctatgactcacctccctaggtgccaaatccccagggcaggccgcacccgcccacaccccaattagcagctccttgtgaggcaacagaaagcgggccccggggctccaggcccagcctcccccatatctgcttctccctccgggagatctctatctaagctgctaagacctggagatccaaagcgaccccaggccctacccccgggcaggccagtcaggcgggaagcggagccgtggtccaactgcaagggtccccaagcccaggcccgtgtcccctcccctatcttcacccggagttggggcggggcagccctgcccagcccaggcccggatgccactttctccgcgggcacccacgggcaccccgcctttgcccgcgtcgtgcgcctaacggtgaaggggacccagccccaggcccgcgacccccgccccggagcccgggtcccgccgccgccgccgccgccgccccaccccgccggccccgggcccagacgcgcgaacgggcccgcctcccgggctcccgcgggcccccaggccagcccgacctctttcgagctcctccaggacgtaggtgaggagccccgggctcccgaactcgctgcccaccacgaggagcagtgagctcggagccgcggcagccccagatccagccaccgccgccatcttcgggccgccccggcgttctcggcgcccgccccgcaggccccgcctcttaaaggggccgcaccggaagggctgaagaccccgcccggaaccaccgcatccccgcccctttttgtcgaccacttacaggccctttgaggtcgtggagagcaggggatgcgggcgttaaaggggttggccgactcctgggtgtccgcttgggagccgcctctcccaagtgaccattcattcattttttttttcattgaacaagctttgattgcgtgcctgctgcatgtaggtcagaactcctgccctccaggaactcacatcacatgacagtaggccgcatcagaacccggtgcctatggatgctcccagctctctaggtcagggcttgaacagagaaaagaaatctatcttgtaggtagggctttaagggatgtgtaggagtttgccttgtgggtggtggggcaagagctggtgaggcagaagtttacagcaggtgcaaagttttagaggtaagaaagtacatgtgtgtttgggacacaaccggagcactctgggcctgcctggaacagggcaacacttattctgcacctcctgtgcgccaggtattttattgcattagctcattacatacaagcacaaagcgatgagttttgtgcttgtatgtaggcacagatgagtaggcacagttactgtggtcactttcagaggaaagaagaggaaactgagatttggagggatgaagtcaccaggcctgtaagtggtagagcaggtttgaacccaagtgggtcttactctagatccagcctgtgcaagggactgcctgcgttgcgcacatgggtacctctctctccccagataatcctctttaggcttttctttcctttcctcccctctcttctcctctcctcccctcccctcctctcctcttctcccctcccctccccttctctcccctctcctctcctctcctcccctcccctcccttcctctccctcccctcccctcccctcctctcccctctcctctcctctcctttccttttcttgagatggagtctcattctgccgcccaggctggagtgcaatggcacaatctcagctcactgcaacctctgcctcccgggttcaagcgattcccttgcctcagcctcccaagtagcgggattataggtgtccgccaccatgccctgctaatttttgtattttagtagagatgaggtttcttttcttttcttttcttttcttttcttttcttttcttttcttttcttttcttttagagacagagtctcgctctgtcgcccaggctgaagggtagtggcgcgatctcggctcactgcaagctccacctcccaggttcatgccattctcctgcctcagcctcccgagtagctgggactacaggcgcccgccactgtgcccagctaattttttgtattttcagtagagacggggtttcaccgtggtctcgatctcctgacctcgtgatctgcctgcctcggcctcccaaagtgctgggattacaggcgtgagccaccgtgcccggcagagatggggtttcaccatgttggccaggctggtctcgaactcctgacctcaagtgatcctcctgccttggcctcccaaagtgctgggattacaggcgtgagccgccgcgcctggccccctttagccctttgacccataggggctactacttgacaaatcatcttgcttggaacttctggacagtggtccatgcccaggaaacattgaacctcctttctcaggagtgagctccctgtctccgggagtatgcaaagaaaagcagaacagaaatgggaaagatctgggaaggcgaatcagcctcccgctgccgtttattatctaggttgttcagcccaacttcctccctggccagtgtgtaacagccactggccacgtgccgtctaccattcttgcactccacttcctctctctctttttggttctggcatccttcctctatccttgtccctcccccttggctcccttccctgtg

SEQ ID NO: 1560674 - DNA, 4001 bp, Homo sapiens
tgctgcactctcaacctgtggctcaggcaccctcccaccccatctctcccccataggaaccctcccaccccatctctcccccatagggaccctcccaccccatctctcccccatagggaccctcccaccccatctctcccccatagggaccctcccaccccatctctcccccacagggaccccctcaccccatctctcccccatagggaccccctcaccccatctctcccccatagggaccctcccaccccatctctcccccatagggaccccctcaccccatctctcccccataggaaccctcccaccccatctttcccccatagggaccccctcaccccatctctcccccaagggactcgcttcactatcatttcaatatgcagaacaccccttgcctatccttcccccacaggcccccaccgacacatcctctcctcccagggaccccctcaaccccatctcacaattcaggggccctgcaccccatcttctctctgcaaggacatctccttggcctgatctcacgacttagggattccaaaccccatcttttccccaaagggatctcccctcactccaatctcattactcagggaccccaccatctccccgatttcactattcagggaccgttcaccccatttcactactcagagacctaccaccattctgctactcagtgactccatgccctgtcttttcccacagggacctcccttggccctatctcattattgagggacccttaccccgtcttttcctaccagggaccctaccccatctcagtctcattactcagggacccctcaccccatcctctcccctctggagcccccttgcccagatttcctcctcaggggctgcctgacctccccacaccccatcctctcctctcaggaatgccctgcaccccgatttccctactcagggtctcccctcaccctcatctcatgactacggcaacctttactccgtcctttcctcttaggaactcttcaccctcatttcactactcaaggaccccacactgtgttctctcctcttagagatacccctcaccccgatctcactgcttggggagcctcatcctgttctctccttggggacacccctcattccgattttcctactgagggactcccctcaccccagcttcacttttcagaagccccacaccccatcttctgcactgcagggacctcccctcactcaacctcgctgctcagggacccctgtccccatcctctcctcttagagacatccttcaccccaacttcactactcagagactcccgttatcccaattccactcttcaggaaccccacaccccatcttttccaccacaaggacctcccctcgcccaatctcactgctcaaagacccccctgccccgtgcacccttcgccccgtcctccgagggccccctgccccgtcctcccccgagggccccctgccccgtcctcccccgagggtcccctgccctgtcctcccctcgagaaccccctgccccgtgcaccactcaccccgtcctcccccgtgacccccctgcctcgtgcactcctcgcgaacccccgtcccctcgccccgtccttccccgagggctccctgccccgtgcaccccaagcctccggctgacccctgcccactcactcggaggcgccctcgctggtaggggatgggccctcggcgatggtagggttgatggtgagcgccggcagcaccggcttcctccgggccagcatcggggctccgcgggccggcggcggcggcgcctctagccggggcccatagggggcgggccgggagcggtcggcgcctacgcgagcccggggctgcggccgcggcccaggccggcgtcggggcggccgagggcgggcggcgctgcgggcctgggccgagggtagccgaggggcgctggggctgaggcgagcgagccgctaccgctgccgaggcccgaagaaggctgacgccgcagcccgagtccgagaggcagggggaggggaggggcggccacaagatcgcggaccggcttctcgcgataacgggatcgggagccgcgatggaccccacccccagccgccgcgcctgcgcagcagcacaaggccgcctttcggaggggaaaggggcggagaccgacgcgaggcggtgccgggaccgggcgccctcgcttgccttaccacggcgcgtgtgcccaagcgcttggggcatgaggcgcgggagcaggggaggagacggagggatgaaggctggggtgatggtcgtgcacaggtgggcagggtagccagactcctgagagcctgtggtgccccaggctggggctgagagaacccgtaagaccccagaacagtggacgagacccacccagagtccatttaatctttttggcaagcgtggacacacgcccctagcccccaccgccttagagtgtcagttactccccctccttcatcagaacaaggccactctaaaacatttttaaaatttattttaattgacaaataaaattgcatatattactatgcgcatgttgaaacatttttattataaaatacacataacataaaacttgtcattttaaccatttctaaatgcacagctcagcggcattaagcaaccaccaccaccaccatctccagaattttctcatcttccgaaactgaaacactgtcccctatgaaacctcactccctatccccctccccagcccctggaacccaacgtcgtacttcctgtgaatctgatgattctagggacttcatatgagtaggatcacacaggttttgtccctttgtggctggcatatttcactgagggccacgtcctcaaggtgcctgttgtagctgtgttagatccacgttgtaacctgtgttagaatttacccacttgactactccgggcatacttccaatcgggtagccctgctccaaaaaagagcagaaaaaaaaaaaaaaagaaaaatttccctttttttttttttgagacggagtctcgctctgtcacccaggctggagtgcagtggtgcgatctcggcccactgcaaactctgcctcccgggttcacgccattctcctgcctcagcctcccgagtagctgggactacaggtgcccaccaccatgcccggctaatttttttgtatttttagtagagacggggtttcaccgtgttagccaggatggtctccatctcctgacctcgtgatccacccgcctcgatctcccaaagtgctgggattacaggcgtgagccaccgcacccagtcaggattttcctcctttttaaggctgaataatattctattgtgtgcatggactatattttgcttatccatttatctgccactagacacttcggtgaatcgtgccgctatgaacacagatgtacaaatatctgtttgagtccttgccttgagttcttttgggtatatgttctgaagaggaattactggattatatggtaattctatgttgaactttttgaagcaccaccttactatttaatacaatagccgtaccactttataagaaaggtcataggctgggcgcggtggctcacgcctgtaatcccagcactttgggaggtcgaggcgggtggatcacctgaggtcaggagttgaagacgagtctggccaacatggtgaaaccccgtctctactaaaacaaaaaaatacaaaaattagccgggcatggtggcgcgtgcctgtaatcccagctactcgcgaggttgaggcagaagaattgcttgaacccgggaggcagaggttgcagtgagccaagatcacgccattgcactccagcttgggagacaagagcgagacttcgtctcaaaaaaatcaaacaaacaaacaaacaaacaaataaataaataaaatacaaaaattagccaggcctggcggtgtgtgcctatagtctcagctactcaggcggctgaggcaggagaatcgcttgaacccggggggcagacgttgcagtgagccaagattgcaccactgccctccagc

SEQ ID NO: 1560675 - DNA, 4001 bp, Homo sapiens
aacaccacgataaatcacaacagaaacgactgattcgtccaaaagaaaagaaatcaaatcataaacgaggaggagggggaggcaccgaactgcagagatggctaggaaccgacagagatggggagggcggggaggatgggatggagttgacacagacagagacgcctggaggggactcctcgggggcctgcctgccaccggcctcctagctctgcatgggaacggccacccctgaaggcacccgggatcctggactcaaccctgtctcatccactcaggggccagggagggcggcccccaggggctagcagggacccgtgtcttggctgggcttcttgtctcaggcagtgtcctgcaccagaatccccacctccatgatttctctggacccccaagagactccccaaggaggaacccacgctgactcaggtcaggagagggagggacaggagggtgtcaggctgtgaaggtcaggctgggtgaccagggaatgggtggggtgcccagatacgggggtacctttctcgcctgccataatgactccatagagagaactaaataaactacgaaggtcacatcagaggagacaagagagaattttactgggtcaagaaagacacaaaaaggatcatgggtcaggggtggtgttcacagggtttgaaaatctaatttcctccagcccagaggatttagagaccaggatcttggggaaaaagccgggagactagatatggtcagtgttcccaggccaggtgtgtgtgaagcgagaggtactgatctaggatgacaaggtgtcagggaggtaggtaccgaggtggtgggactgatcagaaagcaggtggatgtatgctggggcgcggcgggagcaggcctagagtcacactggccccaggtgtccccaggtcaggtgggtgtgggtgtgaagggaaggggagccatcacttgaacacaggtgacaaagtcaccgggctggctgggggtcgatgtgcatttctggaggtcagacaccacacgctcaccaagatggtggcagtgaaactggtcacagggatttgcggggcctggtgtatgtgggagggggtctgctgagcccaatgccatggtcactgtcgccaagagggggagaagggaccccctcccgtccccccacctcagacacggtcacagggagagcgagagggagaatcctcgggtcagaagagatggggaggggctctatgtggtcaagtaacctcaggtgtccccgagccaggcgtgcgcgtgtgcgtagatcgtcgctgcacggggctgacaagcccccaggccgggggaggggggcgccagacagtccctgagatgacgagagtggtagcatcaggtcaacagggacgtgtctgtgttttcggggcgacctggatgtggtcactgtcgcgtggagtcggggaagcccgacccagaggatcacggcgatgggggcgggtcatcagctgggggcctcgcctgggtccgggaactgggctcccaagccctgagggtgcgaaccccccggagctcgccggctccacgccccccgggtcaccgtgaccctcgccccgcgagcccgcagcggggggggcggagaggagagcgagcgccccggaagcgggggcggggccttgtggtgggggcggggcctcccgcggcgcgcgccccgccccgcccgcccgccccctcccccacgccgccgtgcttactgggcctgggccgctgggggctgatatccaggttgaggtcgatcctccgccgggcctcccggttctcctgcttcagctttgcttccaggcgggacagcttctgttccagggaggacgccgccatcttccccgccgccaccgccgccgcgcaccgcccggccgcccgtcagtccggcagacaaacaccgcactgcgcctgcgcccggatgaccccgtcgagccgccgtctcgccccgcaccgcgcatgcccgcggcgcgcacccgcccttctccgcgtgcgaacctccgcgcgtgcgtgcttcggctcagcccgaaggatgacgccacctagagctcgaggcaggcaacgtgcaacccccgccttcgtcgccaccaccaccgtagtgcgcatgcgccaattcccgatcgctcctgagagaggcgctgcgaggaaacaccattcttctgaggacggtgggcggggaaaacggcgcgcatgcttagcgaggcgaagccgtgttcgcccgcgtggcttttgcgcatgcgcattcctggaacctcgttcccaaagcggcagtcgatccctggtctccacggcggtgcagcctcagcctcctcgcttttcacggtcggcttgggcgtcccttcggaatgccttcctcactgatggtgctttattaggattcctcttgtgcttaattacctcctagcctcctgctggcagcggggtgccgcctcctcaccgtaattaggctccgtcgagagccctttcccttcttgccagccccagcaggctcagagttggccgaagccaggggggaggggacggccatgggaacccagcggtgtgacccctgccctcggcgacggggccaaggtcaaggccagagttgttggccagacccacatagaacctcaagacaccccccttatctctctcgcacccggaacgtgagcccagcgcctggacgtggagaattcctatctgaggaggggcgctggggttaggtgccagtgcttgggcccccggcagcctaaaccactcctttaagtggtccgacgggtgctggggaaatgtcccatctggaacccagggatccccccaagagcggcttccctctgctcttagatgcgagaaggaagttctgattttgcggacacccgggaggtggccagggccaggcagactctgccaagtgcccttccagcttctggtccaacgagggaacactttgggatgagagttaccggcttgtcggaactcctctggtgacgatttgtgggtggagcacacacaagtgtagagttatagctgaggtctttacctttccgtcttccaggcagccttctgtgcctctgctctgagaacatgagactcatccttgattctggcacacgggtgttacttggtcacatgaaataaaaggttacgggcatggtggttcacgcctgtaatcccagcactttgggaggccgaggcggatggatcacgaagtcaggagaggaccagcctggccaagatggtgaaaccccgtgtctactagaaatacgaaaattagccgggcatggtggcaggcgcctgtaattccagctacttgggaggctgaggcagagaattgcttgaacccaggaggcggaggttgcagtgagccaagattgcgccactgcactccagcctgggtgacagagccagactccgtctcaaaaaaaaaaaaaagaaagaaaaacagggtcttgttctgttgctcaggctggagtggagtggtgtgatcacagctcactgcagcctcaacctcctgggtcctgggctcaagcaatcctcctgcctctgcttgcctagtagctgggacctcaggcacacatcagcacacctggccaacttttttttgtatgtttttgtagagatgagatctcactatgttgcccagtttggtctcaagctcttgagctcaagcgatcctcccacctgagcctcccaaagcgctgggattacaagcatgagccactatgtctggccctaatggacggtgttagacaatgacaggagtgcacataagagatcaaaactagaacttgcataattagtattatttattaagcacccagagaacagtcaagaccaaagtccctgcttgtccttggaaaaatgtcacctctatagcaggtgtcctaaccctgcagtccacccaccttaggaagtccttgaatagctctctgggggaaatctatcagctgcctgaagagctttgtgtgtatttgtacaccagcattttcctgaggaaggaggtgcctggcttcatcagtttctca

SEQ ID NO: 1560676 - DNA, 4001 bp, Homo sapiens
gaagaaatgaaagggagtgagatggggcacagcacgaatgggagagccaggaatgtaagattttttttttcttgctgtatccctgggacagggtctggcacacagcactctggaaatatctgtggaatgaatgaatgaaattgctagcctgtgagtactgtcagggcagaaaccatggctgtcttactcccagctgggctcctgcttaataggtgctcaattaatacttgttgacaccacatgaagctcttccatctagaaatgagtcttgcagaatgttcccttctacctggctccattatttattcaaccaaccaatcaactttggagaacctatcaggcagcctggaagcttttatataagccacatcaatttaattcctccctcatcttttccagtttgccttggccagctcggcctatgaagactccaggaaatggttctcaactgggggtgattctgccccccaggggacatttgcaatgcctggagacacttttggttgtcatagctggggagagggggcagggaatgctaatgacatctagtgggaagaggctaaagatgccgctaagcaactcacaatttacaggacagcccctacaacaatgatctggcctcaagtgccaatagtgctggggttgagagacactgactccagacggggtaggctctttttgtctctgcctggtggactctggcagcatggctggatggcaagcaccttgaaggcaggcactgcatctgtcctgttcatgcagggaacgcaggtgttcatggatacatgtttactgagcgattgtgactctgcagcctgggaggcaggtaagtccttcaacctttctgagcctcctttttctcccttaaggcaggcaaggcctacctcaccttcaccctgaaggtatcatactgctgccccttctcactccaggcacagtgtcatctggtgtccctcaccctgtttcccaccacctaggcctggccttgagaggttctgtggaaggaattttggggagaggacaccacttactgttgatggacttgaggtcccggtggatgatgggcacaggggcatcattgtgtaggtagttcatgccccgggccacctgcacagcccagttgaccagcacgtgaggtggcacccggcgacctgccagcaccctgctcagtgcaccaccccgggcatactccatcactaggcagaggtgtggggggttgaggcaggcgcccctaagggcaattatgttggggtgctgcagggctccaaagagccgggcttcctggcacacctgctccgctgtcactgccgggtccttctcagggtccagccgggcggccttgactgccacctcctcgccacgccacagggcccgatagaccttgccaaagccccccacaccgatgatctcctctagctgcagctcgtggaaggggatctcctggggcagctggaggcccgcgggtgcagcgggggcgccgggggccacgtagttgctggggaagacgcccacgcggccgctggggagctgcccggtccaccagccctcgtcgccggacaccgcacagtcttgggaaagcacctggacgcgatcgcccctccgcagggtcagctcctcgtcgcccgccgcctcgtagtcgaacaccgcggtccagacgggccccgcgggggtcgtgccccactccttggccaccgccccctcctcctcctccatgggggaggggccgggggctgcgggaggccgcttcacacaggctgcccgcgggatgcagagggcgggccccggcggccgggatggagggcagtccctgcggggtctagggagctcctgagggccatggctggggcgccctccgcaggagcaagaaaaaaaaccctttcaaagggcaggctcgtcccttccgatttggctgtacgggcggggcggggcggggtgggagtggggcggcaggttcacccgtgccccccaaacggcagagggctaagagggcctggccgcgcggctctcgaatgcccgccggggtccgccggtgggggacgagggcgagggcggcaggcagtccccgttccccgcgccgctcaccccgcgcagctccaccggcggcccccggctccgcatcccgggccacgactgccgggccgggcgggggtggcggggcccctggggcggccgccccgggccggggtggcgcgcccctcggcctcctcacgcgcggggcagccgggcggcccccatccttggcaccggcctcccggtcggccccagcccctgccccccgcccgtgctgcttccccgggccaccggcggggcccgagtgacgtgtgggcgccgccgccgcggtgcctcctgggagttgtagtctccggccgtgcggcctcggggcccggctctcagcgccctccagcagagccccgcggccagcctcgggccgcaatggacatgacaccccacgaagccgaaggagtcctcccggggagatgagcccggcctcggcccctccttcggacgcggcgtagcgggcgcccggggcggggggaagcgctcctcacagaccctgtgggggccgcggcccaggatgggttggactgcaacggacgcgattagcaacgcgaaaaataggagctgcgtgcatgactgtgactgcccggagccgcgaacgcagcctggaccttatccctgaggcaggacggcccctcggaccccccgaccgagatgtacgctgggaactgtagtccgcgcggggacctggcgctgcagggggcggcccccaaacagcgggctgcgggcgtcggcgggtggttggagcaagttaggggtcgggccggtggcgggactctgcggggaagatggggctgggaggatgtgtttagtgtccctggggatgtcacagccacgtctgctttccccaccagctctgggttcctctgctgaagtcagaactcctgctcttgagaatccccgattcctattttataggagtttcaatttcggggagcttaatgtgcatgttgtattcagtgctttgtacacgtggtatcgttaagtcttcacaaagagccccattttacagatgactcatagagaagtgaagtcatttgtgcaaggctacagagctataaatggcaaagcaaaaatgaaaggcagttttaaaaattaacaaccaggccgggcgcggtggctcacgcctgtaatctcagcgctatgggaggccaaggcgggcggatcacgaggccaggagttcgtgaccagcctggccagcatggtgaaacccccgtctctactatttaaaaaaaaaaaaaaaaattagccgggcgtggtggtgtgcgcctgtaatctatcccagctactcgggaggctgaggcaggagaatcgcttgaacctgggaggtggaggttgcagtgagccaagatcacgccacagcactccagcctggacgacagggcaagactccgtctcaaaataaataaataaataaataaccatcgccacgattaacaaaaacaacaacaacaaaaaaaaaaacaacaaaaaacaaacaaacaaaaaacccactgcctttctatttaaagaatgaggaaagtaggtcccgcagaggttcagtgacttcttcaagatctctaagcttgtaagaggcaaaattctgggtctttttacttggcctctcctgagtggtatggggtctagagggaggagagaagaagaggaaataagagggactctagtgcccaaactccagagaactgcccctcagggtccttggggaattgttccattgtcagagggaagtgggttacctggtctcctggctacctagcagggacactcggagcatatcaaaaatgcttgttggaagagagagccccagcttcattctgagtataagtgtttctgctataacctgctatatgcattcttaaaaaaccttcagttcttcaaaacggtgcactaaaattaacaagacttcatggaaaaaatagagttagagacagattgctcaaaat

SEQ ID NO: 1560677 - DNA, 4001 bp, Homo sapiens
tgaaggcaagaggatcagctcagcccaggagtttgaaatatggcccagaaagacagttcctgtgagatacacacacagagacggaagaggtgaatttgggtcggggttggggggtggggatagggaggggtgcttgggtcccgttgtcctttctctaaccttggtagatgtcctggagagaaccagccccacagaattccatgcagatccagagtttctgcaacctgcagtggttcaagagtaagaataataatagcagtaaatacattattatttgcaggaaagcccctggtttgcttctgtcttgttctagttcaataagaactttaacgtaacagctctcatcactccacctctccttgtctaccagagtgaggttgtttcattcccattttacagacaaggaagttaaggctcagagaggaaatgtgagttccggggcaagtcaactcaaacctaggcctttgggcgggaccccactgccgtcccacgccaacctaggaggcagggcagagatctcacgggttgtggagatttggaggggacagaggggcccagggcacctgttctggggagcagaggtcattattggggcatctggaatattaatttggggatcagggaatttaggagtttatattaaaggagcagagagtgaaactgggtgagccaaagagcagaatggtgagagcttcgtttcaagggagttgatttcaaattcagttactatgaagagatcaatttggggtactcttggtcagaaatgggaattttagattggagattagattagaggctgctctggtcagaaaagtgggacttaggagtgaggatcatggtagggttagcccagtcaaaaatgggggtccaggatgggaggtcgggttatggtgagaaatggaagttcaaggttagaactgagggtgccaagaccaggcgcggtggatcacacctgtaatcccagcactttcggaggccgaggcgagtggatcacaaggtcaggagttcaagaccagcctggccaagatggtgaaaccccatctctactaaaaatacaaaaatttgccgggcagggtggtgagcgcctgtaatcccagctactcgggagtctgaggcagagaattgcttgaacccaggaggcagaggttgcagtgagctgagatcatgccactgcactccagcctggcaacagaacaagactccatctcaaaaaagaaaaagaaaagaaaaaaaaagaactgagggtacccccatcaagaaatggggactccgggttaggggctgggctgggtgccagggtgggtctgaggttcatcaccagagataactcccatggtaggccacgatgttggcgtgccggcaagttttcaatatgaggatttccttctgaagggtggagacatcatcatctgtgaggagggcgggagagaaaaggcagctcgcatggggagagagctacaggggaggtgatcccagtgtcccaggaggcgaaggtggggatgtggggaaggagctccatgttccctcctcaccaggctccatcttcaccatcttcagtgccaccaggtcccctgacaccttgtctcgagccttgcaaaggggaagttggcagtcaggcaggctccatttgccagagtccctccacagcatccctgagtcaaggtcaagaactgggaccccctcttgcagcctcctccctgccgagggcttgccttaaaggtcactggttgtagggtgttggggacagaggggcttcctcaccttaaagacttccccatacgtgccgccacccagccgctgtagcaggtcatagtggtcccgggggtctctattgaaaatgtcagggtccacgacgtccatccctgggggcctgagctgggcctgcgcccaggggccagcagggcctcagggctcaacttctggcacctccctccgtccccagaagccctgcacccgccttgcctccgcgggctgtggcctcccccctcctcactctcgcttcctgccccagctgcactgcacgactgtgcaacgggctccacccccccgtcccctgggctctgagagcctctgaggggcagcttgtcttgggacccaagggaccaccctcaacctccaaggcccagggctggatgtaaatgtgatgcaaatgatcttaatcgtaactgggttggaggggggtgccttagaacccccgcccccgtctcctaggtagtgtctaaacctctgctgggtgcttgaaggtttggccacaacccgaaggcggcaggtctgcaaagggatggctatgcagtgtacatgcctgttcacctgtcacatacatgcacttgggttacctcctctgcactgcgcaggcgtgtagacgtgcatctgcctggatacctgtgtgcacagtacacacgtggatgtacccaggacatatacctccacatgcatggcacataactgcattttgtaggcctgcagtgtacaaaacctatacataatatataattcatggcagtacaaatgggacgctcgccctcagctccaagaccggaacctaatggagacggggcgcgatccggcgaagtccaggagccctcaccccagcccctgcccggcagagcacagtagctttgtgggaccctcctcctggagctggggaccaagggctgagacttgaaactggagagctcaggatcctgcaccaggcgcccaggcctgtggcaagagggacctcagaacacctccctcggaacttggccatggcctaaacgtaaggctgctgcgtgcattcccgcagagctccgtggcctcatggccgcgcgcaatacaacgcgcgcgcacgccgccagagctccgggtgcttcccggtgagttcgcgcgcgcacgctcccgcgctaccggcactggaactgggtctgtgaggcccgggaaaagcttagccccgccccctcgccacgagaggcgcctgcgcactgggatccagtaagatttttctcacgctgtctgtccagcttgagtggcgcgaatgcgcacgcgccaattgcgcctgcgaggaagaagtcacgtggcagccggaaagcgtggcggctgctgctagagcctttccctttaccgcacccaaggagctggagcgacaacaacgacgtcgtttccgtttccaccacctcttcctgttcccgtccttgaggacgccgtgccgggtcagtgttagcctccagccctggttgtggaaggcgacagaagtcatggcgatgtttgagcagatgagagccaacgtgggcaagttgctcaagggtatcgacaggtctgagcccggttggaggaagcgctctggccaagcggggcggaggagagggttttccggagacagcaaggggtgttcagggtcctgggcttgccgcggggtggggtttctctatcctcctggaggaggagatgcttaaagaaacggcactgagctgggggtagtggctcacgcctgtgatcctagcactttgggaggccgaggtaggtgggtcgcctgagcccaggagttagagaccagcctgggcaacagccaaaccccgtctctaaaagaaagaaacaaaagcactgcaaaggcctagaagcgagagaatcttggtaccactcagtctcttcgtaaattgccttaaggtttccttctctgctccgcctcctttgagtgcctcttaatctctcccttctctgctctataagtcattcattctccacacgtttactgaaataaactgtcagtgctaggcaatgctgggaaccacaggcgaatcagacagcggcagatcatgccttcacggtctgagttccctttccataagggagacaaacctgacagcagacagcgatagccgggagagattagaactgaaatgggggaagcaaaggccagagtgttcaggtggacatggaggaagtaggcagcgaggtaggcaggagaggatggggctggatcagggtggaggcctgaacaggggaggaaggggtgagtagcagag

SEQ ID NO: 1560678 - DNA, 4001 bp, Homo sapiens
tgatcctcccacctcagcctcctgagtagctctgcacaccaccacatccagctaatttttgtatttttttgtagaaatggtgttttgccaagttgcccaggctggtcctgaactcctggcctagtgatctgcccgccttggcctctcaaagtgttgggattacaggcatgagccaccacgcccggcctggagatagatctcattgagtcttcacaacaaaccaataattacaccctatgatggggaaagaggctgaagctcggagagaggcacctactttcccaaggtcatatagctaggaaggggtggtgtcagaatttgaacttaaaacagtccagggagtggttctggacctcaagagacctgggttctttaactcctggccctcctggctatgccaccgatgctgggtgtcctggttcaagtcactttgcttctctgggcctcattctaatgatggagctggtggactctgtccgtggaggggtctcctgagaaggagcctccaggctgaattcatccagtaaagctcacccttagctaggcttgtttagggtggcactgaggccccccagtcttttccatacctgcccaggctccttttcctgaaggtaggaaacagagggcagaggaatcagagggccctaaaactccctacattgtggtctcaggcagctgttttactctctcagcctcagtattatcatctctaaaatgagtgttacaggccgggcgcagtggctcacgcctgtaatcccagcactttgtgcactttgggagttcaaggaaggtggatcacttgaggccaggagttcgagaccagcctggtcaacatggtgaaaccccgtttctgctaaaaagacaaaaattggccaggcacggtggcgggggcctgtaatcccaactacttgaccagggtgaggtaggaatcgcttgaatctgggaggcagaggttgcaatgagctcagatcgtgccactgcattccagcctgggcaagagagagagactctgtctaaaaaaaaaaaagacggggagtcataatgatatgtagttcataaattagtaaaaaattaagaagttaataactattagctcttattataattactatcatcagcttacagagttgttgatgagaggtcacacagtcaaccctggcacacacagtaagtgctcaataaaagctctattaatattttttagggtaaatgtggaggttgttattgcattcattcctccctgcatgagaagcaaggttccaatcccagctctactccttatgtgctgtgtggccctgggcaagacacttaacctctttgagcctggactctctcaactgtataacaggggacatttctactgcttccacctactcagtatggtttcaaaagaactgaatgagctcaacatgcccatttgactaccccgttttgagcacccacatagcacagggcatcctgtttcagcatctttgtgcaaagtggctgggtcattatattataacttactattttgcaggcagagccgctctgagaaggaggttggggaagggcattggccacttagcagttgcctactgtgtgtcaggcgttttctgcaccagccacctcctgaatcctcccagaagccccatcaggttggcaatgggatgacccagtttcacaggtggggaaaccgaggctcggagaggcgcctatgtgtgccggaccccggagacctcccaccggccttgacacgggaactgaggtccccgcgtccccgagaaggctgtggccaagggatcgagcccagccgtcccgcccgggtgccgagctccggcctcgaacccggggccggcccgcggactggcgtcctccggccctacctgcaggcccgtgcctacctgatccgcggccgggccgggcggccgcacaggcccctcggttcgcctcggccccggtcccggcccggcccggcccgtcggcgccactagctccgctccggccggcacctgcgtccgggcaccgcccgccgagccgacagcgccgcggaccaatagcgaccgcctctcgcctgcattcgccaatcgccttgcacgtcccgccctaagaggcggggccggaggccacagggacgacttgggccgcacaggccccgctgtgccgcagctgctggctccgcccctgccgcgtcttggctccgcccccagctccggctccgccccagcactggccccgccccagccccgccccaggcacgagggggtgctgctgcgccacctgcagacggccagcgtcctctaataaataaaacctctgcagaatttaacttttttttttttgagactggccgggtgcagtggctcatgcctgtaatcggagcactttgggaggccgagacggaaggatcgcttgaggccagatgttggggaccagcctgggcaacatggtgagttcccgtctctacaaaaaatttaaaaggatgggcgcggtggctcacgcctgtaatcctagcactttgggaagccgaggcgggcggatcacgaggtcaggagatcgagaccatcctggctaacacggtgaaaccccgtctctactaaaaatacaaaaaaattagccgggcgtggtggcgggcgcctgtagtcccagctactcgggaggctgaggcagaggaatggcgtgaacccgggaggcagagcttgcagtgagccgacatcgcgccactgcactccagcctgggtgacagagtgagactctgtctcaaataaatacataaataaataaataataaaataaaataaaataaaagttagccaagtgtggtggcccaggcctgtagtcccagctgctctggaggctgaggcaagaggatcacttgagcccaggagttcgaggccagtctgggcaacatagtaaactcacccacccccatctctaagacagatcaatttttaaaaaaatactgcactatatgttcacttagtataagcacacttttgcacataatcacagtataaccttcaaaatcagaaaattaatgttcatctaatattatcatgtaattcccagagcccattcaaaggccaggtgcagtgactcatgcctgtaatcccagcacttggatcatttgaggtcaggagttcgagaccagcccggccaacatggtgaaaccctgtctgtactaaaaatacaaataattagctgggttttgttgtgggcacctgtaattccagctactcaggaggctgaggcaggagaattgcttgaatctgcaaggtggaggttgcagtgagcggagatcttgccactgcactctaacctgggcaacacagccagactctgtctcaaaaaaaagaaaagaaaagtttccaataaagtcctttaaaaatccaaagtccaggccaggcacagtgagtcatgtctgcaatcccagctctttgggagcccaaggcaggaaggtctcttgggtctaggagtctgagatcagtctgggcagcacagtgagaccccatctctacaaaataaaataaaaatattagccagttgtggtggcatcctcctgtggtcccagctacttgggaggctgaagtgagaggatcaattgagcccaggagttctgggctgcagtgagccattacctcaccactgcattccagcctgggcaacagagcaagatcctgtgtcaaaaaacaaaaaatcccaaatccatcccaggatcaagcattgtattttgttgttaacgactctaatttagtctctctttctggaacattttatcaatcttaccttctctccatgacatcaatatttttcaaaaattccaggctagtaattttgcaggaagtccttccattgctatttgtctaatactttctcatgattttgcatttgtggcaggaaacagatgtgacgttgtgttttcaggatgcatacaatgctgattttgtccactatcgattgtgctaacttggttcaaatggtgtctgccagtttctccagtgtgaggttagtatgttacactg

SEQ ID NO: 1560679 - DNA, 4001 bp, Homo sapiens
tctgtgagggagggatctgcaagatgaggaagggacagatataaatctctctgatggtgtgtgtgtgtgggggggtctgtcggaggtgagggaaacagggggaaggggaacagggacctggcagaaggatttggagaaagccacaaagatcccaggtggggagaagtctaggattgggtggtgggcaggtctttggaagtgatcagtgatcagagacacaggagatggggaggggcctctctgggaagcagtgtaggggcagggggcgcctgggaatggtggaaagtgacaaagccatgggggcagtggaagtcagaggccaggaatccctgggtcttggggaagctcctaggaatcagagaagggggcttctaggagaagtccttgaaaccagagaagggtctggggggcctggaagtatggggtaggaacttcttgggcaaggagcagcccagatgaataaaggctgagccctggggaaggtcaaggggtctagaaatttggggagaaagcttccagcagattgacccaagggaaaagggcttgaaaccagggcaagacgagaggcttcaggtccaggagttttctggaagaaggatctggggccaggccctgtagctgaggaaggcctctgaagctgaggagggggcttccttggaaggccagactcccagcaaggaagggggaggccctggggcaggagaaaggacggtggtttgtggggaaggggtctgagtttggcctagcagggggtccagaggttgggggttggggaaggggctgcctgaagctgagaagttgatagagggcggatgaggcctggagtcagactggtccagggcctagaaataccagcctgggtgaggtgagggcctagaagttggaggccaaggcttcctgggagaggaagagaccagaaagggtccaggtggcatctgggggccccggggtgctgggatctagggacagggctgcttggaagatggggaccaggcctgggacgggagagaccttgaagaagccagaaaagggccggggcccaggagaggtggaaaccagcttcctgccaggggctgcccacaggcgccctgggtgcgtcctggaggggcagagggctgggaataagaggaggggggctcctggggagccggcacccagccccagacagggaaggccggagccagaggcaggactgggccaggccctgctgagagtgccagggccgggccttggggggtcaggggccctgcaaatccgggagggggcgaggtgtcggacgcggacggcctggaggggaaacggcttagcacaggcaagagaagggaggggctcctggaagcaggggaaggggcttcctggagggaacagacccgagcggaagcggtctgcacggggacaagagaggggtcccgagagaggggcgcccccaggggtcgggctgggctggaaaaggtggggagggtggagaggcctggaagtccgggaggggtcgagaggtgacgagccgggtcgggcccaggaaacgagggtaggggctcgcggggcgaggggtacaacggggagaagggtttggcggctggacccagccagggctccccaaggggccgggccccactcaccgtgtccgagttccgatcgttgcccggggccagcaccgtccgcgaagacatcttctccgggtcccggggggcaggggcggccgggtggggggggcgggggtcccagggtcccctctcttcccctccccccccgccggcctggggacgcgagctcaaaagctgggcgccgagaacgcccgggtccgcgcggcgggagagggggcagggcgggggaggggaagggacgccgagggtcctagtggccccgtgcagcggggaccccgggcgccatgggggcggcgggcaggcgggcgggcgggggccgcggagggggcgcggagccggcccaagcggcggcggagggaggcggtggaggggctggggagggaggaagggacgtcagggggaggggcgggcagggcggggcgccgggaccccgccccccgccgccggcccttaaaggcgcaggcccgggctggtcggggcgccgggggctccgggggctccgggggcggaggcgggtctgggcacgccggcggggagcgtgttctcgcccgagacgagaggcgcactggagaggagagaaggggagagagaggccggggcagagcgccagagacgcagagagagagatcgagagacgtagagatagagagacacgaagagagagagacgagttacaaaagggtggagaggcgcaaggagatgaaggaagagccagatgacagagagagagagacgcagggagacagagacagagagacccagagacgcagagggacaaagactgagagagaccccacacacacacagggagagacaaagagatacagagacgcagagatctgtgaagagatagagataaagggactgagccagagaagaccccagaggcgctgcccacattgtccctccccctggcccattctctccccagttggcgggggggagcgggggaagctctcccctcggaggcctaagggtggggtgggtgaaggggatggtgtgcggggcttggccactgctgagggctcagtgacctccctagtcaggctgcctccactcagccacatagatccagacccgcaggttggggctgcagcatccactcctttgcaccccagctggggtgtggggaccctctctgtccacctgtatgacccggggcaagcacttgccctttctgggcttcactttcccagtttgtaaagtgaaaggaagaatccgtgtgttgctcactggcaggtgcgaaggaaccctgtgcaggtattcgcctgcagggcacagccactccccatgcgggcaggctgagaccagagaggacaagagcctctcggaggccacacagcgctgtggggaccatccatgctctgtggaccagggtgggatgaaagaaagacaggcattacatagtcttggcctgggagtcacatggttttgggaaggggtctgtgccctgccttcttctatctgaggcttattttcctgagcctcagtttccccttctaaaacagcagtgtgctggatctggctggagcgagctgattgttatgtctcaggaattttggaactggttgttaaacacagccattattaaaaattaaattatgcaaacatacaattaaattacattaaaggtacaagtaatacatactcatcacgtcctagttatcttactacatttgccattatctgtgatcttgaggttacctacgtctattgtagctgcacagtaaaattactatataatggggggcaaaaatgccatgtgatatcaccttggtagcttgaaattagccatggtgggaatatttacaccatggaaattggcaaatgctacaaattaaggctccacacccccacctgcagagagctgggggtgttttgttttgctttgctttgttttgtttttgagacagggtctcactgcattacccaggctagagtgcagtggcacgattatggctcaccgcagcctggacatccccggctcaagcaatcctcccagctcagccccaccaagtcactgggactacaggtgtgcaccaccacgcccagctaattttttgtagccatattgcccaggctgatctccaactctcaggctcaggcgatcctcccacttcggcctcctaaagtgctgggactaccctgcactcagccaaaagctggttgtgaaagcacagcactgcttgatactatgagcaacacagactcatggcagttgcccttgtgccaggctctgagcagtttctcctttctgccaccccaagaggtagggagcatctttatcaatcccatttgcagatgaggaaacagaggcccaaggaagggagaaacgtcacacgctgaaggtcacacggcaaattagtggcagggctacaatttgaatccaagtgctcc

SEQ ID NO: 1560680 - DNA, 4001 bp, Homo sapiens
ctgcggggaaggtaaggcaggggggccgggccgggccgcagcccagtgagttcttgagccccaccagctgacctcctgtctcagatccccgcctatctcccatccatgtgtgtttggaggctccctgggagggtttctcgaagaaaggtggtgcaggcctcggcaggactgtgtacggcaggggatgtgcatatgacatgtgtgtgagaaactctcagtatggattatgtgtagggcagtgtctgtcatggtgtgatagtcactgtgtctaggtgacaccattggtgatactgagcgtgtctcagtctatgcgtgacattcactgtaggtatccacgtgtggtatccactgtatgaattcaacaatgtgtgacgctgaatgcattctagtgtgatacgtgtgacacaacgtgggtttatcttgtgtgatacaatttgagcatttgtgtgtctatgtgacacagtgtgaaatgccacttgtccataacaatgtgtgctgtaacacaggcaggttgtattattattattttttttcttttaaatcaatgtctcgctctgtcgcccggctggagtgcagtgtgcagtggctcactgcagcctcaaactcctgggctcaagcaatcctcccgcctcacctcaccctcctgagtagctgggactacaggtgcctgccaccatgcctggccaggatgcatgatcccccctacatgtatctatgtctttgtgtggcattctgagtctgtgtccgatactgtccttccgtctgggtgtgacattcaccatgcttgtccatgtgtatgtagcatctattgtgtgaatttaacatcttgtgacactgtgtccaaacatgtcaccacatttgacattctctaggtgagtcttgcaatgtgataacatgtgattttgcgtggttctgtctctgcaagatccctacatctgtttatcctgatgtcagtgtgacatagtatgtgagatacctagatatgacatcgtgtgttgtgacattcttggatgcatggatgggatattgaaacacatgtttgcatcttggatgacataactgtgtgtgtgtggatcgccatgtaagtgacatcttactaggtgtacacgacgtggtgcccctgtgtgtctgtgcatggttctgacctgtggcagctgcaaggctaggtatgtgtggcacctcccagtgtatctgggccactagggctgttgtgtgtatgtgtgtgacatcatgtcctgtgtgacgctgtgtgtcactattttcagtgtaaggctgtgttcgggggggggggttgtgttatgataaacccccccttttttctacccctcagcatccagctcccgaagagggagccccaagcccctccgtccgtcccctcacccacagccgcagtgactgagcatattagcgcgtccaggagcacgcggcatgggggtggggggaggccaggctgcggctattgttctgagggtgccaagccccccagcctccccttcttcctctacccccaccaggctgttggagcccgcagcgccagcagacaaaggcgccacaaacccccagtggcgcagccccctccccccgcggccgtcctctccagcgtgcaagccccccagactcggcccacaccaccccccattcaaccccaaccccggcgggaaggcgcagctggggcacctctggcgcagctggaccgggcgcagcatcccgggccccgccctgcagcagtacccggagcggcggcttttgcggggagggccgggacaatgtctaggggatcgggggtctacctcttggtgcggcggaacatactgccgccggggaaggagggcatcgagaaattagaaagcgcggtccagagagagtcagacatgacccggcggcggcgacatggtggcaggtgcggcagcagcggcggaggcggcggcggcggcggcgcggggagcaagcgcgcggggcggaggctgcagccgccgcagcgggcaggggagggcagggaaggggagggccctgcggctgcagccggccgggagggggcgctgctgcgtgccggcgagccaggccccgcccgcgcactcgcctggcgcccccaccccggcgggagaaggggcggccagcccccgccacgtctctccccaggctcacctgctgcttttccggggcaggggcaaatccttctggaaggcaaaggggcaaaacgatgaaggtcagcgtggacctgccgttgctgcccacaagcattatcaactccctggaggagcagaagcagggtaagacaggcccctcttcagcactgtcactttcacccttggccatgcactgcgggccaagtttcttgggggagaggatccctgggtgattcctctcctgaccctcagagaccaacagaggcccacgtacacaggcggggcgccatataaaggcaagtgagttggcatatcagcgtgtgtttgtgcaaatgaaataggaatcattatttgaaaaatatgtcttgagcacctactgtatgctgacccaatcctaggcactagggacacagtagtgaataaattacaagtccggtgtggtggtgtgcacctctagtcccagctacttgggaggttgaggcaggagaatcgcttgagtccaaggaaacaccagcgtgggcaacacagcaagactctctgtctcaaggagaaaaaaaaaaaagtttctggccttttgggactagtatttatagggtaaaggggacattaaacaagattagtgtagaagtgaacgaaatcattttagacaataattagtcttatgaataaattaaacagggtgatgtgatggacaatggctaggatggagacacattgtcagacagggctgctctgtggaggtgacttttaagctggttgctgaaagataagagccagccatgggaggatctgtggagagagcattccaggtggagggaactgcaagggcaaaggcctggaggcgggaataagcttagcgtactcaatgaatgaatgaaaggttgaatgaatgaaaggttgaaagaatgaatgactcatctacacctcagcagatctatctgactcccagctagagtcatagagttggggtagggggtggggggtaggtaagtagagtgactcacaactgagatttaaaatgggaaccacggaggctgaggtgggagaatctcttgagctcaggaggtcgaggttatagtgaactatgattgcaccactgctggagtaagacaccctctcaattaacaataaataaataaataataaaaagtttaaaaaataaaaaaataaaaatggaaattcaggtgatggccgcatagtcattttttataatgacaataataataattagtgagtattaactttatgtgtctgcatttgaagaaggtcaccttccatttgtcaagctcttaggaagtcactgtagggatcaggagatatggggtcttggcttttttctgaggaaaggaatggggtacaaggggcaacacctgccagccagttttctatccacagggtgaggtggaaggaaggaaactgagtggggctgcaggtggaaagatttgggggagagtttcaaaaggcctttggaggggactccaacaaaaggaaaatgagggatgtcctagacatttctaggatctctaaaagcaaaaagcctaggttcaaatctcaattctgctttttatgaccttggcaaatgaccttccaatagtcccgtgtctccttgaggatcttaggagttgatgcagatgcctagccccttagcatggtgcctagcacatagcaagtgctcaataaatactaagtctggagaacaggcgttattaaggagggacatgctgcatgacagaggatgggccacagcgtcctcccaccccgttgtacaacggacaaacatataggcggggccaaagggcagccctgccctcccgagccacgggtgaccgataatccaaaccaggttttccctctgtctttgcatgaccggagtga

SEQ ID NO: 1560681 - DNA, 4001 bp, Homo sapiens
ccatataaacaggtaagaaaggctacatgcctctgggcctttgcacgtgctgtggcctctgcccggaatgccctcattcagtcggggaatccgtgctcatccctccaccttcgtggagggacgcctgtgctgggttggtttggagaggaagccggaactgcgtgggttcaaatcctgtctgactctgtcacctatactttgtgaaacccggacagtggctatgcttctctgaacctcagtttccccttttgtaacatagaacttaccatcaggaaatgtttgacccccccaccatggaacaggccccacttcttgacgtcagcagcacccccattcgcctacccggaggcggtttctctattttaagaggctgcgggcgggttggcatctaactggggctggaggcgggactgcccccccaccaacaccacgctgctcgccaatcccgccccgccccctcctttccgcccaagtcccccactcttgcctctggcctcagcgcctccagttctgccccacccccgcgcggccagagaccgggtgtctctgatctgcagctcagcccgtgccttccctgaccactcccgacctggcttcccatcacctgctgagttcgcagtcccgcagctaccggtgcggctccaggttggagacccgccggccccattcctctcaccccctcaacccgcccggagctaacctcagtccccgacccccaccccacctgctcagtcctccctaggttccagcttctgtcaacctctttcatttccctaaataccgccccccgctgcaatgcctcgccacccttggctgcctcctctaccccagggctcccagcaatgactgggtcaggcgcctccttcacttgctgtgagtcccttatcacaactgatcactccgtggggtcaccgctgctctggcgtctacctcccccaacaggttggggtttctaggagggcagctccagaggttgcagaacactccgctgcctctccagagccaggcacacagcaggcgctccataaatgttcgttgggtaagtgctgaatcccaggttccctacctgaaaacttggtggcttcttaagggtgtggtctaagtcccagaggaaaatggccaaatcttaattcctgtttttcttttcttataatggggacactgaggcccagagaagtcaaagggtggctgcccggggtcatgtagtccctgtgtggcttcaaacttaggcttctgctgtccccgacgcctgtgtccctacctcctgatgacacagcctcctaaacataaactcagtaaaaggaggaccctatggctcattggaaaactgaggcccagagaagcaagggtgccctccccccaggtcacactgctggttggcagcgccttgtgccgtaagagagctggttgagggcgcagatcgaatcccagctaggcgacctctggagagtggctttccgggactagagcctcagtttccttattctgacaaatgggcgcctgacagccccaacctccccaggtcgtcgtagggctgagctgagggtgtacagtggtgcagcgacgacccaaggaggtattaatacatatgaactcatattaatacatcgctagtaataggactaaaacaaccatgaacatatggtgagctctctggctgctgttgctagcattattattagaacagctggtggggaggggcagagccctcagcctcttcctcccacgccatcgcttggagcctcagtttccctagatgtccaagggggcaccttcccccttcccaccatgagaaaaagcactttgagaagcgggtggtcaaaaagaagcgatctgagcgttccccaccctctgcctcagtttccctacagcccgtgaaggccccgcccctcccggcacctttcaggccgcgtccacttggccgcgccctctgccttccgcccgcccgcgcaggggcctcacctggagcccgcggcgccgcaggaggctcgactcgtccatggcccgggagtccgcgccgccaggcccgcccccggccccgccccggcctgccaggccccgccgccaggtgccattggccaggccggtcagctgacacggcctggccccgcccctcccggggagcccgaccacagggccccgcccccactgggcgagctggccccgcccctccagcagagcgcagaagtaaatattttgcatgaatcctctcagaagtaaggcagcatcgttcagccccattttgcagatgaagaaactgaggctaagataggttaatcaatatgcccagcgcattggccgggcgcagtggctcacgcctgtatcccagcactttgggaggccgaggtgggcagatcacttgaggtcaggagttcgagatcaccctggccaacatggtgaaaccctgtctctactaaacaaaaaaaaccaaaacaaaacaaaaaaaaaattacttgggggtggtgacgcgcgcctgtaatcccagctactcagaagactgaggcaggagaatcgcttgaatccaagaggcggaggttacagtgagccgggatagcgccgctgcactccagactgggcgacagagcgagactctgtctcaaaaacaaaaacaaaacaacaacaaaaaatgtgcccagtacacacagcagaacgggttctagggtgaggcgagtgaggatctcacccctgtgcaaaatttaaggtggccccacaaaactcagccatcaagagaaataatattttaaaaacataaaattaatgaaaacatttatgatgaacaaaacatcaaaacttttattttttattttatttttagagacggggatctcactatgttgcccaggctggtcttgaactcctggcctcaaaagatccttctgcctaggcctcccaaagtgttgggattacaggtgtcagccaccgcatatggccaaaacaccaaaactttttttttttttttttaatttatgagacgagtctctctgttgcccagactagaatgcagtggcatgatctcggcaacccctgcctcctgggttcaagctattctcatgcctcagcctccctagtagctgggactacaggtgcccaccaccacaccaggctgattttttgtatttttggtagagatgaggtctcaccatgttggccaggcttgtctcgaactcctggcctcaggtgattcacccaccttagcctcccaaagttctgggattgcaggccaaagagttttggtgttttgcctggccaaaacactaaaactcttaagacatgatcagacccttgtccttgcaccactcagccttgtttgcctccctttaatcctggccctggtgccaataaaactttacttacaaaagcaggtagccgctgcagttgtcagtttcttttttgaggatgattgcctttttgccctaagtgtctcataaacaccatctctcacagatatttgaagataattgttctactccattttgcaggaggggaaactgaggctgagaaaagcccaaagtcccaaaatagcacccacatttaaaaaaaaattttttttttgagacagggtctctctctgtcacccaggctggagtgcagtggtgcaatcttgtctcattgcagcctctacctcccgggctcaagcgatcttcctgcctcagcccccataccccagctcccagagtaggtgggaccacaggcacatgccaccatgcctggctaatttttttgggttttttttgtagagatggagtaccgccatgtttcccgcgctggtctcgaactcctggcctcaagtgatgctcctgcatcagcctcccaaagcgctgggactacaggcatgagccactgtgcctggcttagcacctgcattttttctttccctgggactcgcactttctctgcagccgcagttgtcttcggctgccccactgtacagtgtggacactggagtatgctttcaggctcgaggggaccctaggaagggtcactgggcctgactgtccatg

SEQ ID NO: 1560682 - DNA, 4001 bp, Homo sapiens
cctgggtgacagagcgagaccttgtctcaaagaaaaataagatgtgtcagccgggcgcggtggctcacgcctgtaatcccagcactttgggaggctgaggcgggaggatcacgaggtcaagagatcgagaccatcctggctgacacggtgaaaccccgtctctactaaaaatacaaaaaattagctgggtgtggttgcaggcgcctgtagtcccagctactcgggaggctgaggcaggagaatggcgtgaacccgggaggcggagcctgcagtgagccgagattgtgccactgcgctccagcctgggcaacagagcgagactccgtctcaaaaaaaaaaaaaagaaaaaaaggaaaaaagaaaaataaaatgtgtcttgtagggtcatgagaagaattaaattagataataagcacacagtaaataggtgatgaatcaatgtcgttataataccaagtgaagaaaagcaggaagcaagatggtaaaaatgacccacccataaacaacagggcattaaagaatagagagcaggatggccgggcgtggtggctcagccctgtagtcccagcactttgggaggccaagcactttgggaggccgaggagggcgaatcatctgaggtcaggagtttgagaccagcctgaccaacgtggtgaaaccccatctctactaaaaatgcaaaaattagctgggcgtggtggcaggtgcctgtaatcccagctactcaggaggctgaggcaggagaatcgcctgaacccaggaggcggaggttgtggtgagccgagattgcgccactgcactccagcctgggcaacgggagcaaaactccgtcttcagaaaaaaaaaggaaaagaaagcagaagggaaatggagtgttcacagtagctgataattttgtggttgttttgtgattgttttgttttccttcttccatttttctggattgtccaagtttttcataatgggaaaaacccaattcatgagtaaaaacatttatgtggaaaaacacatgtaacaaaatttgccatcttaatcattttttatttttatttatttatgtatttttgagacagagtgtcgctctgtcatccacgctggagtgcagtggcgcaatctcggctcactacaaccttggtctccaggttcaagcgattctcctgcctcagcctcctgagtagctgggattacaggtgcccaccaccacgcccggctgatttttgtatttttagtacagacggggtttcgaactcctgacctcaagtaatccgcccgcctcggcctctcaaagtgttgggatgacaggcgtgagccaccgcgcccggccgatgcttcctaatgcatttcgtttgcaaaatttgggagtgaccgttttctacccagaggtggcttctccaccttaaccaggaaagcgggtcttaatccgatcacctgagacaccttctcagtcccagaagctaaactagggaggcatcccgggacaagacgggcaacaatcttttcccaaacgacccccgagcctggccagggagatgctgcctgcaaggctgactgtgactgggccgggggactcagggcatcttagcggccgcctctcgctcctgtccgtgaccttgcagatgcaggtgacagcctgcccttccgtttttgtctttccagtcccgcctgccggattgggttccagccctgcccacacgcccggtacatcccgcctacactcaccgatgtcgcctagcaacccggctcgcagctagcatccgcaaccgaggtccccgcgctccagttctctggcggggagggagaggggtgttgcttctccagccccctgcagcctggtgtcttcctgccacccgccggcctgctccgggaaccgcggcctggtgggacgagggttgcggaggacgggtcaggagcgaccgcgtttcaggcccgtggactccgcagcccagacggtccatccatctgcaccgaatcccttcgctaaccaactgcttgattttgctgtcgcgccgcctaaacttggttttttggagttgctaggagggccgacttaactctttgtcagccgggctggttttcacccacctggtggcaggaatcctgtttgccttccccgggagccagggatgggaacgggaactgtgggtgggaggcttccgagagccgcctctcccggggcataaggaaggaagcggggctgcaggtaccgcctggggttcacagcaggggacgaggtgcctcccaccaggggctgctgtgatcgccaggcctgccagggtgtgccccttcccctgtcccttccctctgtccccacagccttggctggagtccctcaccggtaacgagacagagacaaatggtgttctctgtctttctgagacagagttttgctcctgttgcccaggctggagtgcaatggcgtgatctcagttcaccacaacttctgcctcccgggttcaagcgattctcctgcctcagccttccaagtagctgggattacaggtgcccgccaccacacccaactaatttttggtatttttagtagagacagggtttcaccacgtgggccaggctggtctcgaactcctgacctcaagtgatccgctcgccttggcctcccaaagtgctgggattacaggcacatgccactgcacccggccgacaaatggtattctcataaccaccagaaagagacacgtcctctggtgtcagagcgtggctctgagcactgagaccgactcagttgctagcgtccacctggcctgcccgagatctgggaatacagtggtgatccaattgatggtgagaggcttcctgacaggcagagagttcacattctcaaggggaagacagataccaaatcgtttcaaagatgcatggtttaaagtcaaggaataggccaggcgcggtggctcacgcctataatcccagcactttgggaggctgaggtgggcggatcacctgaggtcaggagtttgagaccagcctggccaacatggtgaaaccccgtctctactaaaaatacaaaaaattagctgggcgtggtgatgtaggcctgtagtcccagctactcgggtggctgaggtggaataatcactggaactcaggaggcgaggttgcagtgagctgagatcgagctgctgcactccagcctgggagacagagaccctgtctcaaaaaaaaaaaaaaaaaaaaaaggtggaactggaattgacaagacatcctcatggattggccgggagcacagaggaatccaggaggcctccctggttgtgctggctgtcaccttgagccctgggcaaatggcggtgctgctgccgcgatgctgacggagagaggggctgtgtgtggacggagtgtgtagcaagggagtgaagttcccaagaaatctgggatagagtggaaagcaggagagagggtgtgaggtggaggaggacggtggcctagaggccgcctgccctccggggaggcttaaccagcaattcctgttgctgacagataatccctgctagaaggggacccctcggtggctccccacccccctcctttggcctgggcctgaaacagcggtccctgcacacccagcccctgccactcccgtcccgccgcccccaccctgcatctgcctcctcccccaccctgcatctgcctcctccccactctgctccccgcctgccccccgtcccaaacactgccagggaagccctgtgggctggaaactgtcacgaaactcttccactgtgaccaggtctcagcatctgaacaccctccgcccgccttctgagggtttgggaatgtggcgggggaagcactctgtgggcagaggcatctctcccaaactcagcgtagttgcctcctcctccaggaagccctcggggagcctccagagcatctcactgtgtgtctctaggatggggccaggggaaccctcaaggaccgaggcagagagctgggttatgggaggcgttgagatgaatgattctcagccggtgtgtctgtgttcc

SEQ ID NO: 1560683 - DNA, 4001 bp, Homo sapiens
tggtgatacactgggtgcccggggcccagcgcctctgcagagggggccgggagaggggcaaagggaggacatcacggagatgtggggagcagaggcacgggaggggaaagaggacaggagggagaaaggtatagagattggaaaagagcggagaggcagagaaaacagacgcagacatcgggggaaagaaagggggagtggggtgctcagagagaaatcgtagagtcacaaagagaggcggcctgggacagaaggtcaggaagccaagatgactgagaaaggccaggccgaggccagcagaagggggtagggggcagagagtacagcccttcaggaaggggtctcagggtgtggacggagttgaagaaggacccggggagcagaggaagcaggctagacacactcaccgttggcatcctggctgagacgggaggggggtgccaggctcggaggaagcgggggctcacctggggaggggacagagtccaggtgggagctgggctgggacccacggtccagttcctaccacttccagcccaggtcaggtgggggcgatggctgggcaggcagagagagcctccccagaggcatcctggatgggacccagaactggctccccaagcccctgtggggaagtgatctttacccggggaagttcctcagcagaatcacagccgtgaaatgcccgccaggaaaccagagagcctcgccccgccatcgcccccagagggaaactgaggcaggtgagaggcacactgagcaagtggtcacagtcggggacgctgggaatggcctgccacaggccagtcggctggcacaggaggtagggagctgggtgccactggaccgagcctggttcttcctgttttctggttggtaggcaggggcagggtggggaaatagggatgagtcaaggtcattcccaagaatctctgaccgtggggtggagctgggggcaggggcgggtcctgtagccctgctgggctcctccggccacccgctgagcctctctgatccccccccaaacccaggacagacacacaaagtcactcattgctgcaggggtgggggagcctccctgcctcccccatctccccgaccgctagtggctgggaagtgggcggtgctggggggtgagtctcggcccctccaagatgcgcctcccatgaaatcctccagtcccacgtgtactcacacgcatacggatgcatgcacacgcacagaaacacacagggctcggacacagctgcgcgcagacaagcaaaggaccacgtccacgtggaaacaggtgtgcgcacacgtccccgcgcatccgcgcgcacaagcgctccacacctgggaacgtgcgcacctgtcccccgcccccggcacacacacagccgccccacactggaacacctgggcgccagcgccgggccactcgggcacgcagggcgctacgcagggccgcgcacacgcttttcggccacacgcgcacagccctccacgtggacgcgcgggtacacacgcccggggctcgtagccgcgcacacccgcacccaggaaaccccagccaccaccacgcggggtccgatcgcctctgagcaccctccgccccagccgcgcacccgctgcgcgcccgggacgcgcacactcgcgcacacaccggcccttcctgcgcacgtcccgggcccacccccgcctagagccctcggggtttccccccaccccggcctcggggtctctccacgtctccccgccgacgtgctcacctgctcagggggcgcccccgagccgcgccccgcgcccgcccccaggagggcctccgcgagccggctgcacaccccgaggcggtcccggctgcacaacttggagcgagttgctccgtttcctcattttgggggcgaagaagggtcggggagtgggggaaagcgggaggcgccgcggcctgggaggcccccgcgggtcctagcgccggccgcactgcggtctcctccgcgcgccgccgccgccgccggcccctccccgccccgcctccgcggcccccggcgcctcccgcgcgccccgggcggggtcccggggcgcacgcgggctccacgcctggccctgacctggccctgtcgggcgtgcaccccccacccaccctgggaagcggggttcttggagcgtggaacgggcgccgccagtgcgcgcggcggggaccgggggtgagggagagtgagctgcccgtccggggagataagcaaggcgccaagcccggactcccagaggacacttcgtactctgcaattccaactccctcagtgtcgcccatttgagcacccaccgtctcagagggctattggtggttgacaaaaaaaaagctttcaaaatgtcagccgctatcaatatcattatcataatcatcaacattaagggaaaattggagtaacagaatcatcgggaactgtaatcatccggatgcaaacttcttagagctgccctccttggagggtaaaaggggggcctgggagttggagggacctggctctgcccgtaggtaggaggtaccccttttccagccgggatttcctcccccatatggagggtgggggccccacccgctttcacctcacagaacagtttgatctcacttggtcttggtggacagggccctggcccccagcgatggctttgtggttggggtgaccaaaacgcccaatctgctttcacccaatgcaggcctttatctttatttttattcatttattttttgagacagggtctcactctatcccctgggctggagtgcagtggcgtgatcatagctcactacagccttgaccacctgggctcaagccagcctcccgcctcagcctcccgtgtagctgggaccacagggtaattttttttttcccaaattttcatagagccatagaaggggtagcctcaggagggggtgagttccctgtcctgggaggaatccaagaattggccactttgcctttttttttttttgagatggagtcttgctctgttacccgggctggagtgcagtggcgctatcttggctcactgcaacctccacctcccgggttcaagcaattctccttcctcaccctcctgagtagctgggattacaggtgcgtgccaccacgccctgctaacttttgtatttttatttttatttttttgagatgaagtctcactttgttgcccaggctggtcttggactcctgggatcaagcgatcctcccatttcggcctcccaaagtgctgggattacaggcgtgagccaccacgccttgcaccttatcatcctttctaagggatgagtcctctgaaacaaagatgaagttcatcttaggagggcaatgaaccgagatgcccaggtggcctgcgcccatatttaatcttctgttaccccaaaaggctgtgtgtctggacttgggggcatcacatgattttgcggggagcagaggcccagttacaagagaattacagaacagctatattaaggaacattatgcagcagactaggaaactatattattattattatcattattagagctgggggtctctctgtgttgcccaggctggcctcaaatgcctgggctcaagcgaacctcctgcctcagcctcctgagtagctgggactacacgtgcacaccatggtgcctggttaaaccatactattatatatattatattattaatatttatattatattatattatattatattatattatattatattatattatatacctggggcatccaggatgctctctcatctcaatagcatcaacttaatcccatctgtaggctgggcccagtggctcacgcctgtaatcccagcactttgggaggccaaggcgggcagatcacctgaggtcaggagttctagaccagcctagccaacgtggtgataccccgtctctactaaaactacaaaaattagctgggcgtggtggcacatgcctgtaatcccagcactttgggaggccgaggcgggtggatcacgaggtcaggagtt

SEQ ID NO: 1560684 - DNA, 4001 bp, Homo sapiens
aggcaagttgttactagctgagggtgggcttggatttacctcagattaatgagtttttaaaatctgagttgattcttttcaataattttctattcaagcaggacagagctgggtaaaaggtaaaagggaggcaggggtctgacaggatcacagcgctgctgtgagaaaaaaacgactccacagcctgaaattttattattttttccttattatcttttttttctgagacagggtttcactgtcaccaaggctggagtgaagtggcgtgatcactgctcactgcagccacgacctcccggggcttagctgatcctcccacctcagcctctggagtagatgggactacaggcccgcgtcagtacgcccagctagtttttgtattttttgtagagacgggatctcactgtgttgcccaggctggtctcaaactcctggggtctagtaatctgtctgcctccgcctcccaaaatactgggattacagacataagccactgagcctggccctagaaagtttattaaaggggccgggcgcggtggctcaagcctgtaatcccagcactgtgggaggccgaggtgggcagatcatgaggtcaggagatggagaccaccctggctaacacggtgaaaccccatctctactaaaaaatacaaaaaattaggcaggcgtggtggcgggcgcctgtagtctcagctactcaggaggctgaggcaggagaatggcctgaacccgggaggcggaacttgcagtgagccaagatggcaccactgcactccagcctgggtgacagagcaagactccgtctcaaaaaaaaaaaaaaaaagaaagtttactaaagggcagaatgacagccactctcccgcattctttgaggcaccaagatgacacaaatcaagttgggtcaggggagggactcactctgacggaagaggatggactgatggatggtagaagtcaccagtggatggagaaaaagcaggagctgcttttagttcccctaatactgaaactgaacagcggggcctggaatccagaacccctgtttctcctcctcataggcctcaaatgaccaactccagactccgggtctcagcttccctcgtacgacaccaggcattattgatgggggcacaagaccctccaaaaaccacgattaccaaacttctgtgtccaaggagaatcatgcccttccaggttcctgagagaccagacttcagattcccgggagaatgccaggggtctcgccttcgccaacccctaccccaagtcactttaggtggaagcgtttggggctgatgctccggaagctgaaccaggaggagctaatagcttcaggaccctgtgatgtccccatcgccaccaacaggtgggatcctcctgaaaaccagacgatttgcggatcctgttgctcccaataacaggcaactttcagagtacggtgacggggctcctggagccctgtcaccagaaacgggaaataaggcgtggggggcgaggctttcgtgtcccttgagaggctggtggctttggggtccggcagaggcgggtgggggtcctgcggctttgacggaggtcgcgcccccaggtcgccgaggagcggccccccacccgccgcggtcgcgacccgtcagcccagatcttgcaaggagcccgcgactcctccctcgcggcccggcccgcgctcaccgccttctccaggtggctgcgcgcctgctcgctgttcttggtgtggtgatagagaacggagcccagctgcaggtgtgtacgggcctcgatgcgctgcggcggcttgaaggggaacacggcctgcaggcagtgcacgcacaggcggattttgggcgggctggaagtgcggaagtgctcagcgaagcccagaagcgccaggtaccacgagtcggccgcctcggcctgcgcagcctgggccgccgccgcctgggccgctgccgccgcctgagccgccattttggcctccacaacaacaagccgccgccacagggaggcggaagcaggcgcgcgagacggggccgggctctcctcgcggcttccgcgagatctgccgcccaaagcatcctggaacatgtagtttgtatttgggatgactgccgctccgggaaggtgtaaaagggcgacgccgtttggttatcgtgactgggacttaggcatcgctgataggctgaggcttccgtttctggaggttaaaaaaaaaaaaacccagtcgttcacgcagtaatagggcgagtctgaccgaggcggactacatctcccatcaggcgatgcacactataacagggccccttaaggggcgccggagcattgtgggattggatgagtctcaagatggacaaccgggatgttgcaggtaacagcccccgcctcctctcaggcggccgcctgggtccctggggctaggtgtctcccctgactcctcgggtccgtcctgctgcgacccgtggatccctcgcttcagccccggggcagcccacagcgtcggcttctgcacctcttggtttctcgagaccccagacccaggttgctggccgcccccgcttggtttgctgaggacgcacggatctccgtagaggccgccacccggctcggccctgcgtcccgtttccgaaacaaccgccttcagggctgctccaacctccgttccccaatacggcgacaaccttgggctgtccctgcacccctcttttcgtcgcagctggcctctggcctgtgtcccgctttctggaaaagctgcttttccgaagtgctttgaggctcccttgacacactttcccgcgtcttttgaccctcactttgctgcaagccttggcctttctgcttccccagaatagaatgcatttacccatcagcagatacttagggcgtgctcactgtgtgccaagcagtgtgctgggcgctacgcatgcagcggtgaccgaaacagggccctgccttcctggaggttgctttctactggggtgtcagtgcattaatgagaaaatatttacaaaaacttacgtatgatgtgaggttacgtatgatatgatcagagtggaggcttctgatattgggtagtcaggaaagaccttttctttctttctttctttttttttttttttttttttttgagacagggtctcactttgtcgcccaggctgtagtgcagtggctcactgtggctccctgggttcaggtgatcctcccacctcagcctccctagtagctgagaccacagatgcgcgccaccacacagcgaatttgtgtgttttttgtgttgccacgtttcccatgcaggtctggaattcctaggctcaagcgatcctcccatctcagcctcttaaagtgctggggttacgtaaaggtgtgagccaccacacctggcccagggaaaggccttttcaagcagaggacatttgagttaagacaatgaatgccagctatgggaatccctggagggtggagccttccacacagaggggggccagtaaatgcagaggccctggtaggatgggcttgtccttttgaagaatgtcaaggatgaagcagaagggaggggaaccatctggcggggccttgaaaatggccttttagaattctttttttctttttgttgaagcggagtttcgctctgtcgcccaggctggagtgcagtggcacgatgtcggctgactgcaacctctacctcccgggttcaagccattcttctgcctcagcctcctgagtagctgggattacaggcgccggccaccgcacctggccagtgtttttgtgtatttttagtagagacggggtatcaccatgttggccaggctggtctcgatctcctgacctcaagtgatctgcctgcttcagcctcccaggtgctgggattacaggtgtgagtcaccatgcccggctcagacttttaaaatttggattttattctgagtcccatggggaacctctgaggtgtcttccctgtctccatactatcaccctagtctgaagacatcattgtctgttgcttggagcca

SEQ ID NO: 1560685 - DNA, 4001 bp, Homo sapiens
aaagtgggcaacatggcctgaactctccccaggcacccccaacagaaaacgcagtctgggagcctgcagcctcagatgaagggctgggttgaggccccagacctgcagagggcggctctgggctgcctggcttcaccctctgcagagaaacctgaaatctctagcctgtagaggagcttctccctgcttttctccactgctagaccctcatgctcagggccagggcccagagtgggaatgagagaggtggggtgatgacagcctcaggatactccgctcaagctggccttggttctagctcccaagctgcagccacctcttagggggttcctgctgcctggacgcctctccctgtcactcaatgtcacgtcctcagagaagccctccctgaccccagtctcattcaggccccgtcatctgccctcccagatttcagcatgtgtcactgcagatctcaggacgtgtacagggttccagctcataagggtacacatttggggaccaagtttcccctctcttgctgtcctccaactttccaggaaccagtccctgagctcctcctgcaggacgaggccccacacattgcttctgatcacagccatcctttccccgctcacttttctcactttatctccccaaaccgggacagtcaagaaccacagaggaccgaagtgcacagtggacggagcggtcgttctgcccctccttggctcgtggaaaccacccgccctcacctgggcggtctcctgcccacgaccccgagctgtgggaaaaagggggaccagccgcacacccccctttacccaggtgctcggcacatggcaggcgtcctccgctttcccctcctgggggacctgaaggcgccacgggacactgaaccaaggggagggcgcaatcaaagctggcccagaatcaaaagcatctttcccgagccaggaaaaaaaaaaaaaagaggacaaacagcaggtggccgactgtctgggacttggctgcagcaggcgactaagtctttgttccacggagggggttccctgcgacctttcagagcagcgccttgttccaatttggggacgggggggtctctgaaagccttccaccaccagtaacatccacgcaaagactaccgttaggtgggctcggaaagtcgaaagcctcaggtctccaccctgagggggccacgacccaagaggaccagaggcctcggaaggagtcaaggggaatacctttaaaaaaagcaacgctgcgtgggagaccagtcaccctgaggcgcttattcccaggactggggcgagcccaagaacccgtattttcacgcacgccctccccgatccgcccatgagccctgctccccgaaatcccggctggccaccccctcgggctccgcgccaccccaggagcgccccaagaaggcaccccctgcgtctcacgggaaccaaagggacagcccaccctccacccctgccccccggtagcatctggccgccgccaggcgcccctggcccagcgcgcacgaacaaaggccgcagtcgccgtccggcagccagtccctgaacggccggccgaaagccatgcggcccaacaagcggcgcacgcgcactgggcctccgcgcgccgggcgcacacgcacgcaagacgcacgcacgcacgcacgacgcacgcgcggggcccaggccgcggcccggggcaggggcgccgaggccgccgcagaggccgctgggaggagcccgttgaggccctgcgcggccggcgcgctcattcacctatagtaaaagacatccctgtggccggccgacagccccgaccttctgggcacttcttccctctcccagccctgcgggagcgccgggcactcccacctcttccgctccattgcgcccggctcctcggcccgccgccgggcccgccgccgccgcccggacccccactcgccgccgccgcctcagctgcctccgctgccgctgccgccgccgccacttgccgcggctgttccggcccgcgggcccccgccctccgcccccagccgggcgcgcgccggctttgccgccctttcggccccctccccgcgctcgccagcccccgctcggggggcccgctccgcccacccgcccgcgcggggccccgcgctgcgcagccgcggcgccatgcccccgcccctctacggccccgccaatcagcgcgctgggagggggcggggccttaagtggcgtgcgcgcctgcgcgctgtgccttgcgagctgccagtgcccagcagctgtgcccggagtccgcgcggctccttttactgtgccctgtctctgccggccgcctggtgcgcgtgcgcggggacatgctttcggactagtggggtcctttcctccgacctttctccagcccaagtcttggggactctggcccagtgactggacctcgacttccccgccctcctggtctcccagcttccgagctttttacgagcgtccaaatctgggggacttcccccgtgaccaccccttccacgcccccaagttccctccagtagcttttttttttttgagacggggtctctgtcacccaggctggagtgcagaggcgcgatcttggctcactgtagcctccgcctcccgggttcaagttgttatgcctcagcctcccaagtagctggttccacggacggctaatttttgtagttttagtagagacgggatttcaccatgttggccaggctggactcgaactccttacttcaggtgatcagcccacttcggcctcccaaagcgctgggattacaggcgtgagccactgcgccccgtccagctgctttttgaaccctcaaaatccaggaatctgagcacccccccccagctccccgaccaccccctgcaccttagtccagccaccatctctggccgggagagttccaggaccttcctgcggaatcgcccaccccctgttgtctccccttaaccccttccccagccagccagagggatcctgaaatggaaacgggtgggctgccccccatcagttccccctgacagcgtcgctcccaaggctagggctgggcgggcctgcacaggtgttcaaggactgagtctagctgctgtgctcccctgcctccagctggagaaactgtcctggttctaaggactcttttgttgacattgggtccacccgatctgggatgctttcccatctgaagatctcgtcccattttcaaagtccctttagctgcaggttccagggagtaggacaggcacattcatttattgattgattgactgactgatggagacagagtcttgctctgttgcccaggctcgagtgcaatggcgtgatctcggctcactgcaacctccacctcccgggttcaagtaattctcctgcctcagcctcccaagtagctgggactacaggcgcccaccaccatgcccggctaatttttttgaatttttagaagagatgggatttgaccttgttggccagctggtttcgaactcctgacctcaagtgatccgcccacctcggcctccctaagtgctggggttccaggtgtgagccacagcggccgacggaacgggcacattttcgggatgttgtgctgaccacagaagcactgaataaatcaggatggatgggtggatgatggtcggatgccccgctcaccccacctcgtcgtgaggtgaggtgaggtgtgagacagccagctctgtctcccgagaagctcaggagctggttactggcctgagaccgaggccccatggcattgggctgccatggaagaatcagtgctcccaaggagacaggaaagtctatgctgtggactcaaagccaggcagttacaccccagaaccagccgtggtacctgactagggcagccagagcaaggcctgcccccatgcaagggagatgataattatgttttgagacagggtttcactttgttgcctaggctggagtgcagtggcgtgatcttggctcactgtaacctcctgagctcaagcaatgtgcctgcctcagcctcc

SEQ ID NO: 1560686 - DNA, 4001 bp, Homo sapiens
tgatggatttaccagtttctgagattgatgtgttaaaaatgatagaatactggccaggcatggtggcccacacctgtaaccccagcattttgggaggctgaggtgggaggtttgcttaagtctaggagtttgaaaccagcctgggcaacagagtgagaccttgtctctgcaaaaaatagaaaaaattagccagatgtaatggcatgtgcctgtagtcccagctactcaggaggctgaggcaggaggatcacctgagtccaagagttcaagactgcagtgaggttttgtttgtttgtttgggttttttggtttgtttgttttggggttttttgtttgttttgttttttggtttttgttgttgttgttgttgttttgtgagatggagtcttgctctgttgcccagggtggagtgcagtggggtgatctcggctcactgcaacctctgcctcctgggttcaagcgattcccctgcctcagcctcccgaatagctgggactacaggtatacatcaccacacccagctaagttttgtattttttgtagagacaggtttcaccatgttggccaggttggtcttgaactcctgatctcaagcaatccacccacctcggcctcccaaagtgctgggattacaggcatgaggcaccgcacctggcctgcagtgagtcatgatggcaccaccgcactccagcctggactacatacatacatacatagtaaataaaaatgagagtataacatgaaaaagaaaaaatctcctttccctgcccacctgaaacccaatctctcacctcaaaaagaaattattgtctttattcccttgtgtcacacaaaggagtgtaattttttgttttgttttgttttgtttttgaaacagagtctcaatctgtcacccaggctggagtggagtggtgcaatctcggctcactgcagcctctgcctctgggttcaagcgattctcctgcctcagcctcccgagtagctggcattataggtgcctgccaccatgcccagctaatttttgtatttttaatatagatggggtttcaccatgttggccaggctggtcttgaactcctggccacaagtgatcacccgcctcagcctcccaaagtgctaggattacaggcatgagccaccgcaccctgttctgagcttacttacttaggtgctcttaggtgctcacccagcctaatttttttttttttaagtattggcatattttaaagtttcaagagcttaaagcaaaaaaacctcattggggacactgcaaagagatgttaataaaggattacactttatttcatctgcactatcttccctttttttcttagcgtttttcaggacggccttcttggtctctcactttctctgcctcattagcgagtccatccgcaatcagtgctattgcgagtctctctctgactgtcttcactttcccttcctgtttcctgatatcttcctcagtaaccagaaattgtttgcagaggagctgcgagatacccactccctctgcaggaattatctccaccgcatctgaagagcaggcaaggtggggcatggggcaggagtgctccagaccactggcaagatcctccagcagagatccacctgtgtaactagggacaagtttttgcaaggtattggcaagatccaaagtgcttgaaagttctcctgcactgctgtaagcctggagtccctgcagtctcctctgccagcagacctgctgaggcttctccaagctctcctcccattgatggtatctgacctcattgccaggatggggtgtaattctcgttactggcctcttgaatgtgtaactggacattctcaaagggattgaggtgctcaagccaggctttgatttgcattggtttacacagtcacgttgcttcctctgtgaactcttggccatcacacttcttttcctcttacactattaaaataaatcatgaaatggggtcaaattgatcaatgaagcctgccttctcaggacaaggatctcagctgttctggactttcatccttcctctctccctctggggataggtctgacctgcttcctgggacatcatcaggcagatttgagtcaagcacagaaagttcaaggtcaaaatctccttcatcatcctgcaaaccccctccttgtttgagtactattttattctctttctgcccttgtcactcttaaatgctcaagtcctgatactccctctcatgacaaatatgacagtctttttctaaatctcaaatcttgccttttttttttttttttgtcccactccgtcactcaggctggagtgcagtggtgcaatcacagctcactgcagcctttacctccccaggctcaagtgatccacccacctgaacctcccgcgtagctgggactacaggcgtgcatcaccatgcctggctgtttgtggtttttgtagagacgaggtttcaccatattgtccaggctggtctggaactcctgaactcaagtgatccaccccccctcgacctcccaaagtgctgggattacaggcatgggcgaccgtgcccagcccaaatcctgccattcttatgcattacttgactattcatctgtttaacacattgacctcttggtttgcacagttcctgcagcttgtaagtcaataatgaaattatcaactgctctgctctttgagccttaatcccacaccccagacattttcagcaacccaaacagccatgctcaaaaataaataattctgacccagcacagtggcttacatctgtaatcccagcactttgggaggccaaggcaggcgaatcgcttgaggtcaggagttcaagaccagcctggccaacatggcgaaaccccatctctacaaaaaatacaaaaattagctaggcatggtggcgggcacctgtaatcccagctactcgggaggctgaggcaggagaatagcttgaacccgggagctggaggtggcagtgagccgagatcgcaccactgcactccagtctgggcaacagagcgagactgtctcaaaacaaataaataaataaatcggaaaacttattcacccactataaatttctgatttccaggttttttaattcaaatgcccataccatagatacctgttcttgatgaacataccttgaggagcaagtatctgtgatttgggtatttgaattactccggacctccgtatcttcaccttcctctctctcctctgattcctagcactcttggattctgtggtctgcgacctcaatatttcccttagaggccgggcacggtggctccacgcctgtaatctcagcactttgggaggccgaggtgggtggatcacttgaggccaggagttcaagaccaggctggccaacatggtgaaaccccatctctaccaaaaaaaaaaaaaaagaattagctgggtgtggtggcgcacacctgtagtcccagctactcggaaggctgaggtgggagaatcacttgaacccaggaggtggaggttgcagtgagcagagatcacatcattgcactccagcctgagcaacagaatgagaccctgtctaaaaaaaaaaaaaaaaattcatttagattaatccaaaattccttaccacttatcacacctgccttgtaaaacttcaaacttggaaggtccctgttctctgtgacgccatggctaccaccgtcatatgatcactgctgaaaaaagaatcacgtgacatgacgtcttagtgccactataaatacaaaatattctccatcaactgggaagaatccatcatgcgtagaaactttattttctgtgtatgcactgtcatgtttactccttgattttccccaaaacctgttgcaaaattttctccagctttcttttttcctcatagatatttaattctccttaacttacctgatggttcccaaagacgttagttgccaaatctgcaaatatccctgataagcattgaatgtttccaaatttcctttaattgtatttaaagagatttcctgccaggcatgg

SEQ ID NO: 1560687 - DNA, 4001 bp, Homo sapiens
taagacgctctccaaatgcagtggacttgaaccttctccttggctgctgcagggctgcagggcctgcagtctccggtaggcgcagagttgctgcggcttctccaggtgctcgtccccttttctgcgtctgacctggttgtcaggatgagacctgatccttgtcaccggcctccggaagatgcagctggtgagtctcatggggagagcagacctcgcagctcgtctccgatgggccttggccatgtggatttctcgtttcttctgtaaagcccagggcatcatgttccttttgagcttcccctttcaaaagaaaagaaaatgtgaaatttcaaccaaatggagacaggagaagatcagctgtggggggcttctctcagctcagtggaatcttcccaccagcctctctttctggggaaatgtgtctcaaatggcagtgtacatcctcagcacctgcagggtttgctgaagtcagatatgtggacctgaacccaagtaagtctggggtggaacctagagtctgcatttctccgtgtgaccctgatgctgctggcaggagctccaggcattgacactgggtcctgggacctcatcgggctgatgcgagtcaaggactaaatgctcaaggtcatgacccagggtcagttccagaccttgtccctcctcatcctcctcagaggacacccctctcttctcttccctgccactgtcagctacacagatgctggtgcctcctaacccatccccaacaggacaccgggatcccagacttccctgttcaccaagacctcacgcttctctgtatctctttctgctgtgcttcaggacacaacgtcattttcatagctccttgactctctggtttccaaagaaatcctgcactcgccaccttaaatactcactgccacacccagatcccaccttcacctgaacacctcctgctcatgaagaaaaacctcagaaacaccatgttgctttctgtttctaataagctcaattaactagagttacaccatgagagaatcttttgatgacatactgagaaagatgattaagcccctcctaagatttgaaatcctttcttgctctaaatcaattggaagactctagtctcataaagctgtttcagatacaaacataaagccttcatttctgtccttctcatttcatttctgttgtcctggcattaagattaatactaccccttacacgacccaaggtgttcccctttggagggaaaattatttagtctccttagttacagggcacttatgatgtgccaagctgtgcagtagaacccctgatccagaagtaaactgcagaaatcaccactctgttgattttcatcttggtgagaaggaagacataataaacacactaaaaacaaatttccgatagggtatcagatataattaagttccatgatgaagaagaagggagagacagagagggatggagggaggagaaacagagaaacagaaaagaaagaaattcactacaatgaatcatgacagtgagtttagggaaggactaaccaatcatgatatttaaccagagaactaaaatttttttttaaagggaccaagcaatttctggttcaagaactttccagagagagagacaatttgaagactgcaaggccaagtaatacctcttttccttcttagtgatgttgttggacttttaaaaaatcagggctattatccccagatagctccgtgaacaaaaaattagaatattgttgaatattttgaatattacttgagtattactcaacaaatattaacacctagggtataagtttccacgagatagcatctagttttgagaacaacttgctaaactgtgaagatgttttacagaaagaaaaaggaatacaaatggacattattttggtcaatagtcaataaggatcccatactcaccagaacaggcaggcttggaaaagaggtgaacgcaggttctcccatagctgtagagttcctcctgctgaccccactcctgaggcacagacagcccttggcttgccggaaaatgcagtggcttctgcatctagctcctcttttatagagggagtgataatgcaatcagtggataatccatagggaacgccctgtctccacccattggatttgaagcatttctaaatctttatacagaaaccaatatggtgttaccaacacagaatgtcagtagaaaaagaatttaatccgtgtgtgtggcggggtggtatttacagttaatatcggcattttagatatgtttccttttcctcccattctctcaaacatctttgaaagcattctacggaaataagaatggaattgtcggccgggtgcggtggctcaatcctgtaatcccagcactttgagaggccgagtcgggcggatcacctgaggtcaggagttcgagaccagcctcaacatggagaaaccccgtctctactaaaaatacaaaattaactgggcatgatggtgcatgcctgtaatcccagctacccgggaggctgaggcaggagaatggtgtgaacttgggaggcaaaggttgcagtgagccgagatagtgccactacactccagcctgggcgacagagtgagactccatctcaaaaaaaaaaaaaaaaaaaaaaaaaaaaaaagagagaagaaacaaaaagaaaaacacctaataaataaacagacctaataaaaaagaaatacagtctcagcagccttggtctatgcagtgactactcagttttttcctattatttttcatgatgttttcattgtataaatcttcctggtttgatctttgaggaggcagacagatgctggctattttaccaatttggacctggggctaggaagtttaagacacaattagcttacgtatttaatcacattgtggcaatttcaatgcaccgatgcctcccctgcaaactccaatatatagacacaatataccgcgctctagcctgggcgacagagtgagactccatctaaaaaaaaaaaaagaaagatctcctattaatgaaaatgcagagagaaatgggtgttagaaaatcatattggaaaagatatttgcatgatgtgcatccagtaaagtacatcaagccagaatacagactagaaagatgtccatcaaatgaaaaaaaatactaaaaattgatgtgcaaaatgagtggaaaacttcagtaggcactattgaagagagaataaataaatggtcaatacaatcctgaacacatgcccaaattctgtttagcttcagataaacgctgatgaaaaatcactatgagatactcatatacacttctgtttggctaaaatgaaaaaatagcaatgccaagtgcagacatggctatggagcaatcataccattcacgtgtagccagtgagagtttaaatgggaagaaatgtactttatttgtatcccaacctgaacgtacattggaatctcctggagagtttgaaaaactaatggtagcacacacccctacacatttttattccactgatgttggatgcagcctaggctataggaattttacaatcccctaaagaccaaaaggacagccaaggatgacacaccacttccctggttggtttggagtctgtggttttgaactttggtttgcagaaaacacacctgggagtgttttcacacctgggtgccttccagaccagtgtctccggatgcctacgggaggggccaggaaatcagaaatcatttatttatttatttatttatttagagtctccctctgttgcccaggctggagtgcaatgacgtgatctcggctcactgcaacctccacctcccgggtttaagcaattctcctgcctcagcctcccaagtagctgggtttacaggcccaagacaccacgcccagctaatttttttttcttggagacagagtcttgctctgttgcccaggctggagtgcaatgacgtgatctcggctcactgcaacctccacctgccaggttcaagcagttctcctgcctcagccttccaagttc

SEQ ID NO: 1560688 - DNA, 4001 bp, Homo sapiens
ccttctccttggctgctgcagggctgcagggcctgcagtctccggtaggcgcagagttgctgcggcttctccaggtgctcgtccccttttctgcgtctgacctggttgtcaggatgagacctgatccttgtcaccggcctccggaagatgcagctggtgagtctcatggggagagcagacctcgcagctcgtctccgatgggccttggccatgtggatttctcgtttcttctgtaaagcccagggcatcatgtttcttttgagcttcccctttcaaaagaaaagaaaagaaaatgtgaaatttcaaccaattggagacaggagaagatcagctgtggggggcttctctcagctcagtggaatcttcccaccagcctctctttctggggaaatgtgtctcaaatggcagtgtacatcctcagcccctgcagggcttgctaaagtcagatatgtggacctgaacccaagtaagtctggggtggaccctagagtctgcatttctccgtgtgaccctgatgctgctggcaggagctccaggcattgacactgggtcctgggacctcatcgggctgatgcgagtcaaggactaaatgctcaaggtcatgacccagggtcagttccagaccttgtccctcctcatcctcctcagaggacacccctctcttctcttccctgccactgtcagctacacagatgctggtggtgcctcctaacccatccccaacaggacaccgggatcccagacttccctgttcaccaagacctcacgcttctctgtatctctttctgctgtgcttcaggacacaacgtcattttcatagctccttgactctctggtttccaaagaaatcctgcactcgccaccttaaatactcactgccacacccagatcccaccttcacctgaacacctcctgctcatgaagaaaaacctcagaaacaccatgttgctttctgtttctaataagctcaattaactagaggtataccatgagagaatcttttgatgacatactgagaaagatgatcaagcgcctcctaagatttgacgtcctttcttgctctaactcaattggaagactctagtctcataaagctgtttcccccacaaacctcatcagtgcactttccattttaaagcctttgtttctgtcctcctcatttcatttttcgttgtcctggcataaagattaatactaccccttacagtacccctggcataaagattaatactgacccaagatgttcccctttggagggaaaattatttagtccccttagttacggggcacttatgatgtgccaagctgtgcagtagaacccctgatccagaagtaaacttcataaatcaccactctgttgattttcatcttggtgagaaggaagacataataaacgcactaaaaacaaatttctggtggaatatcagatataagtaagttccatgatgaagaagaagggagtgacagagagggatggaaggaggagaaacagagaaacagaaaagaaattcactacaatgaatcgtgacagtgagtttagggaataagcaactcatcatgaaattttaccagagaactaattttttttgttttttgtttttttaaaaaaacggaccaagcaatttctggttcaggagctttccagagaaggagacaatttgaagactgcaaggccaaatcatacttcttccctttcctagtgatgttggatttttaaaaaaaaattcaaagctattatccccatacagtttcatgggcaaaaatgagaatactttgaacattattcaacagatattaccacctgaggtataactttccacaacatccagttttaagaacaacccactgctaactgtaaagctgtcttacagaaggaaaaaggacacatatggacattcctgtaatcaataaatatcccgtactcaccagaacaggtgggctcggaaaagaggtgaacgcaggctctcccatagccgtagagtttctcttgctgaccccactcttgagatgcagacaacccttggcttgccggaaaatgcagtgacttctgcatctggttcccctttttatagagaaagcgagtgataatgcaatcagtggataatccacagggaacaccctgtctccgcccattggatttgaggcatttctaaatctttatacagaaaccaatgtggtgttacctacacagagtgttagtagagaaagaattgaatacgtgtgtatgtgtgtgtggcggggtggtatttacagttaatatcagcattttagatatgtttccctttttctcccagttttccaaacatctttgaatactttctatagaaataggaatggaattgtctatgtacataaatgttcacgtaatatttgatttaataacaacaactaaagaccatttaaatgttctttaagaaaagaaagcccaaaacttttattcacaatcctatagaatatatcacacagttgttgcaaagaaattactactttggccgggagaggtggcttacgcctataatcccagcactttgggagaccaaggcaggtagatcacctgaggtcaagagttcgagaccagcctggccaacatggtgaaaccccatttctactaaaaatacaaaacttaccctggtgtggtggcatgcacctgtaatcccagctactcgggaggctgaggcaggagaatcgcttgaacctgggagggagaggttgcggtgagccgagatcgcaccactgcagctcagcatgggcgacagagtgagactccatctcaaaaaaaaaaaaaaaaaaaagttctatttcgtgcatttacatttaatataattaccagtaaatttgaaattgtttcaatcatctcatttttcctaggttttgacttaactgactcacgttccttttgcctttacttgactgactttgaattaaatatgtttattattttattgttatctccatgaacttgctagttacagccatacaaatctgtgtagttatgctaataattaaatcatatactctgatacaattaattactttaacccctcccacaaaatgctaatactttagaacacttttaattctctttttagctgtttctgacttttgtattaccattctcatgcatattaattctacacatattttactctccaggagacatttctagtattgcttcataaagcaatatgcactaatatttacctacagcttatcttgtgcattcatctttgttcctttctgcatttctagcattcaatctgggattatttccctgtggacttgagaattcattctagtatttttcttctaattcaatgctgctaacaactaattgttttcctttacacttttatttaggcatctttatttgggggcaatattgctgtcaggtacgggtgtctggtttgacaaatttctttcagcatattagaaatggtgccccactgatgtctatctcattttacctgtgttgagatgtcagctgtcaggcttttccttgcttctttggtttccacattctctaaactctttctcgttgtggttggtttgtaggccacagtgtagctcattattgcttcctgtgtatttcctttgcctagagggtgtggagtcaattgcatctgtgggttgatgtctttcattggtttggaaggtgcatatgtatccttcacttctgatatccattcttgtccaagttctctctactcttcttttaatcacatcccacttgtctctgaagtttccaatgttgttcatgctttggtgggaatatttgctcttgaaccttgttccactttgctaatctaccttttttctaggttcagtctcattttaattttccttccttccttccttccttccttccttccttccttccttcctgtcttccttccttcctgtcttcctttcttttctctcttttctttcgagatggggtctcactctgtcacccaggctggagagcagtggcgggatctcagctcactgcaacctctgcctcc

SEQ ID NO: 1560689 - DNA, 4001 bp, Homo sapiens
ccttctccttggctgctgcagggctgcagggcctgcagtctccggtaggcgcagagttgctgcggcttctccaggtgctcgtccccttttctgcgtctgacctggttgtcaggatgagacctgatccttgtcaccggcctccggaagatgcagctggtgagtctcatggggagagcagacctcgcagctcgtctccgatgggccttggccatgtggatttctcgtttcttctgtaaagcccagggcatcatgtttcttttgagcttcccctttcaaaagaaaagaaaagaaaatgtgaaatttcaaccaattggagacaggagaagatcagctgtggggggcttctctcagctcagtggaatcttcccaccagcctctctttctggggaaatgtgtctcaaatggcagtgtacatcctcagcccctgcagggcttgctaaagtcagatatgtggacctgaacccaagtaagtctggggtggaccctagagtctgcatttctccgtgtgaccctgatgctgctggcaggagctccaggcattgacactgggtcctgggacctcatcgggctgatgcgagtcaaggactaaatgctcaaggtcatgacccagggtcagttccagaccttgtccctcctcatcctcctcagaggacacccctctcttctcttccctgccactgtcagctacacagatgctggtggtgcctcctaacccatccccaacaggacaccgggatcccagacttccctgttcaccaagacctcacgcttctctgtatctctttctgctgtgcttcaggacacaacgtcattttcatagctccttgactctctggtttccaaagaaatcctgcactcgccaccttaaatactcactgccacacccagatcccaccttcacctgaacacctcctgctcatgaagaaaaacctcagaaacaccatgttgctttctgtttctaataagctcaattaactagaggtataccatgagagaatcttttgatgacatactgagaaagatgatcaagcgcctcctaagatttgacgtcctttcttgctctaactcaattggaagactctagtctcataaagctgtttcccccacaaacctcatcagtgcactttccattttaaagcctttgtttctgtcctcctcatttcatttttcgttgtcctggcataaagattaatactaccccttacagtacccctggcataaagattaatactgacccaagatgttcccctttggagggaaaattatttagtccccttagttacggggcacttatgatgtgccaagctgtgcagtagaacccctgatccagaagtaaacttcataaatcaccactctgttgattttcatcttggtgagaaggaagacataataaacgcactaaaaacaaatttctggtggaatatcagatataagtaagttccatgatgaagaagaagggagtgacagagagggatggaaggaggagaaacagagaaacagaaaagaaattcactacaatgaatcgtgacagtgagtttagggaataagcaactcatcatgaaattttaccagagaactaattttttttgttttttgtttttttaaaaaaacggaccaagcaatttctggttcaggagctttccagagaaggagacaatttgaagactgcaaggccaaatcatacttcttccctttcctagtgatgttggatttttaaaaaaaaattcaaagctattatccccatacagtttcatgggcaaaaatgagaatactttgaacattattcaacagatattaccacctgaggtatcactttccacaacatccagttttaagaacaacccactgctaactgtaaagctgtcttacagaaggaaaaaggacacatatggacattcctgtaatcaataaatatcccgtactcaccagaacaggtgggctcggaaaagaggtgaacgcaggctctcccatagccgtagagtttctcttgctgaccccactcttgagatgcagacaacccttggcttgccggaaaatgcagtgacttctgcatctggttcccctttttatagagaaagcgagtgataatgcaatcagtggataatccacagggaacaccctgtctccgcccattggatttgaggcatttctaaatctttatacagaaaccaatgtggtgttacctacacagagtgttagtagagaaagaattgaatacgtgtgtatgtgtgtgtggcggggtggtatttacagttaatatcagcattttagatatgtttccctttttctcccagttttccaaacatctttgaatactttctatagaaataggaatggaattgtctatgtacataaatgttcacgtaatatttgatttaataacaacaactaaagaccatttaaatgttctttaagaaaagaaagcccaaaacttttattcacaatcctatagaatatatcacacagttgttgcaaagaaattactactttggccgggagaggtggcttacgcctataatcccagcactttgggagaccaaggcaggtagatcacctgaggtcaagagttcgagaccagcctggccaacatggtgaaaccccatttctactaaaaatacaaaacttaccctggtgtggtggcatgcacctgtaatcccagctactcgggaggctgaggcaggagaatcgcttgaacctgggagggagaggttgcggtgagccgagatcgcaccactgcagctcagcatgggcgacagagtgagactccatctcaaaaaaaaaaaaaaaaaaaagttctatttcgtgcatttacatttaatataattaccagtaaatttgaaattgtttcaatcatctcatttttcctaggttttgacttaactgactcacgttccttttgcctttacttgactgactttgaattaaatatgtttattattttattgttatctccatgaacttgctagttacagccatacaaatctgtgtagttatgctaataattaaatcatatactctgatacaattaattactttaacccctcccacaaaatgctaatactttagaacacttttaattctctttttagctgtttctgacttttgtattaccattctcatgcatattaattctacacatattttactctccaggagacatttctagtattgcttcataaagcaatatgcactaatatttacctacagcttatcttgtgcattcatctttgttcctttctgcatttctagcattcaatctgggattatttccctgtggacttgagaattcattctagtatttttcttctaattcaatgctgctaacaactaattgttttcctttacacttttatttaggcatctttatttgggggcaatattgctgtcaggtacgggtgtctggtttgacaaatttctttcagcatattagaaatggtgccccactgatgtctatctcattttacctgtgttgagatgtcagctgtcaggcttttccttgcttctttgctttccacattctctaaactctttctcgttgtggttggtttgtaggccacagtgtagctcattattgcttcctgtgtatttcctttgcctagagggtgtggagtcaattgcatctgtgggttgatgtctttcattggtttggaaggtgcatatgtatccttcacttctgatatccattcttgtccaagttctctctactcttcttttaatcacatcccacttgtctctgaagtttccaatgttgttcatgctttggtgggaatatttgctcttgaaccttgttccactttgctaatctaccttttttctaggttcagtctcattttaattttccttccttccttccttccttccttccttccttccttccttccttcctgtcttccttccttcctgtcttcctttcttttctctcttttctttcgagatggggtctcactctgtcacccaggctggagagcagtggcgggatctcagctcactgcaacctctgc

SEQ ID NO: 1560690 - DNA, 4001 bp, Homo sapiens
aaccttctccttggctgctgcagggctgcagggcctgcagtctccggtaggcgcagagttgctgcggcttctccaggtgctcgtccccttttctgcgtctgacctggttgtcaggatgagacctgatccttgtcaccggcctccggaagatgcagctggtgagtctcatggggagagcagacctcgcagctcgtctccgatgggccttggccatgtggatttctcgtttcttctgtaaagcccagggcatcatgtttcttttgagcttcccctttcaaaagaaaagaaaagaaaatgtgaaatttcaaccaactggagacaggagaagatcagctgtggggggcttctctcagctcagtggaatcttcccaccagcctctctttctggggaaatgtgtctcaaatggcagtgtacatcctcagcccctgcagggcttgctaaagtcagatatgtggacctgaacccaagtaagtctggggtggaccctagagtctgcatttctccgtgtgaccctgatgctgctggcaggagctccaggcattgacactgggtcctgggacctcatcgggctgatgcgagtcaaggactaaatgctcaaggtcatgacccagggtcagttccagaccttgtccctcctcatcctcctcagaggacacccctctcttctcttccctgccactgtcagctacacagatgctggtggtgcctcctaacccatccccaacaggacaccgggatcccagacttccctgttcaccaagacctcacgcttctctgtatctctttctgctgtgcttcaggacacaacgtcattttcatagctccttgactctctggtttccaaagaaatcctgcactcgccaccttaaatactcactgccacacccagatcccaccttcacctgaacacctcctgctcatgaagaaaaacctcagaaacaccatgttgctttctgtttctaataagctcaattaactagaggtataccatgagagaatcttttgatgacatactgagaaagatgatcaagcgcctcctaagatttgacgtcctttcttgctctaactcaattggaagactctagtctcataaagctgtttcccccacaaacctcatcagtgcactttccattttaaagcctttgtttctgtcctcctcatttcatttttcgttgtcctggcataaagattaatactaccccttacagtacccctggcataaagattaatactgacccaagatgttcccctttggagggaaaattatttagtccccttagttacggggcacttatgatgtgccaagctgtgcagtagaacccctgatccagaagtaaacttcataaatcaccactctgttgattttcatcttggtgagaaggaagacataataaacgcactaaaaacaaatttctggtggaatatcagatataagtaagttccatgatgaagaagaagggagtgacagagagggatggaaggaggagaaacagagaaacagaaaagaaattcactacaatgaatcgtgacagtgagtttagggaataagcaactcatcatgaaattttaccagagaactaattttttttgttttttgtttttttaaaaaaacggaccaagcaatttctggttcaggagctttccagagaaggagacaatttgaagactgcaaggccaaatcatacttcttccctttcctagtgatgttggatttttaaaaaaaattcaaagctattatccccatacagtttcatgggcaaaaatgagaatactttgaacattattcaacagatattaacacctgaggtataacgttccacaacatccagttttaagaacaacccactgctaactgtaaagctgtcttacagaaggaaaaaggacacatatggacattcctgtaatcaataaatatcccgtactcaccagaacaggtgggctcggaaaagaggtgaacgcaggctctcccatagccgtagagtttctcttgctgaccccactcttgagatgcagacaacccttggcttgccggaaaatgcagtgacttctgcatctggttcccctttttatagagaaagcgagtgataatgcaatcagtggataatccacagggaacaccctgtctccgcccattggatttgaggcatttctaaatctttatacagaaaccaatgtggtgttacctacacagagtgttagtagagaaagaattgaatacgtgtgtatgtgtgtgtggcggggtggtatttacagttaatatcagcattttagatatgtttccctttttctcccagttttccaaacatctttgaatactttctatagaaataggaatggaattgtctatgtacataaatgttcacgtaatatttgatttaataacaacaactaaagaccatttaaatgttctttaagaaaagaaagcccaaaacttttattcacaatcctatagaatatatcacacagttgttgcaaagaaattactactttggccgggagaggtggcttacgcctataatcccagcactttgggagaccaaggcaggtagatcacctgaggtcaagagttcgagaccagcctggccaacatggtgaaaccccatttctactaaaaatacaaaacttaccctggtgtggtggcatgcacctgtaatcccagctactcgggaggctgaggcaggagaatcgcttgaacctgggagggagaggttgcggtgagccgagatcgcaccactgcagctcagcatgggcgacagagtgagactccatctcaaaaaaaaaaaaaaaaaaaagttctatttcgtgcatttacatttaatataattaccagtaaatttgaaattgtttcaatcatctcatttttcctaggttttgacttaactgactcacgttccttttgcctttacttgactgactttgaattaaatatgtttattattttattgttatctccatgaacttgctagttacagccatacaaatctgtgtagttatgctaataattaaatcatatactctgatacaattaattactttaacccctcccacaaaatgctaatactttagaacacttttaattctctttttagctgtttctgacttttgtattaccattctcatgcatattaattctacacatattttactctccaggagacatttctagtattgcttcataaagcaatatgcactaatatttacctacagcttatcttgtgcattcatctttgttcctttctgcatttctagcattcaatctgggattatttccctgtggacttgagaattcattctagtatttttcttctaattcaatgctgctaacaactaattgttttcctttacacttttatttaggcatctttatttgggggcaatattgctgtcaggtacgggtgtctggtttgacaaatttctttcagcatattagaaatggtgccccactgatgtctatctcattttacctgtgttgagatgtcagctgtcaggcttttccttgcttctttgctttccacattctctaaactctttctcgttgtggttggtttgtaggccacagtgtagctcattattgcttcctgtgtatttcctttgcctagagggtgtggagtcaattgcatctgtgggttgatgtctttcattggtttggaaggtgcatatgtatccttcacttctgatatccattcttgtccaagttctctctactcttcttttaatcacatcccacttgtctctgaagtttccaatgttgttcatgctttggtgggaatatttgctcttgaaccttgttccactttgctaatctaccttttttctaggttcagtctcattttaattttccttccttccttccttccttccttccttccttcctgtcttccttccttcctgtcttcctttcttttctctcttttctttcgagatggggtctcactctgtcacccaggctggagagcagtggcgggatctcagctcactgcaacctctgcctcccgggttc

SEQ ID NO: 1560691 - DNA, 4001 bp, Homo sapiens
agcatgcctgtaatcccagctacttgggaggctgaggcaagagaatcgcttgaacccgggaggtggaggttgcagtgagccaagatcgtgccactgaactgcagcctgggcaacaggagcgaaactccatctcagaaagaaagaaagaaagaaagaaagaaagaaagaaagaaagaaagaaagaaagacaaacaaacaaacatgaaacagagaaatgagctgatcaacaagagacagctagacatgaggcagaagctgaaaaagactcaaagaggaaacaggttgcttccccctctcccctcctctccctctcctccctccaccaaattctcaccagggctgggcctgaatgagggcccaggtcccgaggatggtgaccagagaatgcaaagtgtgggggccacaggtgaacagggtgagccccaggcccacagcggctgctccccatctcttcagcccaggacctgcagggggaagggacagcataagcctggaaccttccagagggtcccccccctttattttccactggggagggagcctgactcaccggctttcttaaagaggaagccgatggggatggagataagaagaaccactagatacgtccattcttcaggcgacatggtctgggggaggggcagagattcacagtgagaacccaggaatccaggccccctgcctcctccctcttcgaggatccaggaacccagccttctagaccccagtttttgaggatgatggagtatgagcctcagctcctctcctttgagaacctagcaacccagactccagccccttcctccttggaggagacaggaatccacccccagcccctcctttgagcgcacaggcctccagctctcctgtccttggagaacccaggaaagtgtggggatctcccagcacccaagcccctcctttgcgaacgcagaaatcaaagctactccccgcacccatactggggacccagatttgaagacgcccctcttttaaaaacccagaaacggcacccctcccggacccttcctcttcgacagcccaggaatctagacctccgagccccctcttccagcgaggatccaggaacccagaccccctctttggatcccccatcccccggcccttgtgaaaccagatatccggaccccccagcccttctccttcgagaccacccagaggagcccgggtctccaacctgcacctccttcggagctccacacccctctcctactgagaacccggggatcgaacaccctcccctccccaggcccaggcccaggcccagccccaacccgtcccgcgcaccccagcgcatccccggcagagccacaggcggttgcgccagccccgagttccaacgcgcctccggggccgccccgcacccgccagcccgcagagaccctgccgccgtgtaacctcgcctcgccactgggcgccgccaccctggcccacctgagctgctcgccgggcaggaggcggccgagcagtcccagcccgcttgccgccgcagctccggccacgcctcccccgcccagcgcgcccccgcgccgcctgctccttctgggcgcccgccgggctgcgcagatcaggccggggaagaagccacggtcagggccccgggcgggcagggaagaagccccggagcagaagccgagagcgcgagtcggcaacgggattcgagtccaggtccacactgggatccgagctccgagtacgtgaaggggcgggccttcgggctcggaacaaggaggagccaaaagctttggacccgaaggggaacagacgggctctggaaaggaggcggggtctggagctcggcgtgaggaatgaggcggggtctcccttcgggttccttcgggcacaatcgggagcttgagttctccggaagcggggccacaaacttcggctcacttcggcaatagtcgagaacggagagctgaggccactgtgggcggagccacatgtttcggctttcttcggaggtagtcgagtccttagggtcactgttccgatgtgggcggggccacagactcggccggatgtgggtggggccacaagcttcggtttacttcgtagatagttgggtacaagtgacgctaggatgataggcggagtcaacaggttcgccagacacccatgagtatttacaagggggcggggcgaaagcgacttgccctcaaaggggcggaaccccgagggccggcgtgcgcctacgggaccgggccaggatgacgatcctcaagttcccaagtagaggagaggaagcggcagagggaggtgcgctcagtggggcggagccaaggtggcccccgcgggaggagggcggggcttcggtcctgcgaggggcgggacctgacttcccgcggcgctgatggggcgggatgacgaagttgacgagggtgtcggcatgagggggtggagcaaggagcgcgtggcgcggtgcgcagtgggtggctccacctcgactgcgaattactgtttatgaggtgactcgctggttctatcggtggacagtgggacattctgaagggaggcaaggaggcggactgagcgctcccaattggggtgagcccgcccgagcggagagtggacggcgggtgtccagggggcggggctttcggctgtggggttcggtcgtagggcgggaactccccaactggggtgcgctggcgctcggagggggcggggccacaggccgcgaggctgccgggagccgatgacgcccgaacgccgaacctattgcgtccgggaggaggcggggctacggattcggccgagccgagaacacccgaacgtcaaattgctggcgttcgagaagggggcggggctgcggattcggtggagccgaggacgcccgaacgccgaacttcctgtgctcgggagggggcagggttttgtactgtgggagtctgagagcgaggaggtccgaaagccgaatcacagtcgttcggaaagaggaggagcgaaggctcgagcgtccggaagagggtgtggcctcggcggtgccttagcctccagagcttctgaccgctgacgggaacacccgaagggggacgcccactttgcaagagggtggtgccaaaatggacctttgtaagggggcgtgtcgccgcgcttgcggaggtttgtttttcacgctccaaggcgcaatggtaggtacggcagtgcgggcacagagcgggtgccgaccgcagggtcacaagggtagagcgggaccctgggggcttggcgaggggagagggtcgggggcttgtctccggcgtctcgtctccggcggccgcgaggcctggtgggatcgcccgggggcggggcctggcgctcgggcccagcaggtggtgaacggcggctgagcgaggccccgccccctgaggcctaggggcggggcttcgccgagaccccggaggctttgggtgcgctgcagcggtccgcggcgcgcagctgtttcggtaactgctttgcctcccggctcccgcaggaggatgctggtggtggaggtggcgaacggccgctccctggtgtggggagccgaggcggtgcaggccctccgggagcgcctgggtgtggggggccgcacggtaggcgccctgccccgcgggccccgccagaactcgcgcctgggcctcccgctgctgctgatgcccgaagaggcgcggctcttggccgagatcggcgccgtgactctggtcagcgccccgcgtccagactctcggcaccacagcctggtaagggggcggggctcgaactcgggttcggtgggagcgggacctgggagtcaagtttcctggcttctgaagggaccataagcttggaggttccagcgaagtgtgcttctcaggccctgacatccttcaagcgccagcaagaggagagcttccaggagcagagcgccttggcagctgaggcccgggagacccgtcgtcaggagctcctggagaagattacggagggccaggctgctaagaagcagaaactagaacaggcttcaggggccagctcaa

SEQ ID NO: 1560692 - DNA, 4001 bp, Homo sapiens
cctgggagaggagctggggctaaatctgaagccccacccaccctcctccacctcctgtcggggcgccaacttacgtggcattttctgcagcacctccaagattttctgtacctttgtgtcaatgttttttatgcctagggggcggggagggttgggtgggaacagataagtcaagctgcggtggagcctcaaacaaagcccccaccttccttggaagcaccccccctgccccacacccaccctggggtacagcagagcccatggatttggggttcccaggagcctttcaatacccacagagcaacccagatggtaacacccatcgcccctccacaacttgagctttgggagggtaggaccccggctttctcctcccctgaatcccctgcccccagctcagctccgggcattggtgacaaataacccccatagaaggcgagactacacaggcacctgctaatgtcgtctctaatctatcaatcttgctcctgaccatggtgatgctctgctgaacggaatcccagcctctcttctgtctctcttcgcatgcttgtacggagtttgagactgagggcatgaaacaggggtgtctgtgcatccatccctctccagacccccaccatgaccccacgggtctccctcagaccctccgctcaccattccaaagctcccttttaaagcccagcagctccttggacatctcagcatctgttcaggaggggcaggaaaatccttgaagcacccagggagagagagagagaaggacaagggagaaagtctaggccccccagcaccctcctcccaagaagtactcactcttcaccatgatgaaggctgacaggatgatgcagaggacaaaggccagggccaggaggatgtacaggctcaggatggctctgtacaaccagcaggggacctgggtggagtctgagggcggcctgcactgggctgggactggagcaaagaggcagcaaagtgaccttgaggggccagcaccaccactcaaaccatcctcactgtctctaacaccatggacacctcgctcctctcaaaaccatcagcagctgtggtcatgcagcttgtcatcatcgtcaacaacactgccaccaccagccaccctcagcgatctaacaccgtcaccatcacagaccccctctccagcattccccaacattgtcatcatcaacagacctcattagcacgtcaacagctgtcacctcttccttccccatcgcttcctcccttccacgcagccccgggggccctgcagttgcccgcccacctgccccttcccaaggtgatgggatgtgagcaggtgggtgtctgctcaccttggctcgtgggtcgtgaatgaccaccctttgcatggtcctgatttttgaaggccaaggtgatattctcatagtctgggtcatgggcacctgggaggggttggagatctgctcagagctctgtggtgtggagagtggatccgggatcttgttttacccaaccctttgcactcaataaattgtagggggtgaaagataaggagtgagaagctaaaatctgctttttggttaagtggagcgggtgtgtgagagtttgagtgatcacaccacacacacatccacacacacatccacacatcttggaggggaaggagcccccggcccccacctttgaccccttacctctcccatctgaactctccttctttttttatttttattttttacagacagagtctccctatgttgcccaggccagtctccacctccagggctcacgcaatcctcccgcctcagcctcccaaagtgctaggattacagacatgagcaaaagcccccggccccccaatctctccttcttaacccctcccttccacctcgagttccctaaccttgattcttggctgagaccccctgtttcttgtccctgaaggctggtgcttgcatcttgacttcctggtgcttgtagatttcctccacttccatggtccccagcccgcaaatttgtccatacacgtccccgcccaccggaaggtgtgggcagatgaggaaatctggaggtggggggaagaaagagggggagcagcctcctcttttcagggatccacgactctcgcaccctggggcaccctcattcctgccccgatcaagaggctcttgggagccaagaggtctcaggaaggaccaagaagaaaaacctctagaccgggagatggaattcgacactcggaaatgttacaggaagctgtggtctctgtgtgtgtctgtgtctacctggatggacctcaccctcctacctcctctccatttcaaaagagaagctgtgacacctcagtgtcccaacttttcgcgtaagagcaaccaggcttggagacaggacccctgggtccccccacaccttcctccctccagcctcagctccacccctcagctccacccccaagaagttcttctacttctacaagtccccgtggaggaaaagcacagatgtgaggcaacgggaactaaccactggaacgccacacccacatctgggactgaggacagacccacatccttccctccctccccaaatcccctgcttttatacaaccctggaggaggctgggtgcggtggctcacgcctgtaatcccagcactctgggaggctgaggtgggtggatcatctgaggtcaggagtttgaaaccagcctggctaacatggtgaaaccccgtctctactaaaaatacaaaaattagctgggcgtggtggcgagcgcctgtaatcctagctactcaggaggctgaggcaggagaatcgcttaaacctgggaggcggaggctgcagtgagcggagatcacaccattgcactccagaatgggtgacaagagggaaactctgtctcaaaaaagaaccctggaggaacagtttcctctgcacctggaaactccaggtttctcattctcatccatccatctgcttatctacccagatactctctctcacacatgtacacacacaggtctgcacacggacacacatcacaaactcatttgcatactatttgcattgtgacactcagaaaaatagacacaagcatgcgttcacatgcccgcactctgtctagaaggtgtcttagttcactttgtgtttatctgatcttgaaaactggggttacaaaaggcacaaagtagctgggtatggtggctcgctctgtagtcccagctacccaggaggctgaggtaggaggatcatttgaggccaggagtttgagaccagcgtgagcaacatagcaagaccctgtctctttaaatgttttttaataatttttttttgagacagggtttcactctgttgcccaggccggggtgcagcagcgtgatcatggctcactgcagctttgacctccctggctcaagtaatccttcgtcctcggcttcccgagtagctgaaattacaggtgggcacgacttcacctggctaatttttctccttttttgagatggagttttgtgcttgtcacccaggctggagtgcaatgacgctatctcagctcactgcaacctccgcatcccaggttcaagtcattctcctgcctcagcctcccaagtagctgggattacaggcatgcaccaccacccccggctaattttgtatttttagtagagacggggtttccccatgttggtcaggctggtctcgaactcctgacttcacgtgatctacccgccttggcctcccaaagtgctgggattacaagcatcagccaccgtggcccagtctaatttttcttattttttgtagagatgagggtctcaatatgccgtccaggctggtcttgatctcctgggttcaactgatcctccagccttggtctcccaaagtgctgggattacaggcatacatttttatttttatttttttctggccaggtgtggtggctcacgcctgtaatcacagcactttgggagtctgaggcgggcggatcacctgaggtcaggagttagagacaccagcctgaccaatatgat

SEQ ID NO: 1560693 - DNA, 4001 bp, Homo sapiens
ggctggtccatggtgaatgtcagaacatttcatcaatgttcccgttattgatcagtggggagagaatgaactgctcccactggcttttcactgggcgttcaagcctgctgggcttatcccaactccagcttccagacatgagcatagaactcagcctgtattctaggtttgtctggacaaatacccaaaagatgacctctgggttcattataacctggcccatcagctgacactctcagaagccaaggacctggagaagaggtaattgacaacataagtaataataatggaacacattcgctaaagactcattttatctccctgaaaagcaccagctcctagaaatcatgcagccctagcatcaaatcccagacctgccactttacagtaggttgactccaggtacctccctgagcctccatctcctcatctgaagagtggaaattttaaaaaggcgaccccttggctgggctcagtggctcatgcctgttatcccaacggctttgggaggccaaggtgggaggatccagcctaggtaatacagcgagacctccctgtctacaaaaaaaaaacattttttttaaatagtcaggtgtgacggctcatgcccgtagttagtagctgggaccccatctacccgggaggctgagttgggaggatcacttgagcccaggagttcgatgttacaatgagctaggattatgccactgcactacagcctgggcaacaaaaaaaagtttattaaaaaaaaaaaaagtccaccctctccctgagccttgaggttgagatcctgaagctgctctgagaattcagtgagacacagcagataaagacctcttcagcaaacacaagctgttctaatcactgtttatttttttccagcctaatggttagatctaagctttcagcaactgctggagtcaaaaccagtcacagtagcccaaaactgtccctgtcacacccccatggggatgtgctttctagggcctggccccgtgctgctttctagggcctggcctcctgcctagcaaagcagtcaggataaatgtgtgcactgtcagaacctcccttgcagagagggacaagttcccggcccctccctttgcaatgagatgctgctgtggctgtttacgacaaagccagagggcagggcccgcttacagagctgagattacagctaacccaccccagaccctactagctgggacaccgggacatctatcaggtaggggtccccagctagctccagaaggggaagctaacacaaggggtcttcctccagcctccccgaggaggggtggcatcagaattggctagaagcccgaatttaagaaggctgcgcttccagcggtttggaaagctaaaactgagttaatcgcctgggggcaatccctccagctctccaggcttgagcttagggaagctgagcatttgtcccctggaatcaggaggggaagcctgggagtctcacgtgcgggttggagaagctggtgcccgctgtctgagttccagacgaagttgagcaatcggaacctaggctcccagtgggaatcccaggaacctcgccgccccagagggagaagctggcggcccggcgcgatccctgcctgagtttgggaacccagcagagcctgggttcaggaggaagaattggagaggctggtgcccacccgccgcccaagttctaggagccgtctgcccttttctccaccgtgaaaagtcagcgctggagcttagaaaaaaagagactaggagctccgccgccccaggtgggagacacagcccgcccgcctgagttcggggccccacggtgccgcccgcgccctcacctgagccgcgcggacccgccggggctgtcatgctggggcgggagcgcgggacgcaggcgggtacggcggggcagcctgggtccgatcgcccgccgctgtcactgcgacctcgctccctcgcggcgcggcttcaaaccctccggcatcagctgatctgtgcctcggtcacgtgacccggtagcccagagcccctcacgtgaccgcctctggtcccgccccctgcgccacgacaacccctgccggaacagcgcgcatgcgtgcctctgccggcgccctctgggtcgaaggcagtcgctaggtcctagcgccgacgcgctctgggtggcgggggatgggctgactctgagtttggcaacgacgagctctgccctggctcccggccatgccccgaatccggtgccaggcttgtgacttccatgtccagagcttgaccccttatcctccttggtgcctggtgatgaccctgcctactatctcaacgctgtcttcctctttctcccagaaactccttttacccttctcctgcgcatcttcagcaaacacgatttcctaattatgtatcaaatagaaccacttatccccaccccatggcccccagcccagagtcttccaacattcctggcctggatctttgcagcaacctcctccccgatctcagcctccctccactccactctctacccagcagccacaagcatcttcaaagaataattcctatccttcctgcgagaacctgccctcggcttcccattgctctgtaatgacaggcagagtccccactctcgtctatcagggccctctgatctggctcctacctccatccaaagctcatctttctatagccccagagcctttgcatacttttgccctggagcgtaatggttaagaatttggaccctggagggcaattgggatttaaatctaggcactgacaatgccacttctacatcttccagagtcccttcaactccaagctgagcgcagtgggcggtggcatgcaccggcaatcccagctactcgggaggctaaggtgggaggatcgcttgagcccaggaggtcgaggctgcagtgagctatgatcacaccactgcactccagcctgggcaacagagcaagactgtctaaaaaaaaaaaaaaaaatgtgcctcaattttctcatttgcaaaatggggatattcaaagtcatctacctactggggctgttgagaggattaaatgagagaatgcaaaaactatcgcataaggctgggcaaacagtactgattattaaattagtgattattgggattacaaaatccttcattgagaaagctgcctgccatttatatcagaagtcttgttatgcttctcctagaatgtactataccccgtaattattttttaagtattctgaatttagtatctatgagctccatgcaggtcgaggccatatttatcttgttccctgctgagaccccagcaatccagagatgtttgttgattgcataaatgagcaactttttttgtccacttgtatacctactgtatgggctttgaagagcaaggggtaagtgagaggaacagagagtggtgactagtgggatggaccaggatgagacactgtgggttaagctggaaagtctagctggtgggcccaagaaggaagccaggacactggagctccagattgtggctggccctggccacaatgtcccatctccggagcaaggggctgtgctcagaaagaaagcacaaaaggcaagccacgacacagagcccggaggcagtgggaggattttactgactgcacaacacacaacttccccaggcccccgaggatgccggcgtctccttcagccatcaggccccagcagtgccccttgctcctgtacccactctggactctcgccggtagggagggctgggctgacagtgccacgagtgggagaacaggggtcagggcaggacacagggttgggatcagggctgggcacaggatcagggtctgggctgggcacaggatcaaggtctgggctgggcacaaggtcgggaccagcgtcgtgcccagcctttgggtcagaagattccacaggagtagggctgggggtggatctggagccggggaggggtttggagctgggatccggcagagtgcccggcccagagccagggtcagggttgcggccagagctg

SEQ ID NO: 1560694 - DNA, 4001 bp, Homo sapiens
gaagtgggaaaacaatggaggcccgtggtagagggaacagccgatgcaaaggcccggaggccagacagagcctggggctggggccgagggggaacatggagaggtcagggccagtcctgggcctgtgggcttctactctcagtaaggtgggagcccgggagggctgggacctatttgggtttcaccaggacccctctggctgtctagggaacagaccatgggggccaagggcacagccgggagacgcagcggagggtctgcgctggcccaggtgagtgatgatgggggcagcaagtggacactagctctctcccgaaggaagagcccgcagacaggcaagcggtggggcggctccctgtagccgaggcggggctgagtgacagggaacacctgtggccgaggcggggctgagtgacagggaacacctgtggccgaggcgggggctgagtgtgacggggaacacctgtggccgaggcggggctgagtgtgacggggaacacctgtggccgaggcggggctgactgacagggaacacctgtggccgaggcgggggctgagtgtgacggggaacacctgtggccgaggcggggctgagtgtgacggggaacacctgtggccgaggcggggctgagtgtgacggggaacacctgtggccgaggcgggggctgagtgtgacggggaacacctgtggccgaggcggggctgagtgtgatggggaacacctgtggccgagccgggggctgagtgtgacggggaacacctgtggccgaggcggggctgagtgtgacggggaacacctgtggccgaggcggggctgagtgtgttggggaacacctgtggccgaggcgggggctgagtgtcacagggaacagagggggcacctcctcgaggctttctaagcgcctggcatccagacgggctgtttcgcttcgcaaaggcaaaagcccagggagcctggaatcacccgcaaccaggttctcctcaaaccctaaccccggctccctacttcttcagggcctgccccagacccccaaggctccgccacaagcctctaaaagtctttcagccccacccctgaccccctttgcttcccacacttcatttcaccccttgagcccacggcctcaccctaaattctcaggcttcaccgtaggggtcccatgtactctccaggtccagcctccaacgcccttagctctccaggcccaacccctaaaactccccagtccccagactccaccccggggaccccacgtactctccaggcccttcccctattgcccccaaatacgaggcttcatcccagggaccccatagcctcttcaggccccgcccctataacccccaatctccagggtccatcccagggaccccctaccctctccagacccctataactccgcagtccccagtctccaccctagggaccctattccctctccaggccccgcaccgataaccccgcagtctccaggccctgcctctacagccccccagtccccaggctccaccccggcgaccccaaacccactccaggccccgcccccgaagtcccaccaagcgccttcagcctcgccccaaactctccttaggccccgccccgaacccagccccgcgggcctcaggcctcccccaggtttccgccgcaaaccctgagccccgagccccgcgccccgcgccccgcgccccgcgccccgcgccccgcgccccgcgccccgcgccccaggccgcctacccagcagcctttgctcccggccacgcccccgaccccgcaggccccgccacggctgcgccgcgttccctcgggtccgtggacacggtcaggggtccgtccgccctcgccgggcccccgcagccccgcactcacctggtcggcccgtgcgccaagctcagcgggcgtccgcggtgcgatcttccctagcgcctcgggtctggcgccgccatcttcctcggtaacaaccagtcgcctgaggcgtggggccgcctcccaaagacttctgggagggcggtgcggctcaggctctgccccgcctccggggctatttgcatacgaccatttccagtaattcccagcagccaccgtagctatatttggtagaacaacgagcactttctcaactccagtcaataactacgttagttgcattacacattgggctaatataaatagaggttaaatctctaggtcatttaagagaagtcggcctatgtgtacagacatttgttccaggggctttaaatagctggtggtggaactcaatattcgtgctcgcttcggcagcacatatactaaaattggaacgatacagagaagattagcatggcccctgcgcaaggatgacacgcaaattcgtgaagcgttccatatttttttttttttttccattttccctcccagaaacggaatcttgctctgttgcccaggctggaatgcaatggcgcgatcttagcttgttgcaacctccgcctcccgggttgaagcgattctcctgcctcagcctcccgagtagctgggattataaacatgcgccaccacgcccggctaatttttgtattttggtagagacggggtttcgccatgttggccagggtggtctctatctactgacctcctgatccgcccgcctcggcctcccagagtactgggattacaggtgtgagccaccgcgcccggcctttcttccattttctaatgtccaagagtggggaaactgtaagcgaagtcaccgaccccgttgagtattcctacttccaaccctattcccacctcctcctccaaaagccagtttaatgcaatggatgtggtgctcttctatttttatttttattttttttgagacagggtctcgctctgtggcccaggctggagtgcagtagcgcgatctcagctcactgcaacctccgccttccaggctcaagcgattctcctgcctcagcctcccgagtagctgggactacaggcgcgcaccaccatgcccaacaaattcttgtatttttagtagagacggagtttcaccatgttggccaggatggtctcagtctcttgacctggtgatctgcctgcctcagcctcccaaagtgctgggattacaggcgtgagccaccgcgcccagcctgttttttcaaaattttaatagcgatggggtctcactatgttgcccaggctgatttcaaactccaggcctcaagccctccttccaccccggcctcccaaagtgctgggattataggcgtgagccaccgcggcctcactgcatgatttttgcaagaattctgcaaatataaaactgttctaaaattacaggttaacaatggcccaaatatcagagtgttttttctggatcagggttcagttctccaagagggccacgcagtgaccttacagaaaatccccattcccaggcagcaggtagggatttaacgttcttagcggcccgggtgtggtggcacacacctgtaatcccagtactttgggaggccaaggtctgaggacagcttgagtttgagaccagcctgggaaacatagccagaccccgtctctacaaaaaaaaattaaaaattagcagggttggggagggaggggcgctgggcaaggtggttcaggcctgtaatccctgaactttgggaggctgaggcacgcagatcacctgagaacaggagttcgagactagcctggccaacatgttgaaaccacatctctactaaaaatacaaaaatattagctgggcatggtgacacatgcctgtagtcctagctactctagaggttgaggcaggagaatcacttgaacccaagaggtggaggttgcagtgagctgagatcgcgccactgcactccagcctgggggacagagcaagactctgtctcaaaataaataaataaataaataaaatagctgggtggggtgatgcacacctgtaggcccagttactcaggaggcaaaagtgggaggatcacttcagtctgggaggtcaaggctgcagtgagctgggattgtacct

SEQ ID NO: 1560695 - DNA, 4001 bp, Homo sapiens
cccacccccttttgtgaagtgtgtataaaagtcaagtgctacctttgttctgggccgtctttggacgtgagtcggcttgggcctgagtgcactcaatgaaagattctcctgctttaacccgagggctctctcctgtcgtcctgaatcccgcaacagtggctcacccctataatcccagcactttgggaggctgaggcaggcagatcacatgaggtcaggagtttgagaccagcctggccaacacagtgaaactgtctctactaaaaatacaaaaaaaaaaaaaaaaattagctgggcatagtggcgtgtgcctgtaatcccagctacttgggaggctgaggcagaagaatcgcttcaacccaggaggtacaggttgcagtgagccacgactgtgccactgcactacaagcctgggagacagagcaagacactgtttcaaaaaaaaaaaaaaaaattctgacccaagccacagagggatctatcctggctctgacccatccccctgcactgaggctacaatgtacccatctggaaaaggaggacaggggtagacggaaaaagagaggacagaaaggggacaatcacacagggagtacaaggtggctgctggagctcagccaggcctccctgaatgggaaggtttttcctacttctaaactgatggcaacattgctgagcacacagaagccaccacaaaagtgacttctgacaaaaacacaatcaccctcaaagtcctttcaatcccttaatgtatgagatgtttcctgcagctcaaacccaagccatcgctcattcacggcccctcgcagggaccccaaccaccccaagccattacttattcacagcccctcacggggacaccaaccaccccaagccatcacttattcacagcctctcacggggacaccaaccaccccaagccatcactcattcacggcccctcacagggaccagcaacccaccccaagtgggggaaagctcacttaatgccatcgagccaggtgacaaactcataggcgctgctggtgggagcgtgacattgtacgtaggactcgggagcgcagtccactgtgttgaacaccacgaggctgtactgggtccccccatactgggaggggaggacagaaaacttttaatctgggacctcaattcccttttcccttagagaaggaatcagggctcccagcttcccgttcctccagaaccaggaactcctcagcttcctccttcctcagacccagcaatctcggccccagccccttctccctcagacccaggaatccaggcccccggcccctcctccctcagacccaggagcccaggccccagcacctcctccctcagacccaggaatccaggcctcagctcctcctttctcagacccagcagtccagacgcccagcccttcctccctcagacccagggatctgggcccctagctccctcctccctcggacccaggaatccgggccccagcgcctccaccctcagacccaggagtccaggcccccaggccctcctccctcagaacaaggagtccagacccccagcccctcctccctcaaactcaggagtccaggcccagccctttctccctccctcagacccaggagtccaggcccccggcccctcctccctcaggcccaggagtccctagactcacgtctcccccgaagtccgtctcagcaggaggaccaccattaaaatacctgtgagggtaggaagtgaaaggtcggagtcaggcaagaaactgtgcgaaactgaagtgggagggcggggttagagtcgcggaaacagcactcactcgatggccgggagcaggtagtgcttgcggagcccctcgaagtagggtcccaggttggccgtaccctcaatcacaaacaccacgtcggccaccacgctcccggcgcgggccgggccctcggacccggggaccataccccgtgcggtacccgccaccaccactgcagccgcagccgacgccgcggaatgagcagaaatgcgcctgcgccgcgcgcgcgctcgcgtcgggcggtttagggctgctgggaatgctgccatgtttgtgcggggcacgcgctgaggcttcgttctagctccatcctccttcgcccccaccgcgtggaagactcagaaagggcatagttagcccttctaggggcctgatgggttagacggaattattgtcaaaagctaaataaattgaaagcggctcagtcagccgccatctttgagcggggcgtccaggtccgcctcttgtctcaaagggaggggcaggagacctggttgctatgcaacgcgtacgctgcccttgttttcgtttttgtgttttgttttttgtttgtttgttttttcgaaacgggagtctcgccctgtcgcccaggctggagtgcagtggcgcgatctcggctcactacaacctccgcttcccgggttcaagcgattctcctgcctcagcctcccgagtagctgggattacaggtgcccgcaaccacgccccgctaatttttgtatttttagtagagaaagagtttcaccctgtgggccaggctgttctcgaactcctgacctcaagtgattcgcccgccttggcttcccaaagtgctgagattacaggcgtgagccaccgcgccgggcccgctgcccttgttttgtaaccgttagattaagtttctggttctgttctttcgggcgtggggactaggggagggacgcgagaaggatccaatcacatcggcggaaacgaggttactaggcgacgctttaaggtcgtcctcaacttggaagggagggcagttgttttcccccccgaaaagaagccgaacaccaaaccaagtgcgggttgctaagcaacacctgagcgttgttttctgggagaggagccagaaactggcttagaacgtaaatacattccaggtggattaaaaatgtaagtgcaacaaatgaaacccgaaaactatctgaagggaaaaaatcttaatgactgccatggagtttcttagcactacagcaaagttagaaaacgtagtcttcattaatttttcccaaaagactgtataaaccaagttgaaaaatatacggccaactgggaaaatctttctagcgtgtttgttgacagaaatgtactacgcaaataaatcttactgatgaataacaatatagaaaaatagaaacacttcattactattatcttttaattttaatttttattttttgaggcagggtctctttctgttgtgcaggttgaagtgcagtggcccaatcttggctcacggcagcctctactcgcactggagccactcttcagcctgtggagcagctgggaccacagccgcgcactaccacttccagctaatttttaaattttttgtagagatggggtctcactgtgttgctctggcgtgtctcaaactcctcggctaaagcgatcccaggtgttagccatcgtgccctgccactttatatttgttttaatagaaagaaacctgaccagggccggacgccgtggctcacgcttgtaatcccagcactttgggaggccaaggcgggcagatcacccgaggtaaggggttcaagaccagcctggccaacatggtgaaactccttctaactactaaaaataaaaaaattagccgtcctggtgggcgtctgtaatcccagctacttgggaggctgagtcaggagattctcctgaacccgggaggcggaggttgcagtcaactgagattgtgccactgcattccagcctgggcggcagagttagactccgtctcaaaaaaaataaaaataaataaataaaaagaaacctgactagtttcacacaaacacacacacaaaattttgaatggccagtaaatattttaaaacataatcttcggccgggcgagatggctcatgcctgtaattccagcactttgggaggtagaggcgggcgcatcacgaggtcagtatcactgggcgtcgtggtgcccacctgtaatcccagcaactcgagaggctga

SEQ ID NO: 1560696 - DNA, 4001 bp, Homo sapiens
cagtgctaatatctcagcaacctctcagactctccagaaggaaagcgagtgcgtgaaattaaaaaaattaccttccggctccacaaaagatgcacaagtcaccaaggctatttttttcatgtcactagttttatcctctaatatttcagtcttaaaattgcagtgacaccagttactgcaaaaaggacattctagaaggttttatatagcttgtgcccactccacccccaaagtcataacaaaaatgtacaatataacatttgttaaagacaattaccatcaagtcaatgttaatgggacctgaataccagggataagagaagtacttatatcacagcaaccagagccttcgaaaaaactcataacccttcagtcttaaccaaaaattgtataagccaatgtgaattattcccaaaacatcatcagagtgaagcatattgctaagagtaatcagccaagctcatgtaaaaatgaaagcaaaaacccctacggtgagagaaacctgagttacctggccaagccaaagatgatatttttcttccattcacagcacattaaaaagtgatctcaatggccacttcctgggaagcagggcctcccctcatacctggatgctactgcatcttcctaccgccctgctcctgccgcgggaagaatgacccctactgccaagaaactcttggagaaaatatgagaatagatcagtcttcccccccacccccccacccccgcaacaacacacacacacacacggaaggggagggggcggtccctccgcaaacagtagcctcagcaaaggggcacccgaggaagcgacactctggagttaaccccgacagtctgggtcaaaaaccaccaggctgagacccccaggtgagggaaagagcctactgaaacagagctcttgggtaaacgggagagaaaagtcctctttaattcactacctaaaaaatggagctctggcttggtcagagacgcaatgggtactgaggcccagaaaggcaacaggaaggatcccaccctccccgagatcatctatcgtcggcagcgaccccaagagggttttggcaaaggcgtgtctagtcacagaagggagacagactctccacgtaccctaggtacccggccaggggcaaaacagactgggggttctctccgaagccaggaaggtgctgccagccgagaggagggggaagaaggacttccctgatcacccaggaggccaagacatgggagacataggttccccgagtcataccccggacaccagttgcttcacagcccttctccctccccttcccgctccgggagggcttcccgggggtctcgggtcccggagggagggcgaggcagagaagcttcgtccagagcagtgagggtcgtagagctggagcagaaagggaggaaaaactctagcctcagctcccccgtctgcttcctccgcccaggccgcacggaagcctcggcctcacgtaccgagcgctgccgggctgcccgacctgcccccggcccgggcccgagaagcgagaggcagggatggcagcggccctcgaggggaggtgggcgccagacgggtcccccgaagcccggtgggcgaggggtacaggagagggggagggtcccgggcccatgcggcctccgtcccagctcgcgcggcgggtacttacgttgctctgggggtcgatggcctgcagcagccggtccctgatctgctgcggagacgccggagccgctgtcattgcctgggcgaggcggggggttgcggccgggccagcgggcgggcgggctgaggcgggggacgggggtcactcactcgccggcctccgggagccggagccgcatgttccccgcggcgccggggggttgggggcgcgcggggtggcggagaggggagccggggccgggtctcggtcccgggccgccgccgccaccaaaggaggaggaggagccgccggagccgccgccgctcgctgccgccgcctcgagaaccaaactccagtgagctgcccccgcgcggagtactctgggtagtccgcgccgcacgcagcgtcggcgccacgctgaggaggttgggagatggggcgggcggagacgccaggcctgggcggggctgcccgtgtgccacgccccgcgcctccgcgcaagcgcgcgcaggcgcactcgtccgcccgtgacgccccgcccagccgcccggcctaggcagccgttgggaggaggttgggcggggcaacggcccccgtccaggtcacggggcggggctttctgacggaagcgcgcgcgcaaagagtccttgaacccggacgctcgcagcggctacctcggggcggggagggcggcgggaaaatccttcctctgggagagccttcccggcgcgtgactgggggacgggagtcgcaggctgagcagctgccgagttttttgtgagggcgagggaaccagacgtccacgttgtgattctgcgcgcagaagggtcatcggagtccgggggtgtcgccgcggcccccccgcccctcagagggtgtgggaatgggtgtggtggcagggcgggggtctgcaccgccacgcgcgaccccgatcgcgaaaacgtgaggcggcaaagcgcctctggcagaagccgcccgccgtagctgggaaagccggaggttgcaaatctgcgtctacgcggcggcttctccacctcggcaccactggcatttgggcgggatcgctctgtcttcggggcgggtcccccgatctgtcggaagttgagcggcatctctggcctccgaagcgccccctcccccaatctgcagtcattgccgccgtcccttgtgggggcacagtccccccgcccccccaccggcagagaaccccgtgattgaaagacccttctacccgcctctgccttgagattctgtaaaactgagatgctcattctcttaaccaaacacgtcacagaggaggaaacggaggcccaaggtcacctagacttcggggttaagcccagaaccgcagatgtcaagtttaagggcgcccctcctccctccaccctgtttattgccttggtaattgctcccctctctctgggagctctgttggaaatgctcttgtgagacgggatggaaaggcaagctcggcggcctcgggagaaatcttttttttcccactgttacaggaagacctagatttaaaacaggaggaagacagctgatgagaaccacatgtgtgccttggagctgcccgacacctgttagtcttgtatttgttgtgcttctgggaaatattttcatttgcaaaaacggctgcttctgcacgtggctatggttgcgtgcttctgcacatgtgaaaagttttacatcacacttggaggagaaaagaaacacgggcaaaacacttgtcatttactgctcccaacctcgcccctcccagaatgcggtgcattgtgtacatggtgtacatggtccaagttggaaactggcccattcggagataattctctcatttctgataagcaaaataagcaaagccttcctcaggcatattctggtcttgcctctctcttaatttctaactcggatgtacagtatctttttttttttttaataaagtattacataggaggcaatttattttgcatgggtcaggttattttaagaaacatttgggccggacgtggtggctcaagcctgtaatcccagcacttcagcaggcggaggtgggcgatcacttgagctcaggagttcgagactagcctggccaacatggtgaaaccccatctctactaaaaatacaaaaattagccgggcatgctggcgcgcacttgtaatcctggctactagagggggctgaggcagaagaattgcttgaacccgggaggcggaggttgcagtgagccaagatcacaccactgcactccagcctgggcaacagactctgtctcaaacaaaatgtggggccagccacggtggctcatgcctggtagctcatgcctgtaatcccagcactttgggaagccgaggtgg

SEQ ID NO: 1560697 - DNA, 4001 bp, Homo sapiens
aggagttcaagaccagcctggacaacatggtgaaaccccatctctactaaaaatacaaaaattagccagatgtgctggcacgcgcctgtagtcccagctacttgggaggccgaggcaggagaatcatttgaacccgggaggcagaggttgcagtgagctgagactacaccactgcactccagcctgggcgacagagcaagactctgtctcaaaaaaaaaaaaaaaaaaaaaaaaaaaaaaaagaaaagaaagaaagaaagaaagaaaaggaaaaggctgggcatgatggttcatgcctgtcatcccagcactttgggaggccaaggtggaaggactgtttgaacccaggagtttgagaccagcctggacaacgtggcaagaccctgtctctacaaaacaacaacaaaaataaaataaaataggagaagtgattcgtgaggctgaggggatggctagaggccaggagtttgagaccagcctgggaaacatagcaagactccgtctctataaaaaaatcttacaaattagccaggcatctgtagtctgtagccatgtctgtagtcctggctacttgggaggctgaggcaagaggatctcctaactcaggtgttcaaggctgcaatgagccaagatcgtgccactgtagtccagcctgggtgacagagggagaccctgtctcaaaaaaaaaaaaaaaaaaaagtaaatatagaaggtgaggtgggcggggagcaggagaaggaaagatgaatttcaaagactgggaaggcaatagaatatcctggtaaagggggctgcactcactgtccattgtcgatgttagtgttctgaatcaagttttgggccgcaaccttcatcaaggtctagtcaaaacaaaaacaaaacacgtgggaaatggaaaaacaaaagggaatacctctggcagatctacactctttcttgagatcactcagtctcaggttttcttttcaactggcaccttccctcctgactttccaaagtaatattcgtttccattcctatagctgtcaccactccatcctcccagaggcccgctctcacctgagcttctcgccaataacctaagggtcctccctcacctatcaatcaagggcagaatctccgtataagccagtactctcctcaggctttaacgaccagagcccagtttctcctttaaacaacccctcactcaagctccggccagtcccagcctcagcatcagcgctgatcccatctctgccgagcttcgcttaggtctcgcagaaaacaacagttttatttatttatttatttatttttttgacggagtctcgctctgttgcccaggctggagtgcaatggcacgatgtcggctcactgcaacctccgcctcctgggttcaagcgattctcctgcctcagcttcccgagtagctgtaattacaggcgcgcgccaccatgcccggctaatttttgtatttttagtagagacgaggtttcaccaggctggtcttgaactcctgacctcaagtgatccgcccgcctcggcctcccaaagtgctgggaacacaggcgtgcaccagccaggccaaaacagcaggttctattcctctttctgcttagcgctctctccgactaacctggccctcggcctgcccctctagactaccaaatccagtttgcttctcgctgcttaaggccaatcacctgtagactctccttcagctgcgggatgagcatcttataacgctgcacaggatcgaagtcctgttgctgttgctgcaggaggccgctctgggcagggcccaccagttgtgctggcggttgcggctgctgctggggacccgggccgccagccgaactaggacccgatacaccagcagctgaggaagccgctgaagcttgctgctgggatgcagccatcttcctcgcgtagaccgccggaagtgcgttacgactgcgtctctccccgttgcttttcagcatccctatttctagtccccgtttgctagttagtcccgccccctaggcaattaagccaatggaggggaaggaggtgccccaacgttacgtcactctcaaatctgcgtccagactgagatatctctccaccaatcacagaagcacctctctccctcgctccgcccttcacccagacgctcgccaatccgtgtgtggttccgagccggacttcatttccccgaaggcgtcgcggcctgaggagacccgttgggtcctcagcgtcttggcggcagttggtggaaccggagcttcgagtccgtccccggtgctgcctgcgcgttcacctgagtctcgctggagctcttctcgcccgcccacctcatctcaacccactttccgcggggagcggcgccaagctgggccttcctcggatcaggcgtcccctgaagtcggcacgcccctctgcgtcccccttcggtcccgctaggaccccgtccgggctgccgtcgcctcgtcgctatggcgcccaccatccagacccaggcccagcgggaggatggccacaggtaggcgccacgcttttctgttgcagcaaggcgggggatcgggagagggtttctgctgaacaacgtcaccagcccccaggtctgcccgtgacgtcatgaagcgctcacctttgacgaagggggcgggttccttctgagattcaggtgttcccctcctccccgccgtgcagttcagggattaggcttttggagactccctccagaagggatccctccagtcaaccgtttggagacccctcttccgaagacgattgagtacatggttctttattaaagcacttgaagccatctcctgcaaaagggattgagcacttggccttgttcattaaagcttttgggggcatttcttcctaaataaattgaacatttgtctccttccattaaagcatttggacactccccacaccaccacccaaagaaaccagcatttgtcacccctcctaccttttgaaaggttggggaagcctttttcattctcctgtcaatcccgtcctctccacctatcactgtttctttcttctccactaggcccaattcccaccggactctgcctgagaggtgagccccactgtgctttcccaggagcggtggggcagtggggctgggagcagaggtggggcagcgggggcccacttttgagccactaatgttcctaggtctggagtggtctgccgagtcaagtactgcaatagcctccctgatatccccttcgaccccaagttcatcacctaccccttcgaccagaacaggtgagactaaggaatgggaaaactactcaggtatgagttccttgaaggcagggactgcttgtctcgttggctgctgtctgctcagggcctagcacagtacctaccctagcacatagtagtagctgctcaattgttaatggagcaagcagtgtccaagtcccttcccactggggagccagctttcagactctgccatgggggacacttcattctgagttcctccccagagaagctccgcctctgggaagcagggctgtgaggggtgaagctggaatccaaacaccacaataggtgtttccccacccaggttcgtccagtacaaagccacttccttggagaaacagcacaaacatgacctcctgactgagccagacctgggggtcaccatcgatctcatcaatcctgacacctaccgcatcgaccccaatggtgtgtggggagacagggagggtctgctctaggtcagcaaaggctcaggcctgggcctccctcatggtcctcctgccccccgctctcctctagttcttctagatccagctgatgagaaacttttggaagaggagattcaggcccccaccagctccaagaggtgagtgggtagcaaatgggtactggagactggctcaggtgggccctacaagcaggagggcagtggggtcctgagatacctgatttcccaccccagatcccagcagcacgcgaaggtggtgccatggatgcgaaagacagagtacatctccactgag

SEQ ID NO: 1560698 - DNA, 4001 bp, Homo sapiens
tgagatggagtttcactcttgttgcccaggctggagtgcaatgacacgatcttcgctcaccacaacctccgcctcctgggttcaagcgattctcctgcctcagcctcctgagtcgctgggattacaagcatgtaccatcatggccggctaattttgtatttttagtagagatggggtttctccatgttggtcaggctggtctcgaactcctgacctcaggtgatccgcccgcctcagcctcccaaagtgcttggattacaggtgtgagccaccgcgcctggccatttttttgtttcttttctttctttttgtttttcttttagagacaggatcttgctctgtcacccaggctgcagtgcagtagctcagtcatagctcactgcagactcgaactcctcggatcaagtgatcctcctgcctcagcctcccgagtagctgggactatacacataagccaccacacctgcctaattaaaaaaacaattttttttggccagatgcggtggcttactcttgtaatcctagcactttgggaggctgaggcaggcagatcacatgagaccagcctggcaaacatggtgaaacaacgtctctacaaaaaatgcaaaaattagctggtcatggtggcacacgcttgtagtcccagatactcgggaggctgaggcagaaaatcaatcacttgaacctgggaggcagaggttgcagtgagccaagattgagccactgcgctccagcctgggtgacagagtgagactctgtctcaaaaaaaatttttttttaaagccaggtgcaggggctcacgcctgtaatcccagcactttgggaggttgaggcaggtgaatcatttgaggtctggagttcaagaccagcctggccaacatggtgaaagcccatctctactaaaaatacaaaaactagccaggcggtagtggcacgcgcctgtaatcccagctacttagaaggctgagggaggagaattgtttgagcctgggagctggaggttgcagtgaacaaagatcaccactgtactccagcctgggcgacaggatgagaccctgtctcaaaaaaaaaacaaagaaagaaaagaaaagaaaaagaaaatgggggtctcactatgttgcccaggctggtctcaaactactgggctcaagtgatcctcctgcctcagcctccaaagtgctgggattacaggcatgagccacagtgcccggccagctatttctgactaattgggtctgcaactaggggttagggtggccaaggacacaggtcacccatatctgcagccctggaccccaaaagagatagggagggaggactgtgaccgtgaaagtaatgctgccaccaccttgtcatgtgctaacaaccacacggggatgtgactcttgttcctgtacccattgaggcaaagggaggagagttggccccggcagctgttgctcccccgttccaaggttttgtgcctaccatcctgctgtgacaaacgagtgtacacccacagcaagaaggcatagggttgtgcacaggggatgcgctaatgctaaaggagtgcacaccaggagagagggacatcacatgccacatcacagagctcacagacacataatagggcctcacagcaccatgattttggacacacagctaactctccaactccccaactcacaccaaatctcagacgcagagcccttggacacacaacttccagacccacacccttcagacacacaccccttggagacacaaccccctcctgccacaacctcggggactcaccaccccacgacacacacccctttagacacacaccccaccctgggacgcccagcagtacacccggacctccaaaacccacccagcccgcagaagccgttcagaggacaccacaggagtctcaacccgatatgacacgcacctgctcggcctgggccctgggacgctgggcgcacggacccgcggcggctgcacgaagatcaggggcccgcggccgcaggtgccttgggagcgggcggtcctgcccccgggagctgattgggcgggacgggcttatttgcatacagggcgtcaccctggaggcggcgatgggcgtgcacttgggcgtggccccgacccgggagttcatgggcctgggactcagacgcgaaaggatgctggggcgccatgggtgggggcgcggataaggaagaagcagaacggagggagggggctggatcagactggccaggctttccccgccctcactgggcgcccttgaccttactgccgacccctgaccctactgtgaccctaaccctaattctaaaccttttcctaactcggcccaacttgcctggattgattccatcctgagtgaaatagactccgatcccggaccccgtcgccccgaggaaccaagcccttctcgcaggcaacgctgaccctcgcgctcgctagaatggaaagactgcaagacggggctctcgggtggcctgtgtggcctcactcaactgtgcctcctggggccagatatgtgctcccacagggagtgacagaccctccgcagctactggtccctcaagcccgcaccgcctgcccctccacagtccaagacaaccacactgcttccaccaaccacttccctctccttacctctccccgctaaaggctgttttctaaacttcaaaggtcagctgtgaggggccttccaggattggaccccagcccagaactctaaatccaccccttcccctgggatcccagcacaggccagacccacaggaagatcagagcaggggttggtgaatgtatcaatgtgaaaagaattacaggataaagatggctctgggatgggcacttctggagaagcccccggcccgtctggggcaggcaggggatccatgcactcccctaaccctgtggggtcaggcttgggccagaggagggatgggaggctgggacaggccagaattggggcaagggctgtgccagaggagtcagggagggtttctcagaagagagggcatttgtgctgggctttcaagtatgtgtaggagtttgccactaggagaaaggtttttcttgtttttttcttcaaggcaggatctcactgtgttgcccaggctggagtgcagtggcatgatcatagctcactgcagcctcgacctcctaggctcaagcaatcctcccaacttagcctccccagcagctgggactacaggcaggccaccaccaggtccagctaattttgttttttttaagagaggatgtctcactatgttgcccaggctggtcccaaactcctgggcttaagagatccttcctcctcggcctcccaaggtgctgagattacaggtgtgagccactacacaagacccgagaagggctttttcaagagggaaaagcacttgcaaaagtgcagaggaagagcatagaacattctctggccggggaagatgaggaaggtgaagccagtatagcgggcagggggtgaagaggaggggcagatacaggtggagagcaatggggctgcaaagctgcctggtgtccatctcctccagagaagagaggggctggtcccccaaactcagggggaggcatgtggcagatgctggagtgtgggggacactgagacagggaacagggggcctgggaggcttgtgtctctccccacacctcagtttacccgtctgtgacatgggcagtgtgggcctctagtctgagcacaactttctctttggacatgaaaactatagagttcatactgtgtcatcagtgggtccctcctgtccccatccagtgcccagtgccatacactggggtgccccaaggacatgccagggcctgggccaggctgggggcttctgcctccactccatggtgcagaacaaggcttggggagtgtggaggtggctggggagccctgggcccccggagggctgctctgtttaccggaggccacccgcccacctctgatgcaacaggcaggctctggttacgtgaggccggcagctgggccagctctg

SEQ ID NO: 1560699 - DNA, 4001 bp, Homo sapiens
cagcctgaccaacgtggagaaaccccgtttctactgaaaatacaaaattagccaggcatggtggtgcatgcctgtaatcccagctattcgggaggctgaggcaggagaaacacttgaacccgggaggcggaggttgccgtgagccatgatcacgccattgcactccagccttggcaacaagagcaaaactccgtctcaaataaaaaaaaagaagaagaaaggtgagcataacagacaaggcacggtggctcatgcctcatactcatgccctccgttatccatggttcccgaatctgtggattcaaccaaccgtggatggaaaataggaaaaaaaaaattccacaaagtttcaaaaagcaaaacttcaatctgccctacacgaagcacttctttgaatccatgtgaatgaagtgatgtgtaggcctgtattatgtattctagatgtgagtaatctagggtgatttaaagtataggggattagctgggtgcagtggttcacacctgtaatcccagcactttgggaggccaaggtgggtggatcactcgaggtcaggagttcgagactagcctgagcaacaaggtgaaaccccgtctctactaaaaatacaaaaaaattagctgggcatgggggtgtgtgcctgtaatcctagctactcagggggctgaggttgcagtgagctgagatccccccacggcactccagcctgggtgacagagcgagactccgtcaaaaaaaaaaaaaattaaagaattagcctgatgtggtggtgtgcacttgtagtcccagctactggagaagctgaggcaagaggatcgcccgcgccagagagatcgaggctacagtgagccatgatcgcgccaccgcaccccagcctgggcgacagtgtgataccttgtctcaaaaaaaaaaaaaaaaaaggaaacaagacgcacagcgattactacgccccggggattcttccaatgcattacaaatatcaggttgttgagttttttttttttagacagggtctcacttgtcacccaggctgggggtgcagtggcacgaccgtagcccactgcagtgcagccttgacctcccgggctcaagcaatcctcccaccttagccgcccaagtagctgggaccacaggcgtgcgccaccacgcccggctaatttttgtatttttttagagacgagatctcactatgtcacctaggctggtctcgggctcaagcgatcctcccgcctaggcctcccaaagtgctgggattacaaagccaccactcccagcctcagctactgaattcttgaaacaatcctggggggaccggtaattaaagcagacacggagcctttctacaggtttcaaaactagtcagcggcagagctgggattggacggcagttcaatcactgctcctcgcacggtccctccgcgcccggcctttgtcaggccgcccctccacaagttaccggccccctctgtcccgcccgcaggcccgcaccacctttcttccccttgagctgcatctccggctcctccatagcgaccgcggccgagcgaaccgggaaacggcaccggaagcccggaggttgggacgcccgcctaagccttccctgctgaaaccggacgccgcacggctcctgttccggtgtcagagggcccgccctccccgctcctcagtctttgcggacaagaaaggggctgtgtgagacgcagggaaggaggcacacccgggggtggcgcagtgaggagggggcgcgacggccaggaggctggtggagcgacacccaggcaggagagggggaagaactctctccctttctgaacccccttttccttgagagacgagttgggggagtcctccacgcattacccactcgggccgcaaaaactcccttctttagccctctgcccccgcccttgcttataagcctttgagaccgcagaagggaccttgttgtggaacgggacggccaaggtacgctgcccctttaagttccagacgccccgcgtacttcccctacttcttcttcttgagatagccccgcccatctacccgaagccggagccaattggctccctctggaaaaatctgtgggcagggtaaaggtgagcgggcgcaggcgtagtgaaattctcagagccctttaggccccgcccattccctccgagtcggtgaggaggggaaaagaaggcgcaggcgcaactgccctcccaggaccccagcggaacccacgccctcccctaagtcttaaagggccagaggcagcacttactgcccgggcccttcctcacttttggggggcgggggtgcgcaagcgcagtgggggagctctggggtgggggtagcggtcgagtatcaagttgctttctgtcccggcagaggaagccagatcgctgagggtccggtctccagtttgcctcctgctatatccattggaagagaaaagtttgtgacttgggcccccaagttttgagagaactgggctttcggcgcggggggacagaggaggctcgtggggaggtgagtggacctcctggatcgatttaggaggctcgggtgggactgggaccaatcgcacctttgttgagccgtcactcattatggggagcccctcccaacaaccatagcgaatatttattgagctccacgcttagcagatcccccgataagctatgtacagacataattcgttgtaggtctcatttccacattttgtcgtggaggaaactgaggctcaaaggttaagtcacgtgcccaagttctcacggcctataaattgagggattcgaacccagacagctgaccccagagccccggcttttttttcctttcttttttttttttttttttttttttgagacagagtcttgctctgtcgccccagctacagtgcagtggtgcgatctctgctcaccgcaacctccacctcccgagttcaagcaattctgcctcagcctcccgagtagctgggatcacaggcgcccgccaccgcgcttggctaatttttgtatttttagtacagatggggtttcaccatggtggccagcctggtctcgaactcctgacctcatgatccaccctcctcggcctcccaaagtgctgggattacagccgtgagccactgtgccctgccagagcccaggctcttaaacattgcacattgtaggtgctttggtggtggggaatggtagacctcgaaagcagttggactctggttttcatttccctggctctggtaattaacctggacctcagtttacccaccctcacagtgcaaggctaggtatgcagtcggtgcctactttattataactgttgataattattgtcatctctccccttctgacacctccgccagctttccccatggagcttacccagcctgcagaagacctcatccagacccagcagacccctgcctcagaacttggggaccctgaagaccccggagaggaggctgcagatggctcagacactgtggtcctcagtctctttccctgcacccctgagcctgtgaatcctgaaccggatgccagtgtttcctctccacagggtaggatacctcctctgggattagccctctgggattccatgatgatggaatgtcaggcctcacatggaacctgtgtcttgctttcgtttttgttttgttttgttttgttgttttttgagatggagttttgctcttgttgcccatgctggagtgcaatggcgtgatctcagctcactgcaacctctgcctcctgggttcaactgattctcctgtctcagcctcctgagtagctgggattacaggcttccgccactacgcccagctaattttttgggtatttttagtagagacggggtttcaccatgttggccaggctggtcttgaactcctgacctcaggtgatccgcccacctcggcctcccaaagtgctgggattacaggcatgagccactgtgcccggcctgtttttgttttttgatacagggtctcgctctgttactaaggctggagtgcagtgat

SEQ ID NO: 1560700 - DNA, 4001 bp, Homo sapiens; identical to SEQ ID NO: 1560699

SEQ ID NO: 1560701 - DNA, 4001 bp, Homo sapiens
gagtttattgggtggaaaaggaaaacaaacagcctcggagtgggtttgtctctcccactgactgggagcccagaagggtagggctggggcctttcctcccactcctgacagattcctattggtcctttaagtctcagcttagacatttcctcctccaggaagcctctctgttctccccggccccagatcaggcactttctctgggctctcccaggcctctggggttcctccatcaaagaccactcttgtctctcactattaatgtgtttgtctccccaactagactccaagacctaagtcaccagggattgctggagctgtctcagtctgggctatgtccaatgggaaacataatgtctggcacatgaatgactgaagaaaaatgcttttattgaagtacttcacaaataacaacaacaataatcctaatgccatttattgaacagttactatatgccacacatcaggcatgttaaatacctgttttcatttcattccaacaactctatgaggtgagtactgttgttatcccatttgtgggggaaggaaacagaacctcagagaaagaaaaccacctgctcaaagtcacaaagctaataataagaagccaggcacagtggctcacacctacaatcccaacactttgggaggctgaggtgcgaggatcgtttgagcccaagagttcaggactagcctgggcgacatggtgagactctgtctctacacactcagttacttgggaggctgaggtgggaggatcacttgagcccaggaggtcgaggctgcagtaagtaaattgtgttggtaccattgcactccagcctgggtgacagagtgaggcccccatctcaaaaaaaaaaaaaaaaaaaagtagtagtagtagaaccaaattcaaagccaaatgattggacccagaccctgagttcttaacagttactcagaaggcccggcactgatgctcctgtcttgtaattgtaaatctgggtgtaggtgcatctcccccaccagacttggaggccttccagggcagggcccaggttggctgcaaccctgggtgtcaggcattttagagcaaaaggcctggaccagaaccgagctctgggaatgtggtgagtggatgaatgcacacatgaatgaactaccagcgaattagtgagtgacccacgcggccccactcaccctcgatgagccactcgcagttgccattgacgctgtagttgcccgcaccatccgtcacgaagcctggcgcctcccgcagcacctgccgctgccccttgcagtcccccgcccgggccccaggggacagcgaccccagcacggccaaggccaaaaccagtgccatggccagaaccttgcccagggccatcgccgcctcctgcactgacccttagagcggggacaggccgtaaaaacctggagaggaccctctacccggggtgaggccctgcaaatgcgacctctataggcataacatgaccttgtagatcgaagaggtcccggagacccggcagtcccggcgaagggtacggccactgctgacaggctctggaagccgagggctgagccctatagagcgatggaaggccctgtatatggagtcattatggacggggccgaaccctagggaccgtaggagtcccctatagacacagggctccatagggggccgatcccatgaacagtgcccagcattacggactcaggctgctgcaggccaaacggaccttatagacgggtgggtccccagggggcgaagggctctacggcccggcaggagcctccatagaggctgcgggccgggacaggctaggttcggatggtccaggagagactcctccagccgggggcggggcgcgagcgggtgccgggggcggagcccgtcttcaggggttcgggcctggaccccacagacccaatccctttgctcacccaccctcgcctccctccgaagccggatgggccagatcagagagacgaggggacgcttgggccagagcggccgcgggaagacccgctgtgggagggcgagggggcgggagccgagcagccgctgtgggagggacggcgaagaggaggcgagaagttacagagcggccggtcagagcggccctgggaggactgcggagcgcccaaccccaaccctccataaagggagacttccggggaaatccccgcccatttgttcccaaccgcatgcgcagcagcgtcctcctggagggagagaaatacacatatgcgcagtgctaagatcgtaacccaaactctgggtgcctgtggttcagcaaagcatgggccactggagggcgcctctacctctgagtgaggaaaggaaggcaaaaataaaggagcggtgcaagaccctgctagatgtttgatcatcttcaatgttcccacattctggggcaacataaagatcaggttatacaggcccctgcctccggttccaaattcccatttcacagatggacacactgaggtcccgagcctgacatagttctggctcagccccgccgctgaacaccatcaagatgcaaaagaagccatgttatagataaaaacgaatccttttttattttggcaagaaggggtaaaatgtctttctgccagggacccgagggaaggcccccggaatggagatgcggcagatggagtacgggtccgaggtcacagatccgagggagggtttcagggtcgagaccagcatcgcaatatccatcccggggtcgcagagtcctggagagtcacaggcagggtcccggcggtcaccacgggtgttccggagtccagcggggtcagaggtctcgaagggggccagggggccggaggtcacggaacagcgggagcccagaatccggcgccgctcggggcaggggctgagggaggggacggggagagcggctcccgcgggaccgtttggcacagaggggaggggggcgggacgcagcgtacccaacctgggcgcgcggggtgggaagggtcgggaaggccggggatgggcgagctctcgggccgggataaagcaggggtccggagcccggccggggcccggtcatggcccatggggcaggggcgggcaggggtgctcagaccgggggtgcagtgcccccggccgtgtgcatgctgaagtattcggtgaagccggtgtgcggcgctgccgtctggggcacgagcggctggtagggcggcgtcgggccgtcccagcccgagtcggccgccttggggaaccgagcgggaagtgggggggaggctgcgcccggctcggccatggtcaccacgcggcccctcggggccaccgccgccgccaccgctgtctcctccacctgcttcccggcctgggaggggggtcagggtcagaggccgtccgggaccctcggggggcagatgcggccccgaaggcccgtccccctcccccggagaacccttccaccccaggtgtggacgcacgttgtcagtcagggaaggactgggtggcggggcgcctgggcagcggggccaggtactcaaagggcggcgtcggggcgcgcggggcgaactccggcggcggccggggagctgggggagagccgcggaaggcgggcggtgggggcacggcgcagggagtctgcgggggtgtgcgcaacagcgccagaacccagtcaggcagggtgggcgcgggcgccaggggacggtcgcggcgcggtgttggggcgcggggagtgcgaaaggcaggaggagggctcaggggtccgggcgctgggggcggcggcggggccgggagcggggtcaggtactccaggggcggcgccagcagctcctcgggcgctggggccgcggggcttacggaggtggcgggcggggggatggagaagagctccgtgaagttgggcaccgagtcgctgataaacgtcacgttcccatagacgtgctgcgggaaggccttgtcagcggattggctccctccgggtccagggactccggctgaagcgatctgcgacgtgcgcacgtggtacgggaagttcttg

SEQ ID NO: 1560702 - DNA, 4001 bp, Homo sapiens
tgcctcggtggggagtgaggaccccgtccaggcagagattcctgacatgtgggcaggaggacccagagggagagacggcagggtctggctgggagggaaaagagatggagaaagtggcgtgagaagacagtgacagagacagagagagagacagacagagagggagatccatggacacctcctgtaggaaccgcgcattgttgtacacaaagtacacatacgaagcctccctgtcttctatttcatttcacagttggcagataagcgcatcagagtaagtctcaacaacatgtcacactccactcgccacgtgaatctaccacacatgtagacacagccatacacaccaacccacgtgcacactcatgtgtcagtcacacccaaatccccccccccacacacacatgcacacacacatgcacacagcccaacaccaggcacaagaatgaatgcatgattgagacatttggcacatggatgaatgaatgaatgaggcatttagcacagggcctggctcatgctgtgagcacttgttgccggagagggtcactccgcaccaccatacagacacgattgcgcacccaagagaaacaccattatggggtaggacgaccgcgtcctgtcgtcacagaaccatgcacctgggaagccaggggcaccttcctctcatcaggtcaaatcccttcctcagtgatgaagacacggaggctcaaagaggcagcaggactcgcacgggaagaggctagaacgttcctgcctcggaccctcgcctggctgggcaccctggttctgtgtgtcccactctttccctctccctcttctcctaacttctcctgtgccctgaagttgaatccaactgctccccgctgctcaaggcactctcaccaaaagcggtcctcacagcctacccggaacccccaaaacgggcgcgcgcctcctcccctgtcttctatccccgttcccatccccagggagacaggctccgtggggccagcagcctggtgagaccacctctcccacccctgtcccactcctagccctggagaggcaggggcggcttggaacaaaagtagagcgaagggaaggacggaggagagcagaaaaaaggggggacggtgaggtgcgggcggctgagatggaggaggaagcccaggaacagaggagagagactgcgggtgggggagggcagagagagggggatagagaggcagaaagaggggggagaccagggacagagagagggggacagagaggcagaaaggaggaggagagtggggcagacagagggggacagaggggcagggagaaggagaagctaaacgatggggaggaggcgaggccgagggccaggaagagacacttgggggcagagagggggcacacagggactgggagacccaggggcggagggaggggcagagagagagcgaggtggtgtagaggacggatgggctaatgggggccagcgccggagagtgggggatgcagggacagggggtgcggaagcggccgggacgcggggtccccgccccgagacctaccctccgggccatgggctgaggccggcggcagctcctgggtccctccagagcctggccgcgggggagggcgcagcccggggccgcagcccctgacggcccgcggtgttgacgccagggggtgggcaggaggccaggcgcgcgcccccccacccccgccgccgtcagcggcaggcgccgggccgggtggggactccgcgcatggaccccggcccccgcccccagcgggggtcacggccaggagcgcatcgccgccggggcgggggcagcaggcgcaggcggggcgcccgaggccccctcctctgggccccccccgtcccttccccggctctggagggaatcgaaccgtcccgagacggacacaccggggaccgcagggggcggggggcggcccggggcgacggagggtccggcggcggctcaggggtgctggcagccgcgctccccgttcccggtctctcccttgtcttgtggaaattaaacagaaccaccaaggagcgggataggggatgagccagagtgagcctgcagagctacagcacgagggattggggttagggcagcagcagcacttccggtgggagtcggggaggggcaggctgtggggggaggagaggaagagaccgcggccctggtgcccccaggcccctcctctcctacccagggctggggttcctgctccgggtttctcagtctccctctttcccagtctctctctccttgtctctctctgtctccgcttctcccgtcctttctctcctctggctctctgttctccgagccccctggacacaccacggaccccctccctggccatctccaggggtcacgtgggaatctggagtctggtcccaccgtaggctctcccctctctgaggctcgattccccctctgcaggatgggcagtgcgctgggggcggcgggggtgggctgtggataacggagaaacagttaagctagagggtgccaggactcagggtcttggctgagtctgggggtccccatgccggcgggctctgcccccgtggctgtcctgcggtgaggctggccgtttaaggcagtccgaggggaagggtctggaggccttgcctttcctcaaggccggcgcaccccagataggggttttggagcagaaaattaatttaaatcactttttaattaaagacacaaggccctttggtctgctccacccccacctcaccctcagccaagacttggggtgagggatgcaagggttaggagtctctggctctatttgcttttttggggggtggtgcatgctaaggtccccttagcccaggctgattctgaaacctagaggagcaagtgcggcctcatctgacggccagtggtggggggcgtggacagagcaggaagggagggagggggcacctgggatggggatggggcctaactggagtggggagggaggtaactccagtgacggtgtgattcagagagagagagagacagagacagacgcgggtgggaggagagagagagagaggtgcagacagagtgagacagacaggagggggagggagtgggggacaggagctccaatagagaccctggagtcgtccctgccacccccaaaacaagagcagggggcttggactctgaagcataaatctttctaattaaagaaagagacgagctgttgggaagggagaaataagtgtgtgggagagaaattgattgggggaggatggaggatgccggcgggggacggagggagcaggggggaggctccggctttctgaggctcttcctccagtctttccctctgtctgtccatccgtctgtctgtccgtctctgtctctcgctctctctctctctctctcacacacacacacacacacacacacacacactctctctctctctctctctctctctctctctcttcctggctgtctcccttaaatagtcctgggacccttctgttcccagggggagggagcaggtggcggccaggcctggtgctggagcgggggtgcctgtgtcactgcgtcgcggctgcctgtcggctcttcgagggtgtgcttgggcctccctgtgacagtgtctggaagcgtcttccctgcccggctgagtggctccctgggtggcatcagagtgaccccagctcccagtctgcaggggtctccgccctctagccctgtcctgcacctgttttacagacgggaagcgtggagccctctatgagtagatctgggggacctcatgggtctccccagcacgggctgggcgatctctcagcggactggcccttcagtgccccaacctgagcaccgaccactggggctatgcccaccaggcagccacgtcccccggggatccgcagtggtccccaggatcccctctgaaagcctacaggagcagaccgaatgaacgaggatccaccttgggttcctcctgtcctctctctcgggcctgctagcctcctgcctcggtttccc

SEQ ID NO: 1560703 - DNA, 4001 bp, Homo sapiens
cacagggcagctgtcccgttctaggccctgggtatgggacatggaggccgggtggaaggcctcaatggggaggcagtaacaggatggtagggcgccctcctgccagggggtcccaccaagggcagccagcaggactgagacagaacccagtccctccccacccaccactccagagcatgcttcctggggccagcaccatgcctgaccctccgtgggtccccacatgagctggacaaatgaacgaccaaaagacaggaggctgtggtgccccacccacctggaccgagggaaagggcggaggggagggcgccctggtggtcccccgcctgaggccagggccatagatgaccttgcaatcccagccccccacacctttctctggcctggattcccgagggccccggggaggcagggacccccagcccaagtgtcctgcggccccaccaccagccccgccaaggccccaccccaagttctagaacctggctgatcactggcggtcagcggggacccaggagcggggaggggtggcgggaaggcaggagaaagttgagggaggcaggcgggcgggtggctaacggggtggtgggtgtgagctgggccaggcactgcccaccacccgcccgcccgccccgcagctcgggggccaatgagcagcggccggcctgatgtcaccctgcaaatctcagcctcgctctctaacaaagagaacaatggggcggccagagggaagctccgacgatgccaccgctggaccccacacccggggcctgccgcccgccggcctgcccagcaggctgcaccccagaagtggctttgacagccggtccttccccaggccccgaaatccctgactcggggccagagagtggagcagggaccctctcctgcccggtcccgtccccaccccagtcagggccccaggctggagactgagacgtgcgctctttgtactgtcagccttctctcccggtcctgcaggcggcccccctaagccacccctaaacctgcgcttgccccgccccgccgcctgtgctgggtgtggggcgccccccgcccggccggagccccgggccctcgagcccctctctggggtgcccctgcgggcggccgagggcctgggctgcggcgcggctccccggagcctttccgggctggaggcggcccagacaaaggcggcggcggggccggagcgcgcaggggaggagcgcgggctgcgcccaactttctcccgcggcggctgcaggacaaaggcgcaaaggcagcggccgaggccggagcccacgcggggcgtgtccggtgcggggcgtccggcgcgggctgggctgggctcgggcgacccccttccccggggcggacggtgcggggacccccaggacagcaacccccgacgagggccactcaccctggcgacccacgatctcggcgacgtgctcggagctgggcaccgggacgcactcggtcatgttgacgcttttcttgcggctgccgatcacgctcatctggtcggccagcagcgtcgggggccccagggccgcggggtggggcgcgaagcccgcgaacacgtcggggggcgacggccggggcggcggcggcggcgggggactcgcgttggggtccagcagcggcagcgacccgggggccacggcgggggccagggtcgggggcgcgccggcctcaggtccgtcggggggcacaggctccggagccgccccgccgtccgcgccccccgccgccgctgcgccgtccccggccgccccctcctcgtccgtgtcgccagcgccccccagcccgagcgccgacagctggtccagcgccaggcggagcgcggcggccgcgtcgtcgggttcgggcggcggccggggcgcgggcgcggcctcctgggcgccctcgggcgggggcgcaggtccgggtccggggtcctcccccgccgcccccacgccgccgccgccgccgcccccgcccccgccgccgtcgggctggccgagcgagctgggcatggcgggagctagcgctggggcccgcgctcctgccgcccgcgccgccgccgccgcccgcgccgccctccgcctctgcgagctgggccgccggccgcctgcatccagcggcgggggcgggcacggggggccgggcgggcggggcggcggcggcgcggggctgctcggggccgggccgggccgggccgggcggcggcagcgactctggctgcggctcggcggcggcggcgacggcggcggcggctcctcggcggccgaggcggcggcggcggcgcgggacgctccttccctcccgccgcctcccgcggccccgccccggccccgcccccgcgacgtcacgccgcggcccaacaatgggcggcccccagggcgcaggcgcgcggggcggggccggggcggggccggcgccgggcacgtggtccaggccccgcctccgcccggcgctcgggcgggaacccgggcgcatccgcacgtgcgggcgctgctgcaggtgtgtgcggctcagcccctgcctggacagcgctccctccccaagcctgagagtccctgcctcgcgcgccccagggcccgaggtcccgctccccaatttcccctagagatccgggtcgcccccaagcgaggtctcttgctccacgcccgcttccttgtgccagggacccccacctccctgcataaaggcgtggggtcctctccaagtccccctcgcgatcccactggacttcgaagtcaggctcctgcccgcccaccgcctctgtgccagggtccaacccccgccccacggtgcaccccccagggcctggggtcccagtccccaagtaccccttgctatcaggtgggctttagggtcaggcccctgccccacccccagcctctgtgccagggacagctccacaatcatgcacaccccagggcctgaggtccctctcccctagtctctcctagctcccctctggctggctcccggctttgggatcaggccacctcctccacgccacctcctccgccccacccaaggccacagacccggtctctgtgcccccagccagagacctctctaccacagtggtgcttccatggcgagggcaggctcacaccagccagaaccctccatgtggagccccaccctcttctggggtgcctttccccgcaacgggcgttgtccacctctaaagccacccttgccgggcgcggtggctcatgcctgtcatcccagcagtttgggaggccgaggcgggtggatcacgaggtcaggagttagagaccagcctggccaacatggtgaaacccccgactctactaaaaatacaaaaattagccaggcgtggtggcgcgcacctgtaatcccagctactcaggaagctgaggcaggataattgcttgaaccctggaggtggtggttgcagtgagtcgagattgcaccactgcactccagcctggttgacagagcaagactcctctcaaaaaaaaaaaaaaaaaaaaaaaatagccgctttcccagcggctcttcctccagctgtccttcggggccttccttgcacctgtggggttttttgtgataaacctgtctggctgggtctacctgcccccctcttctaccagacctgtccctggctggctgtgcaaacttggaccgaaggcagggctctctgggcaggagtggggcagcctgcccctttgcctagcaaggcttctcctctgtcccctccccccgcctcacacaccctgggtccccctcagccactcttctagtccctcagccacagccacccactgctgggcccttcacttttggtggcttctctgcccacttcttccaggcaggcagggtcaggatccccctgcctggagcccttccccacccaaaatctctctcctgaccccaggctgcatccagccccacttcccctcctggggtcctggacttctctttcgtgcacgcccatgcttggaattgtttttctatctctctttctttctctctttctttttttctctttctttcct

SEQ ID NO: 1560704 - DNA, 4001 bp, Homo sapiens
tgaaactccagtccccaagctgtgcctgctgcggagcctgccaccctcagaccactggagatccactgcctcttgcaaaaaatgtcatcacccagatcctgggtccaaccacccatcccagtcattgttcccaagggtgaggaggcacccgcctgcccctcctgccacctggaattccaagaactgagcaggattcctggccctgcctgctgaaatgccacatgtgtcccaaatgccaggacgcagccggcacttctgtgagggcaagaagagcagggaaggaggccggctaatcttcaggcccagggtccgggaggggagaggagggccgctgggaggcagccctgcagtcttatcgatgggcactggggcagggtgacccagcccatgacgccagcctcctgccctcccaacagccctctctaatcagggcagctcccccagacctagggggtccctgaccctggccagacagatagaggcaatgcaagaacagggcagagacccctgaccctccagtcccacccaggcggctcccaactctcaactcccggagcagcaccctcaaactgctgacgcaccaggttgccctggcagaacacacagagagagaggaggctctagggggcctgactgtccctcagccatagctgtcccagttggtcaccctaatagacgagctcaggctagacagactgacaaaggaggcgctgagcagtcaccaccaaccctccagagggttcagggtggcccgggggctcagacaaacaaaggcattcccactagaaagtcatgtagtcagatggtgagggccccgcaggtcagacagcagctctgaggcagacaggggaggctggaccaagggacagacagaggggatacggggcagttaaacagacagatgggggaggctcatggctcaggcagatagagaagccctgcacagttggacagatgggggaggcactgcacagtcagacagatgggggaggcacagcacagtcagacgggggaggctcaggccatggggcagaaagacgggggatgctggatggtgggacaggcaggggaggctcaggagtgacaccacagaggggccactgggtagtcagacagacgggggaggctcaggccacggaacagccagaggggtgaaaactcagctcatggggcagacaaacaggggagacttaggtcccaggcaggcagagagagggggctgggtggtgggactgatggaggaagctcaggccatgggcacagacagacagacaggggaggttcgggccaggggacagacagaggggtgaaaactcagctcatagggcagacagatacataggggaggttaaggccgtggacagacagtgcagggaagctcgggccacgggacagacagaccgaggggagactccgatcctgaggcaggcagacggcgggtggtgagtcagagggaggaggcgcccgggtcgcggagtctcggaggggctgcccgacaggtggcggggccgggacgcttaccgaccaggtgccaggccttgcgcgggccgtagcgggcgcagcagctggcggcgcggtcggcctcgtagcccacgagcggtgtgcacagcccgtcggccacctggcccagcagcagcagcagccccgcgccgcgggagctgtaggcgcgcaccgagtgcaggtagagcagcaggtaggtgaaccacatggacgcgcacaggtcgttgaggaagtggcccacggcgtagctcagccgcgccaccagggacagcggccgcggggacggcgccgctccggccgctgggggtcccgggcccatcgcggcgccgggcccgcgccccccacccccgggctccgcggagggtaccctggccaggccttcttgggtgccgtgggggcaggcgccggggacccccaccacgcgccgggcaccccgcgtcccgctctcttacggccgcgccctcacccacgtccgccgcgtccgccccacgctcgactctgcagccgccgggccccagagccgggcgactgcgccgggcggggcagggcggggaggttccggtgcctgagccaatcggagccgcgccccggggaaccgcagccaatcgccaaggagagaggagaggggcgtggccgcagggctcgttccgcctctacgacgggcgcccacgcggtcctagcgcccgccgggtatgagggcgaaccccgagcgcgccgcaggagtggccggcacccccatagactggggaaggaaatggaccagagggcaccgccggctcccacccagacccggcctccaggcccgcaccaccccagtccacccggagctggacagcccactgcgggccggggtggagcgagtgggacgggctctggatttggggttggggggaggtctgagcccgagctggcctcggggtccgctgactccccggcctagagagacgcgatcgggcgcggagaggacgcaacaacactaattaattggttactaacggtaatgatgggggtaatcaacataatagtaccagctggcctttaacgagcgttgcctgcaaagagccccacgtggtgacgcaaatttcactctcattttacaggcgaggaacagagttgcccgaggctcgcagtgagtcaggcgtctgtgactcccaggcctgtgcgcgcgaccctccccgtccaaccaacgtcctcccacaaacgggtcaccggactgagggtttcaagttcctccagggggtgtgtgcggttccccctaactcaggccctactccttccagcagcattttctcttctttcctctttttatttatttcagaaacagggtcttgagacgggcgcggtgactcacgcctgtaatcccagcactttgggaggccgaggcgggcggatcacctgaggtcaggagtttgagaccagcctggccaacaaggtgaaacccgtctctattaaaaatacaaaaattagccgagcgtggtgacaggtgcctgtaatcccagctactttggaggctgaggcaggagaatcgcttgacccaggaggcagaggttgcagtgagccaagaccgcgccattgcactccagcctggataacaagagtgaaacgccgcctcaaaaaagaaagaaagaaagaaagaaacggtcttgctctgtggcccaggctgcagtgcattggtgcaatcatggctcactacagcctcaatcttcagggctcaagtaatcctcctgtctcagcctcccaggtagctgggactacaggcacgcatcaccacatgtggctaacttttgtatttttaattttggagagacagggtctcactatgatgcttaggttgacctcaaactcctggtctcaagcaagcctcccaccctggcctccagaagctctgggattacaaacatgagcctctgcatcgggcgggtctccagcagttttctttctttctttctctctctctctctctttttgagatggagtctccgtctgtcacccaggctggagtgctgtgttgcaatctcagctcactgcagcctctgcctcccgagttccagcgattctcctgcctcagcctcccgagtagctgggactacgagcacccaccaccacgcccagctaatttttgtatttttagtagagacggggtttccccatattggccaggctggtctcaaactcctgaactgaagtgacccacccgccttggcctcccaaagtgttgggattacagtcacgagccaccgcgcccggcctacagcagtatatttggccttgcagtctgcagtgaggtatgattgcaccactgcactccaacctgggcaacagcaagaccccagctctaaaacaaaacaaaacaaaacaaaaggtccttgcagtatggaaggagaatcgttggatccagacttggttccactgattctctgctgctccacttgggacaagtctttttttttttgagacggagtctggctctgtcgcccaggctggagtgcggtggcacgatc

SEQ ID NO: 1560705 - DNA, 4001 bp, Homo sapiens
ctaggctgccagggagccaagtgtgggagcatttttgcccatccccacaacctaagggtcctccccccacatttcttgccagcccccatgacactcacgtctgtcttcacatcgactttgccaggtttcagggtctggtcctctcggacaatgctactggggaaatagcccaggcgagcagccagatctccatagtaatctccctgaacctggggaagaggagttaaaagctagggtctgggaagatggcaagcttgtgcctgctgaaggcctttgcattctcccttctccctgatctccacataactgctccatccttgtcatatgaatctcagcttaaatgccacctgttcagaggccctttctgaacacccaagtaagtctctgttaattctcacagcagcgcatatttgcttttattattattattattttggaaacagggtctcattgtgtcgcccaggttgaggtgcagtagcatgatcacggctcactgcagcctcaacttctgggatcaagcaatcctcccacctcagcctcccgagtagccgggaccacagacacatgccatgaagcccagttaattttaaatttttttttatagagatgggggtcttgctatgttgcccaggctggtctcgaactcctgggctcaagctatcctcccaacttggccttacttgggattacaggtgtgagctactgtgcccggctgctgctattttttatgccttgctttttgttcatttccctccattagaataaaaaggatcatttgttgttgtatcttggtgtctagaacagaacgtgggaccatatcaggtcctaaaattggtaaataaagtgaaaataggctggggggcagtggctcacacctgtaatcccagcactccgggaggccaaggcgggcagatcatgaggtcaggagttcaagaccagcctggccaatatggtaaaaccctgtctctactaaaaatacaaaaattagccaggtgtggtggtgcatgcctgtaatcccaggtacttgggaggctgaggcaggagaatcgcttaaacccaagaggtggaggttacagtgagccgagatcgtgccattgcactccagcctgggtgacagagcaagactctgtctcggaaaaaattaaaaaataataagcaaataaaataaagtaagtaacaatatccccccacaatgtctatttcagttcacccccctcaaatcttcccttcatggggataatgagtctaccccagctctgtacccttccctctttcactctcccaagactcacgctgcctccccagaagagccgcccacggcccttcagcttggagaagacatacaccacttggccccggtgaatggtcaggaatcggcagtcgggggccatgtagtcctgaagggccacagccatggagatagggtctagggaaggaatagaagggaatgcagcaccctccacacaggctaacgcccaagcccccaattctcccctccccattcttacggctgcactcctggtccgcacacagcttccggtcagccagcttgggcataggaccacccctgacaccaggtccggagaaggcagacagcaagatgatgacaccaaggcacaccagggaccgggccatcgtggactgtgagcaagagagtgagcaagggggtgctggggtctccaatttcctcccctccctctctcccgtagtacaaggaaacttgtgttcttggtcttgtccccgccctaaaccagtcccaaacttcgcccacaccacctagaagttgctatgaaaccagaaccatttcaaggatagggtaaaggctgtaagcccaaggaaattcccagataaggtccaaagcagctcacaactttcccagtgacagccccctcctcaacaatcacagaggcctagataaggtggttgaaatattcaattccatcttctcttgagttggcttaggtacctgggctcctccgctgtcccctctggccacagaagcggaggagcctgtaaagaaaaccaccttggaatttcctgtgctgtggggcaggagaacaaggcagccctttgattaccagaaacagcccagcccttgagtactgactgaatattgtatgctgaaccttaggctaggcaaagtcccaccatgatcactattcctctgcaccagacgcttcccactggatgacctgggctaagctatttctcctcacaaagcctcagcttccttatatgtaaaatgggaacaataaaaaagccaatagttacagagcattcaccaagtacatatttatgttatgaactcaaatggatactctgtatcatgtcaggaggagtgattataacccctcccttttttttcttttttgagacagggtctcaccctgttgcccaggtggagtgcaatggtgccatcccggctcactgcagcctcaacctcctagactcaggcaatcctcccacctcagcctcctgagtaactgggactacaggcacaagccacctatgcccaattaatccatttttttaaataattattttgaggtagagtcttgctctgttgcccaggttggagtgcactggcatgatcctggttcactgtagcccctatttcctgggctcaagcattcctcccacctcagcctaccgagtagctgggaccacagacatgtaccattatgcccagttaattttttgtattttttggtagagccggggtttcgtcatgttgcccagcctcgtctcaaactcctgggctcaagcaatctgcccaccatggccttccaaagtgctgggattacaggcatgagccaccaagcccagcctaatttaattttttgagacaggatcttgctgttgctcaggctgaagtacagtgatgtgatcatagctcactgcatcctcaaactcctgggctcaagaaatcctcccctctcagcctctcgagtagaatagtaggcaagtcaccattcttggatgatttcttttatttttatttttctagagccaatgtcttactgtgctgcctgggctggtcttgaactcttgtccccaagtatcctcccgccttggcctcccaaagcactgggattacaggcatgagccaccaatgcctggcctataaccccttgttacatggaaatggaagtgtggagttaaggaacttgtctaaggcttacagagccaggaagtggagaagtggagaggctaagacttgtatccaggcccacagccattgctatgctatctttttttttttttcttttttttctttgagatggagtctcatattgcagtggtacaatctcagctcactgcaacctccacctcccgagttcaagcaattctcctgcctcagcctcccgagtagctgggattacaggcatgtgccaccatgcccggctatttttgtatttttagtagagacagggtttgtccatgttggccaggctggtctcgaactccccacctcaggtgatccacccgcctcggcgttccaaagtgctgggattataggagtgagtcaccgcgtctggcctgaaagatttttttttttttacaggcagggtctcactctgtcacccagactagagtgcagtgccacaatcacagctcactcagccttgaacaactgggctcaagctattctcccaccgcagcctcctaagtagctgtgactataagtgtgagccactgcacctggctttgaaatgcaatttctttttttttttttttttttttgagacattgtttcgctcttgtcacccaagctggagtgcaatggcacgatcttagctcactgtgacctccccctcccgggttcaagtgattctcctgcctcagcctcccaagtagcggggattacaggcatctgccaccatgcccagctaattttgtatttttagtagagatggggtttcaccatgttggtcaggctggtgtcaaactcctgacctcaagtgacccacccaccttggcctccaaaagtgtggggatta

SEQ ID NO: 1560706 - DNA, 4001 bp, Homo sapiens
aacagtggaaagaaaaccagcggtcacaccacaaaggatctagtggttttagcaaaggctgcagctgcagggcccaggtctggccacacaagtgctatgcaaattagcctagagccctctaatctttgcacctcccaactggacccattttactggtgagaaaattgaggcagggaaagaatttctcccagcgcacatacctaggctgccagggagccaagtgtgggagcatttttgcccatccccacaacctaagggtcctccccccacatttcttgccagcccccatgacactcacgtctgtcttcacatcgactttgccaggtttcagggtctggtcctctcggacaatgctactggggaaatagcccaggcgagcagccagatctccatagtaatctccctgaacctggggaagaggagttaaaagctagggtctgggaagatggcaagcttgtgcctgctgaaggcctttgcattctcccttctccctgatctccacataactgctccatccttgtcatatgaatctcagcttaaatgccacctgttcagaggccctttctgaacacccaagtaagtctctgttaattctcacagcagcgcatatttgcttttattattattattattttggaaacagggtctcattgtgtcgcccaggttgaggtgcagtagcatgatcacggctcactgcagcctcaacttctgggatcaagcaatcctcccacctcagcctcccgagtagccgggaccacagacacatgccatgaagcccagttaattttaaatttttttttatagagatgggggtcttgctatgttgcccaggctggtctcgaactcctgggctcaagctatcctcccaacttggccttacttgggattacaggtgtgagctactgtgcccggctgctgctattttttatgccttgctttttgttcatttccctccattagaataaaaaggatcatttgttgttgtatcttggtgtctagaacagaacgtgggaccatatcaggtcctaaaattggtaaataaagtgaaaataggctggggggcagtggctcacacctgtaatcccagcactccgggaggccaaggcgggcagatcatgaggtcaggagttcaagaccagcctggccaatatggtaaaaccctgtctctactaaaaatacaaaaattagccaggtgtggtggtgcatgcctgtaatcccaggtacttgggaggctgaggcaggagaatcgcttaaacccaagaggtggaggttacagtgagccgagatcgtgccattgcactccagcctgggtgacagagcaagactctgtctcggaaaaaattaaaaaataataagcaaataaaataaagtaagtaacaatatccccccacaatgtctatttcagttcacccccctcaaatcttcccttcatggggataatgagtctaccccagctctgtacccttccctctttcactctcccaagactcacgctgcctccccagaagagccgcccacggcccttcagcttggagaagacatacaccacttggccccggtgaatggtcaggaatcggcagtcgggggccatgtagtcctgaagggccacagccatggagatagggtctagggaaggaatagaagggaatgcagcaccctccacacaggctaacgcccaagcccccaattctcccctccccattcttacggctgcactcctggtccgcacacagcttccggtcagccagcttgggcataggaccacccctgacaccaggtccggagaaggcagacagcaagatgatgacaccaaggcacaccagggaccgggccatcgtggactgtgagcaagagagtgagcaagggggtgctggggtctccaatttcctcccctccctctctcccgtagtacaaggaaacttgtgttcttggtcttgtccccgccctaaaccagtcccaaacttcgcccacaccacctagaagttgctatgaaaccagaaccatttcaaggatagggtaaaggctgtaagcccaaggaaattcccagataaggtccaaagcagctcacaactttcccagtgacagccccctcctcaacaatcacagaggcctagataaggtggttgaaatattcaattccatcttctcttgagttggcttaggtacctgggctcctccgctgtcccctctggccacagaagcggaggagcctgtaaagaaaaccaccttggaatttcctgtgctgtggggcaggagaacaaggcagccctttgattaccagaaacagcccagcccttgagtactgactgaatattgtatgctgaaccttaggctaggcaaagtcccaccatgatcactattcctctgcaccagacgcttcccactggatgacctgggctaagctatttctcctcacaaagcctcagcttccttatatgtaaaatgggaacaataaaaaagccaatagttacagagcattcaccaagtacatatttatgttatgaactcaaatggatactctgtatcatgtcaggaggagtgattataacccctcccttttttttcttttttgagacagggtctcaccctgttgcccaggtggagtgcaatggtgccatcccggctcactgcagcctcaacctcctagactcaggcaatcctcccacctcagcctcctgagtaactgggactacaggcacaagccacctatgcccaattaatccatttttttaaataattattttgaggtagagtcttgctctgttgcccaggttggagtgcactggcatgatcctggttcactgtagcccctatttcctgggctcaagcattcctcccacctcagcctaccgagtagctgggaccacagacatgtaccattatgcccagttaattttttgtattttttggtagagccggggtttcgtcatgttgcccagcctcgtctcaaactcctgggctcaagcaatctgcccaccatggccttccaaagtgctgggattacaggcatgagccaccaagcccagcctaatttaattttttgagacaggatcttgctgttgctcaggctgaagtacagtgatgtgatcatagctcactgcatcctcaaactcctgggctcaagaaatcctcccctctcagcctctcgagtagaatagtaggcaagtcaccattcttggatgatttcttttatttttatttttctagagccaatgtcttactgtgctgcctgggctggtcttgaactcttgtccccaagtatcctcccgccttggcctcccaaagcactgggattacaggcatgagccaccaatgcctggcctataaccccttgttacatggaaatggaagtgtggagttaaggaacttgtctaaggcttacagagccaggaagtggagaagtggagaggctaagacttgtatccaggcccacagccattgctatgctatctttttttttttttcttttttttctttgagatggagtctcatattgcagtggtacaatctcagctcactgcaacctccacctcccgagttcaagcaattctcctgcctcagcctcccgagtagctgggattacaggcatgtgccaccatgcccggctatttttgtatttttagtagagacagggtttgtccatgttggccaggctggtctcgaactccccacctcaggtgatccacccgcctcggcgttccaaagtgctgggattataggagtgagtcaccgcgtctggcctgaaagatttttttttttttacaggcagggtctcactctgtcacccagactagagtgcagtgccacaatcacagctcactcagccttgaacaactgggctcaagctattctcccaccgcagcctcctaagtagctgtgactataagtgtgagccactgcacctggctttgaaatgcaatttctttttttttttttttttttttgagacattgtttcgctcttgtcacccaagctggagtgcaatggcacgatcttagctc

SEQ ID NO: 1560707 - DNA, 4001 bp, Homo sapiens
cggccgggggcgcgcggtacctacgtgtctttgtggagaagagccaggcgctccttgggcactttgaggcgctgggacaaccgcttgcgcagcccctccaccgtctcgtcgggcggcacggccaggtcgtagcgggtgcccgtggtgctgtggatggcgaggctcatgggcgccgcctcggccgccgggcccagctcgcaggcgccgccgggggccccgcgccggcagctccgggcgccgccgggctgcggctccatccccggcgcgcgctggggggctgggggcggcgggcgccgccaatcctcgccgcgcctccgggacaggggcgagaggctccccggatgccgggtcctccgggcactcgggggcgcggagcagcgcgcgtcctcctcgagaaagtcccggccgcggaatgcgagaccgaaatccaaaatccgagtggcgctccgaggtcgctccggctcctgggggcgccttccgggggtggggacggcacttgcttctccttcaaagggcggcgggcgcgaccgggacgcggcgcggttaagggtcctggggagggggcgccgctcggctggtggcgctgggtgccgtctgccgcccgggtcgcgcttcctcgcgcgtcccctcccttagcaacagccgtcgccgccgctcggaggatctgggggtgaaagtaacaagaaaaaaaagttataatgtatcaacgttccagggggcggggccgccgccccctcccattcactacttactccgccggccgggcgccggccaatcgccgcgcgccgagcgcccagtcggccgcgagcccgggcctatgagagccgccgcggcaccgccccacgtggcagccgggcccgccccctcgccccgcccccagcgcccaggcgaccaaggggagcgcagcgggggcggggctggcgcctctccgcgcccgcccccgccccgcccgcgcccgcagccattcataagcgcccggagcccgcaacaaagggcgggcgcgccccggggggcgcgggacccaggtctggagacgggtctggtacccctcgcgatcccaagggagcggccgggagcgggagggggcgcgggccattgttcccggcgccgggaggggcaggaagtcgtggggccaccccgccgccttcgtccgggaaaagccgcgagcggaagcgggagcgcgaagtccgcgcctcgtggccggggtcccggggcgggcgggcgacggtgaggctagggccgcggccccggggagggcgtggtgcgtgggggcggagttgtggccggggcggggcgcccgcacctcggtgacgtggccgggtggctgccgccgggggccccgcgcgcccacccgccggccgcgggcagaacccgtttccccgaggcgcgcccgctcgagccgtgacgtgacgcggcgtccccggctgcgcccgcgcgcgctcggggatgcggtgagtcagcagctcgggcgcgccctctgccgggcccgcctgggagcgccgcccggagtcccggggagggggcgccgcgctgcccctggcaggggaggaagacgactgggctgcgcgcgggggaggaaccccgatcgggaacgaaagactgtagtcgggagactgggaccgtgtggctgggcaacggagggcggaacggcaaccagttcaaggtcacccgcggtgaagggggagtgccccggggggcggggcgggggctgaggtccggccagggcggcgctggctgcgcggagcccctcccaccccgcaccccggggggcttcccaggaccggaggctccccgatccctcctgtcccaagaacaaagaaaagtgcgggcatcctgagccatctagagtgggcacccttcctcggcccgcaggtcccccccctccacactcaccgggcgcggccggttctgcgctccaagtgctgcgagtaccttcgtccggggccgaatgcgcgctggccgggccggtctgggccaagcgcgcggccctcagcctttatccgcgccgccttccctcggggtggagttagggcgggcaggggggcggggggccgggcgggcggtgacgcagactggcccccgcccctgcctgccggccctggccctggggcgccttgacggctgggccacccgggacccaggcttggcgcagttcatggggggactccccttgaatgccccgagccaagggtctcggcccgcctcgccgcgggctgagatgcaccccgaatcgtcagcgggacagggttttggggtgtacagcgcgactcgctgccccgcccccttcctgtcgccccaggcccggtgcttccgcctgggggcgcccgcgtgggggggacgggaagaggggcctgagtcagcggctgtcgtccaggaaaacaggctggagtcacctgccgtagagtgggggtgccctggccagccctggcctcctgcatctgtcaatggtgacctcagagggcatttatggagcgattagccagtgccaggcctgccttgtgcccagccagtcaccagccggctatgctgtgaccccgggaggtaactggcctctccaagcctcagtttctccagggtgggtgggagtgtggtgaggggatgcggcaggatcactttggggccatcaccccccattaatgcaggacatgcactggttcccagcctttggggtgggcattaccccattttacagatgaagaaactgaggccacagccaatgagacacgaatgtggtgtgcatctcacccttccccgtcggctttttgaggatggtcctggttgaggtgggccccgtcctgcccctctatttagagaaggggaccccattcctacgggagcacctcctgtccactcatctggcccctccctttatctggcctgaccacctccacccccaccctggccatgggcgcccctcccagggctgcgctcctccccaggtctccttccggctgccacccatgctcccggcagccgtggcccccaccttgacaggcacacccagccccgaagggtcagggctaggccagagagggagaggctgggataacccttggaagggggtcacaggggctgcggtttgaggaatgactaggagtttgtcacataaaaaagatgatgcggtcgggcgcggtggctcacgcctgtaatcccagcactttgggaggccgaggcgggcggatcacaaggtcaagagattgagaccagcctggccaacatggtgaaaccctgtctctactaaaaatacaaaaattagctgggcatggtggcatgtgtctgtagtcccagctactcaggaggctgaggcaggagaatcgcttgaacgcgggaggcggaggttacaataaacccagatcgtgccagggcactccagcctgagcgacaaaacgagattccgtctcaaaaaaaaaaaaaaaaaaaaaaaaggccgggcgcggtggctcatgcctgtaatcctggcactttgggaggccgaggcgggcggatcacgaggtcaggagttcgagaccagcctgatcaacatggtgaaaccctgtctgtactaaaaacacaaaaattagccaggcgtggtgatgtgcgcctgtaatctcagctacttgggaggctgaggcgggagcattgctcgaacccgggagacggagattgtggtgagctgagattgtgccattgcactccagcctgggcaataagagcgaaactcctctcaaaaaaaaaaaaaaaaaaaaaaaaaaaagacgatggtccaggaagtgggaatggcttgagcagttctgggagcttagtgaactggacccagttggagggaggaggggcagggtcgatgaatggggcttggatgaagggctggggccccaggtgggaactacagggccaggctcattctgcttccagtgagaacaaaggtggcggagggagccgtggactggtgccaaatgagcagcccaagcaggacactggggccccctgtgagtggccagcagcccccacctccctccctgcct

SEQ ID NO: 1560708 - DNA, 4001 bp, Homo sapiens
acaagccgttgtggcaggacctcatcagacctcctagctctgaagggtgaccattaaacttcccatttcagagatgaggaaaaggaagttctgagtcactgggcaacctgcccaagaccacacagaacaagtccggtggtcagacagcttgccatggctcctcacgctcagcacctcatacttgttggtcctaacccacccacgtctctctctgaccagactctgcatccctgtaggagaggccctgtctgctccattcactcccagatcctcaggccgaggacagagcgggacctccttagaaaatcaaatcaaattcactcaacagggcaccaccccaaagtgtaaaacagggttaacaggagcagccggaccacaagctgctgtgcacatttacggagctcagcctagagcagggcagaacagccacatggcagctctgggggaggctggcttgggagtctgacttgtgccatcccagacacagagctacctgtcaggccacgtgtgttgcccagattccaggagcacaactcattcgaccaccacgtcgctgcagggccactgggagacgcggcttctgcctccgaccctggaggacagccaccatctgcatggggactcagtctccctaagcgtctcaagaagaactaattctcgatgaaggaactggccggtggtctggcctagtatcgagacacctacaccgtctttggcataaacacagggcctgttactgcccctgaggtcgtcaccagggggagagaatggccagtcctgcctcccacaacgcccaagacataaacacgcaacgtggcaccacggccaggccgcagttccaatcccggcttcccacgaggcggctgtgcctggctgggtgggcaccttttcctttgggctctatcccagagataggatcagctcttgagtctgcccgcctgtcgtaacttctgcgcacagaagtcatgcactgagtcccactgactgagcacctcgcagccgccgcaccttcacctacattatctctttccatcttcaccagggccctccaaggtgaaagcaagtccacacaggctcatccaccactccaaaatcaaaaaaagcttcaaaagcgaaagtttcttccttcctggtttgacctgacacgaagctatctgttgtcttatcctagacagtcctaggtgggtttgatcaaacatcacagtccaaaatcccacagatcctcaaattggaaaaattctggattccaaaatatagctggtcccaaacatttcagataaagggtcccgggcttgtttcctggacgagggaggaggctccagaagtaacttcgtgcccgggagaggctggtccaactcttctgagatcagccccgacgctctctaggccccggcagacccacccaccctgcgcccagttcgcgccaggcgggtccgcgtcgggagttcaaatcccgcccggggtctgacccagccccgccggggggctcgcgggcggcggaggcgcggtgggtccaccgggatcccgatggggagcgcggggcgcctggcggccccagcactcggcaaagttggcaaaggcgcgggaggggaggcctgcgcgccgcggggcccgggccggggccgggaaccggagccggaccctggaacggagccgcgcgcccaccggacccccgacaccagccccgccccgcgtccctcccctcccccaccccggcccccgcccgccccgcgccgccgcgcatgcgcactgcagcccgcgatgtggcagccgggggagttggggggtgggggccggccgggggcggccgccgatggagccccgcgcccctccggccccggacgggccaggcgccccggccggcctcagagctccagagcggggctctccgtccctggggcccacgacgaggccgagccacggcggcggggggcgcggacgcgcgggggcggggggccggctcccccggcccgctcactcacctccgccatggccgtgtgtgcgcgggaggcggtggccgcgccgggatccccggatgaggggccgcgcactcattggctgtggagcctggagggcggggcagggggcggagcctggagggggcggagagcgggccgggcgcgtagtaggtgcgcgggcgcgggcgcgggcgcgcagccgagcgtggccggcggcttctggcgagcttgcggtgtctttccggccgtctctgctggaccctgatcttggccttggccttggcggaggagactgcattccataaaaatacgaattcctgataatcacacctgcgtggggaccacgtggtcctgtgtgacctcttcattccctcggctgctcgctgttaataccccgcgtggcagactaggaaactgaggcccagggcgacgggccacccagagtgtcagtgatagagccagaattggtgtccgggctgcgtggttctggaattttctgcactttcgcacccgtgatgagcaaactagcgcgcggaggaaccaatcggggagcttgcgaacgcgcaccagtcggagaggttttagaaacggtggccccgcgccggagagcccaaggcgggaggcagggaggtgggcttgaccccagggccatttggttctgcagtccgtcgtttcgcagattgaacatttctggaacacgtgcacgttctgatcctgagggtttgaaggagacagccctaacgcctgtcttcagggcgtttagagtggaggatgggaaggcaaggactcgccacaccttaaatttgagacggataagtgccgtgaatcttcggggcgcacgatgcagagagaggataggaagcaggggtggggcgtgaagaggcaggggccaggtgggagctgtggggcctggaccagagtgcagagagacttgagaaggtggacaccacaagactcgctgatggagggaagctggagagagtgaaggatggcctccagatgtctggcttgcgcaaatgagtggagggcggttcctactgagaccaggaagaagagaactggagaccaggaagaagggaattggggaccaggaggaagggaattggggaccaggaagaagagaatgagtctcattcctgtttcccagtgatcagccaatgaatagtgagaacttgacatgcatcagccttgattcctgatgcaaaatcattactcagtcctctgagaattcaccaaccaagagatagaagaaccactctggaggggtctaccctcactccttttttggtttacatcattgagattgagggttctggccctcgtgttgaagagtcctcactgatttgtgcaagagttggttccttcctttattattcatttgttattattcattcagtcattcagtgaactaaacacatatcttatgcagtcctcaactgggtgctgggtagccagaggtcctgtgaagcagggagaagcatgaacagataagagagtgaggtgctgtgctgtaacaggtggaggggcccgaagacaagggcttgagtccacctggcaaaacgagggaagactcttaggagagggcttggcaagaatcatcacatagatgtcaaatgaggacttgggtgaagagaagggtattgtggcttggaacggtgactcacacctctaatcctaacacttggggaggcagaggcaggaggatcacttgaggtcaggagtttgagaccagcctgggcaacagggtgaaaccctgtctctactaaaaatacaaaaattatccgggcgtggtggcgagtgcccataatcccagctattctgtggaggctaaggcaagagaatcacttgaacctgggaaggcagaggttgcagtgagctaagatcactgcactccagcctgggaaacagagtgagacactgtttcaaaaaaaaaaaaaaaaaactttaaacattagagggcatgacgataatgtgcctgtagtcccagctactctggaggccgaagtgggaggatctcttgagcccaggaggtcgaggctgcgg

SEQ ID NO: 1560709 - DNA, 4001 bp, Homo sapiens
cccctgacccgaggcctcctcctccgtggacgccgcctgcccagctcacggaaggccttgccttctcccacccgaaaccgtcagcccaggcctcgctctcgcctgctgtggccacaggtcagcacccttcctgcagcccagagtctggtatacagcaggcgcctaataaatactggctgggcaaacaccactcatcccagctgctcagacgtgggggtcgggctcattgcggaatgcagaccggctccaccgtgccttctggccctgaagggctgggcaggtccacgccctgcaccctggagctccccggggagggcgggtgtaggaatgtttgcccagtgagtggacagacgtttacacagcgggatttataacccacatcagacgtcaactccgggagaaagggagctgtccgcccagcctcgagcaggtgccgggtctcccagtggggtcggggttgggtggggatgaaggcacgcatcctcctctgctcattcctccccagtgattcactgaagccagcgggtggggcctggggtccagctcttgggttcaaggccactgggccccctcccctgctgcctgtgcctcagtgcccacccccgccccccgcttttttttttgagatagagtctccctctgtcgcccaggctggagtgcagtggcgcgatctccattcactgcaacctctgcctcccggattcacaccattctcctgcctcagcctcccaagtagctgggactacaggcgcccgccaccacgcccggctaagttttgtatttttagtagagatggggtttcactgtgtcggccaaaaaaacccctggatccacggcggctctcatggccggcattcttgggcagcggcgctgccctcgggggaagagccccaggacggaagatggcccctgcaaggcccggcggtggctaaggacctcggcgtcctgagactcttcctgcaacaccttggaaccgttttcgactccggttttcgagagagggagctgggacccagagaggagaacctgctcatctgaggtcacacagcgatgacagagcaagtgtctgaagccagttttcagactttgctccaaatcaccccctcctacaggaagccccctgggttgctcctcccagcctcaccctgaactctgttgataccagaatgaaactgggtttatggaccctggtgccacacctccttcctcatcagccagttggctctatgtgaggggcaaaggttcccttgtggggccgagactcagacaaggaggccatgcagaagggagggccccgttcctttttcccatccctcagggttgcagtcacccttgagtcatctcagctccttgggctcctgggcggagctccaccggcagacgctgggccgagtccctgctggctgcccgggatcccaggctaccacctcacccccacccgaggacccaggccaagtccccagccccggcctgagactccttccgcctgtactcagccacccctcctccgtgtccccaaaccagcccccagccccacgggggtgtttactgcccagagcctcccagtcaggggcctggtgggacggataagcatctctccagaagcctctggaattcccagaaccatggaggggcccctctggcctctgaccatgggggtgccaacccggcccctcccttggagggctctgggatttggggttcaaaagccccagcagagttcagggacaagggcctctctgctctcccagtgggtgcccttgaggccccagagtacctagcgggggcagagggaaaggtgcctcagggaggctccgagggtgacggggtggggcagggggcctccctggatcccaagtgccgccaggcaagcagaccccgcccacagacacatgacgctcccacgccaaatgtggatccaaccgccccacacaggatccccgcccggcccggcccggggcgcccccagcctcacctgccggctcccggctccacagtctgcagcctccactctgactcctcgatgggcacagaggcctcccagctccgccctgcccgccaggttgccagggaacagaggccccacccaggggaggcaggtgtgccccctccccccagccccacctgggatcaggaaacaaagtccagaggaggaggagggagaaagaggataccaggctgggcaagggcgggcaccgtgcccgctgccggctgcccctccacccccagggcctccaggtggccccgaggagccagaactcagccgaaacctcccttggctgcctggccctcccaccgcctctcagcaccgctcagagagggtcagcaggtgtccagggccacacagcagctcagcgtgcacagtggcctgtgtctcctggggggccggaggggctgagtcccaatcccgtccgtgccttctggcccagcccaccccttggggcaactcccctagatggcccccttcttgcataaaccaggtttggcagactcgggggggtttggtgtggcctgggttctgatcccacctgacctctcttagccctgttttctcctccgggacgtgggggaacatcacgcccgggctccctcagggctgctgggaggaattccctaggccccatccacataaaaacccatacgagggggccggacttggtggctcacacctgtaatcccagcactttgggaggccgaggcgggcggatcacttgaggccaggagttcgagaccagcctggccaacatggcgaaaccccgtctctactaaaaatacaaaatttagcggggtatggtggcacgctattataatcccagctacttgggaggctgaggcagaagaatcacttgaacccaggagttggaggttgcagtgagccgagatcacaccactgcactccagcctgggcgacaagagcaaaactccaactcaaaaaaaaaaaaaaaaaaaaaaaaaaaagaaccgcacgaggccgtcaaaagacccaggccaccccgagagatggggacgcagaggccctcaggcgcccatggtcctcctggattcttagtcaaggtgcagaggccttgctgggactgtggggagcccagcatctgtggggaagtcgggccactgggcctagcgccgtctatgagggcagggaacacagctgagggggcagggacttcagttccccaggctggggctctgtcctgacctacgccagaggggctgcttgtggagcccctctgaacctcagtctcttcttcgagtaaaaaggcccccagctacgaatccagcagggctgctcaggaggggggtgctttttttgtgttttttttttgagacggagtctcgctcttgtcacccaggctggagtgcagtggcacgatctcggctcacggcaacctcccctgttcaagcaattctcctgcctcagcttccctagtagctgggattactggcatgagccaccacgcccagctatttttgtatttttagtagagacagggttttgccacgttagccaggctggtctcgaactcctgacctcaggtgatgcccccgcctcagcctcccaaagtgctgggattacaggcgcgagccacggcgcctggccaagatgggggtgtttaaggacaaatctggataaagggcccccaaaggacagcgtggcacctaacgctgctgggtgtgtgaaagctcagggtgcgcggcctcacggcgcctcccaccgccgcctcccgccacccccttcacgtccttttctccctggcttgtagatagggaaacggaggtacggaaagcttaaaatcgcgcctcaggaatggcgggggtttaggctggaattggaacctgagttccctcagcagtgctctccaccacactcaccacctcatcggggaaaactgaggccccagcagggtggaggctggatcgcccatgagctgggggcactgtggagacgtcccacgcccaggctgaggctggcctcccactcagggctccgaaggcctatttta

SEQ ID NO: 1560710 - DNA, 4001 bp, Homo sapiens
tgcgaacggaaagaaacccaaggcacccacagacgtgcctccctgctgggctgctgcctgctggaggcaaggagagtatttcaggagaggtggccccaatccagggagcagccgtgcatggtgggggctgtggggggagattcctagagcaaccggtcccggccacctggaggaacacctcacagccaggactgcctgccaggccctcctccaccaagacgcccaccttcccagctcccagccaggctgccctggccatgcacagaggccggcccacaatcctgggcagtgtgggcggtcctggtcccactgttctaggtctggctgtgggactcgagtcagcaggccttggcaggaggtggctggaaccatctagaaagttcaagtgtgctttagctgcctggctggccccatgcactgactctgtatcagctcatgcctggccctaggagggagaagaccactgtcaggtcctcctctttcccgcccagcccctgacactctgatggtgccaggcctgctgccctaggggaaaactgggcaggggtggcaggggtggagtgctgccctggggcactggctggacagacctgggaattcttcccagtctctctttgctcctcccaccctggagcaccgcgttgtgtgtacacacaagacagagacacacacacacacaaacacacacacatacactcacactctctcttcctctctccagtcctgccttccctaccgggcaacaggtccctgcccaaggaagcccagtgaagcgattacataaccccggcctgaggggtggggcgggccggctgacatcactgcgtcccctgggccaggtcctgcggggcccctgcccagcacctgccctccccttcccccccaagatttgctcatctgaaaccagcactcaacagcagtcaccacccgggctgcgcagaaacttcccgctccgacaggaaacagcacttgggcctggggtgtctgcgaagtgcagggctgaggggacatcccatcccctcccccacggcacaggccccctgggggtgggtgcacctgaccagcccggcctggggattctgaaagaaagtccccagaagccacatggaggtgggaatgggactgtggcccgctgacccgtccccaccagggcacaaccagctggagcttgcaggggacaccccccataagccacatgcagcgactgggacaggactgcagcctgctgaccccccagaacatacccggcgggggcttgcaggggacacacagcctggtgccctgacccggagggggctcctgctcccagcctcacttgggggtcctggaggaaggacccggcggccatggctggagagaggactgtggcctgctgaacccccatcctcgcacaccgaccccgcttcagcgcacggccggcccgggcagccccgggtgtagggcgggggccaggcacgagccccgggagccgatcttaggggcgggccccgcgccccccacgccggccattccggtggtccagcccggagcgcccccaaaccgaccccgggcctcaccttgaacgaacggtggaaaccctgaagttcggctggtttcttctgcaccatcttctgtccgggccccgccagcgggggaggggaccgagggcccggggggaggcccgagggcgggcggccgggcggggggcggccgaggaggggaccctgcgggcgggagcagacaaagggagggcggtgagcggagcccggcctgccaggagcgcggaccgggcgggggcggcgagggctccgcggggcccgtttcccgctaccgggtcggtgtcctcggggccgccctggggttcgcactcaccggggtcgggcttgggccggggccgcagtgccgccgccgccccacgtcgcgcagcccggaccccgctccgcggaccgcgcggggaacagcgccgccgccgccgccagcgcggacccctctacctgggccaccgccgctgagaggagccgggcgcgtcgccgccgccgccacctttataggcccggacctgctctggccccgcccccgacgcaggctccgcccggcctcaccccctgcgcacgacgtgggcggagccagaagagggcgctctccgggaacccagtgcggctgcgcgctccggcggtggggcgtgtccgaaacggctagcgcacgcctgcgcagtgcggcgcacgggggtctcggtgcggaacctaggcagcgaccctgcggcgcgcccggagctggcctgtttttgccgcctgaggctcgcggggcccgtgggacctgcgaggccctgggccgtgtcctaccgcctggccccacacagggcaactcccttggcctgtcaacccaggcctagtataccccgactcccttggttcatgccctcgctctagaacctgccatggctccctcttgcagttctccagtgctggctccagcagtccccctcgtgcaccaccagcacgcttggagtcccagccactcccttctagtgctgggggaccagccaccgccacctactttcttcttcccctgggccaccctgcctggggagcactgagctccccgagtttgctttgtggttggcaggaaccagagtagagggtggggaccgaggtctgtgaaggacccttcctctgtcctcgaatagcatttcagggagaactgggacctgagacccactgggaaagagcccaaggggtggatggtcgccaggacaggaagtaaaacacagtcccattttggctggggccccaaaccaggcttagatagaatcagcctgtcctgagctgccagtcccccatcccacagcatcctggttcaaagtgctccccaggccccgggcctggggcacacaaggagtgggggttcccctgctgggtggactgtggtctcctcttctgcaggggtttccagaagcttcgcacagcccatcccaccatcccccaaccaggccctgagctcaagaggggctggagccccactgacctgaagctggagggcccctgcctgcaaggccacagctctcaggccacaggggctgggaggcctggcctcagccacccccggggcattggggggaagcctgtggggaattcccagccagaacccagcccagcacctggcattgccctgactcttggcaatggggggacagaaaaccaggtcccccagccccccttattgtgcatgtgggtgcgtgtgtgtgcgtgtgaacacatacacgcacaaacacacgttagctccaggtgccaactaggggtggagctgctagacctgcttgcctgggcctggctcacagagggcgcctagtaaatagtgcttggaggaaaggataagagtgtgtgtgtgtgtgcacgcgcacacgcgcacgtaggggttgtgtggtcgtgtgagcttcctggggccactgtaatgcaggaccacaaactggggggcttaaaacaacagaaatgtgtgctctcacagtcctggagcccagaagtctagaagtgtgggcagagctttgcttcctccaagtgctctaggaggatgcttcctgcctctgccagcttctgggggctctggtggtcctcggtttgtggccgcatcactccagtctctgcctcctcctctgtgtgtgtgtctcctcttcttattttattttcctttttttttttttttttttttgagatggagtctcattctgtcacccaggctggagtacggtggcacaatctcagctcactgcaaccttcgcctcccgggttcaagtgattcttctgcctcagcctcctaagtagctgggaatacaggcgcgcaccaccacacccggatagttttttgtatttttagtagagatggggtttcaccatgttggccaggctggttttgaactcctgacctcatgatccacccgccttggcctcccaaagtgctgggattacaggcgtgagccactgcacccggcctattttactattttttgagacagggtctcactctgt

SEQ ID NO: 1560711 - DNA, 4001 bp, Homo sapiens
tcttaagaagaaggcagcaacacccaaaccagatgggaagccatgggaactgggtgccagaagcatgagacacctgtctccatgaccctgtgccacaggcgccgagatgggcaggagggaggattcttgccccccacccatgaaaccacacagacagtgccacttcagtggcgccagcagccagggacgccccaacctgccctctctaacggcggagattttggctgccacccccacagccccacaacacctttcctggcctggtgcccctgaaagccagggcagcagaggaggaggaagaaatgatcccatgttgggggccagcaatgcttctgggcttgaggaagaggggtaggggcttgggtattggagaagaggcagcgcagagttgggtaaagggggtgccagggtgcaggaaggcctcgtgtttatgagaaccaacacagaccaatggggaggggccgtccagagcgtttagggaggttggggaacccacccacccaccctgggtttcaactgaggctctaagatcctgggggaaaaaaacagaaaatgaggtggaaggagggagagggtagtggctgaaagagacatcaggactcatcaggctgatgggcgttagatgaagtgggagatcctgaaggcaaaggttgtacaggagactgcaggactgtgacgtgaccaaccagcctgggagggagatctggactggggtcaagtgtggggaagcctaaatcaggatcccaggggcggagagggcccaagctgaggggaacagcaggccatcagtgactcaaaggtctggggaatccaggtcagagaagaaactgctcctggtcctggtctcagagcagagggtctgaaggtgaaagagacagccccgccgggtccgagggagagtgaccagggcctgaaactagaagggggctgaggcggcagggtgggtcaaagaaagaagtctgaaaaagcaagtacaaagagaggggacactccaaacaggcctgagtccctgcagcagaagaccgaaggccagggtcctagggagtcagaggagctcaggccagggctggggttgggagagaaagggatgccctggctgcagccggggcaggatcagacgggagagaaggctcaggtccaggtaggggatgggtggagataaagcttaggctgggccggggttcaaggaagagagacgccgcagagcagggtcccagggggccggggacgcctcatatctgagctgaggttgaagggaagacagacagcaggttggggactctgggagtttgaggcgactcggggacaagggtccagacaggaaaggagacagtgactggccctggacctagagacggaaaggtctactgggcagatccgaggggccccgggaggggtctgaacagggcccagatcccaggaagtgcctggaaggagctctgggccaggctgaagtcccgagagctgtcttgaggtccctaagccgggctggggtccccaggggcgtcccaggtggatgcaggtcggactggcgttccgaggggtctcccgggggtctccgagccaggctggggggtcaccaggggcgtcccaaggggctccgggcccggcccgggtcccgaagggtgtccgaggcgccctggccggggtcgcggatgggggaggggcgcccccgccccacataaaggcccgaggagcggcgggcgcgcacaaagcgggcgggcgggcgcggagcggggaggccgggaccggggagggccgggcgggccggcgggcgggagggggccgggcgggctgcgcaggggcggcgcggccgctcctcacctgattgtccatggctggcgccccgccccgcccccgggccccgcgtcgctcgccgccgccgccgccgccgccgccgctcaacgccgccccgccgccctcattgtctgtcaagcgccgccgccgccgccgccgccgccgatcccggccgcccgctcgcccgccagccccgcggaaccggaaaccaccgccagcccgggtcgcgcaccgatcacgggcccccgccgccgactagggcccgccgcatcgactgacagccacctgggccaatcgacggcgcggacggccgcttgtggcgcgggacttcctgcctggcgggggcctgccgggctgcggccggagggacgaagcccgcagccaatgggaggccgggaccggaggggcgggaggagggagggagggaggcgcgaggcgagcctggcggaggggagcgcgaggtgtgcgccgcacgtggaggggggcgggggcgggacgggcgcgcggcgcctgcgcgctgcggcccgcagggggcgctgcctcgtggctggagcctccagggcgggagcgtcccgggggctggaactgaggttacgggttcgagccctgtggagggatcccccagcccccccggtagggacacttttgtttcctgacctcatgatgctgctatgtaatggaacgagccctgggctctggaactggagattaattttcttttcttttttttttttatgagacacgtctcgctctgtggcctaggctagagtgtactagcacgatctcagctcactgcaacctccacctcccaggttcaagagattctactgcctcagcctcccgagtagctgggattacaggagctcgccattatgcccagctaatttttgtatttttagtagagacggggttttgccatgttggccaggctggtctcgaactcctgacctcaagtgatccgcctgcctcaacctcccaaagtggagattaattttctaatcttgcataatccttggcaaacctggtcagccccttcttcacctttccctgagtctcagtttgtgcatctgtgaaataggttgaagaacagtactgtgtgattcttcatgctaatttgaatgatacaaatttgaaatcgtgctacattcaaatgacccaagagagtcacatgttttcagttagacacgaagaataagttctggcgatccatcacacagcaaggtgactacataataatgtaattttatattttaaaattgctaaaagcggccagatgcggtggctcacgcctgtaatcccaacactttgggaggctgaggggggcggatcacctgaggtcagaagttcaagaccagcctggccaacatggtgaaatcccatctctactaaaaaaatacaaaaattagccgggcgtggtggtgtgtgcctgtaattctagctactcaggaggctgaggcaggagaatcgcctgaaccagggaggcagaggttgcagtgagatgagatcatgccactgcactccagcctgagtgacagagcaagactctgtctcaaaaaagagaaaaaaaagaaaaaaaatgctaaaagtggattttgaatgttctcaccataaataattgataagtatatgtggtgatggatatgtcaattagcctgatttgtttattccataatgtatacatgtaccaaagcatcaaggtgtaccccatacatatatacagttattatttgtcaataaagattttttttttgagatgaggtctctgctggagtgcagtggcacaatcgtggcgcactgtaacctagacctcctgggttcaaacaattctcccacctcagcctctcaagcaactaggactgactgcaggctcatgtcaccacgcccggctagtttggttatttatttatttatagaaagagcgatctcactatgttgcccaagctggtctccaactcctggcctcaggcaatcctcctgccatggcctcccaaagtgctaggactataggcatgagccactgcgccctgaacaaagatataatttttaaagagagaatctcatgttatccacaaaattttaaataatacccatctctcaaaaaactgttttgatttattgaggatcacaaaattttacaatgacctgtaaactgtgtttatgtgggaaataggcataaccccattttttcaggactttataagcca

SEQ ID NO: 1560712 - DNA, 4001 bp, Homo sapiens
tctcctgacctcgtgatccacccgcctcagcctcccaaagtgttgggatcacaggcacgaacgactgcgccgggccaccctcttgcacttctgaaacaaccagcaaaccaaccaaccgaacaaataaacatccagcttcccctacatgaaagcaagaccaggcctggaaaggaagtgaatccaggagaacagaaacggaaggtgggttttgtctcacgggtcaaaacctagatcatcccacacacgcagggaaatgaatgactagttcctcaaggcatcactgtgggctctgacggctccagccttcagcagctcctcagctctgcgtcccagcgcctcttccgtaaaagggaagcccctgtgactgcgtgatgcacaagaaggaaggcggtcttgggaccacggcctagagggcggccagggcactccccgctgcctatgcaggaggcaactcccaaagcagaaagcacagatgggatgtgaaacacgcaaaacacaatgtcaacatttatccaaccatctgctttgaatacgggcagtttattgcatgtcaattaaacccgtataaactgttaaggagaaaacgaagaaaaaagcaagtgcgaaaaaagcagtgtgggccgggcgcggtggctcacgcctgtaatcccagcactttgggaggccgaggcgggcggatcacctgaggtcaggagctcaagaccagcctggccaacatggcgaaactccgtctctactaaaagtacaaaaattaactgggtgtggtggttggcgcctgtaatcccagctactcaggaggctgaggcaggaggatcacttgcacccgggaggcagagtttgcagtgagcagagatcgcgccactgctctccagcctgggcgtgagtgagactccaaactccgtctcaaaaacaaacaaacaaacaaacaaacaaacaaaaaaacagtgtgtacaaagactggaaatcttacccccaggatgagctgcggcttggagcactgattttctgctctgtgactgcattttccaatttcccctcccctctcagtgactcctaataaaatgcaccctcgcttacactttctagcccctcttcgctgcagggaggaggggcagcttgtccctggcgggcgcctccttccggggtgggggggccctgccagcgactttggggaccccgagcaagaagggcctattcgaaagggcccgaccgccgcgttggcttggggatcctgaagccctgcagaattttaatccacaccgggaggtgcggggtcctgcgggagggcagcgggcagggccaggagttcacccccgcagctcgaccccgcaccctgtatccccctccggggtaatcggtctccccgccgcccgcgttcgcccctcctgggggatcggcctcctcgccgcctaagttcacccctcctgaaggatccggcttccctgccgcctgagttcgcccttccttttttcttttttcttttgttcttttttttttttcccccgctctggttgcccaggctggagtgcagtgatgtgatctcggctcactgcaacctctgcctcctgggttcaagtgattctcctgcctcagcctcctcagcagctgggattacaggtgcgcgccacctcgtccggctaattttgtatttttggtacagacggggtttcaccatgttggccagactggtctcgaactcccgacctcaggtgatccacccgcgtcggcctcccaaagtgctgggattacaggcgtgagccaccgcgcccggcctcgcccttcctgaaggctcggcctccccgtagcctaagttcgcccgtctgagggatccagcttccccgccgccagggttcgcccttcctgagaactcggtctcctcgccgcctaagttcacccctcccgggcacccacctggccgcctctgccgcccgccttcgcccctcccggacacccacctgatcgcctctgccgcccgccttcgcccctcccggtacccaactggccgcctcggccgcctcagccgccgcaccgcctcgcagccgccgcggagggacacggccgcgggaacgccccacacgcatgcccgaccgcacccgcggaccggacctactttccttaaagggcccggggctccgcgcagaagcggcgtgcaggggtctcccagactcggtcccgcgggctttaaggggcccgggcggcgaaggcgcacggagccaagttccgggcagcagccctgggatgccctgagccgggccgggcggaggtctccgttgcctagcaaccggggccgcggcctgtgggcggagcctgcaccgtggctgcgacacggggcggggcctcagcgggagccggccgaggagcgggcaccggccattggcacaggcacgggccattggcgcatgcgtagggcgcggccttggggcggggcccacccagtggcggagtcttctgaggggcgggtcgtgggcggggcctggaggcggagccggcgccgtcagtagtcggctgaggacggaggcggggctgggcctgggatggggcggggcctgcgctggtggggcgggcgggggaggagacacggccaagcgcccgagtgggggccgttggttggtgcgcggctgaagggtgtggcgcgagcagcgtcgttggttggccggcggcgggccgggacgggcatggccctgctgctgtgcctggtgtgcctgacggcggcgctggcccacggctgtctgcactgccacagcaacttctccaagaagttctccttctaccgccaccatgtgaacttcaagtcctggtgggtgggcgacatccccgtgtcaggggcgctgctcaccgactggagcgacgacacgatgaaggagctgcacctggccatccccgccaagatcagtgagtgccggagcccagcccagtcccgactaccccgccagcgagaccccggggcaggccggtcacctggcttctcctcctgcccgcagcccgggagaagctggaccaagtggcgacagcagtgtaccagatgatggatcagctgtaccaggggaagatgtacttccccggtaaggggcgcgaaaccgaggcggggcccccccaccccgggacaccccgcccaccgcctgagcctgaccttctcctgcctcgacgactcagggtatttccccaacgagctgcgaaacatcttccgggagcaggtgcacctcatccagaacgccatcatcgaaagtgagcaaataaggcttcagaggagggaggtgttgcccagagcctcggagacccacggggcttggctgaggctggagtgatgtgaacagggcacctggcaccaggcagctggggaggagggcagctctccagggagggacccagcctagcacctgaaggatcaatgccatcaccccgcggggacctcccctaagtagcccccagaggcgctgggagtgttgccaccgccctcccctgaagtttgctccatctcacgctgggggtcaacctggggaccccttccctccgggccatggacacacatacatgaaaaccaggtgagcctgggccccagtgccgagggacaggccctgaggctttggagggttgggaggaggcaggactggggacaaggctgggcctggtaagatggcgctgtcctgccctcccacaggccgcatcgactgtcagcaccgctgtggtaagcaaggctccgtccaggctgaggggcgtgccggtggcagctcggggccctggaggctgaggggagccctggcggctcttgtacgtgtttcaggcatcttccagtacgagaccatctcctgcaacaactgcacagactcgcacgtcgcctgctttggctataactgcgagtagggctcaggcatcacacccacccgtgccagggccctactgtccctggggtcccaggctctccttggagggggctccccgccttccacctggctgtcatcgggtagggcggggccgtgggttcaggggcgcaccacttccaa

SEQ ID NO: 1560713 - DNA, 4001 bp, Homo sapiens
cccaccatgaccaagaaacccctaagatcggggatagggtctgtctgtcttgatcactgctgtgtctccaggatgcaacactcagcagttgctccattcagaaactcccattcagaaggggaataatgtgctaccattcacaaatcaaacaataatgacaacagtaatagtaataatacagggctgggtgcagtggttcacgcctgtaatcccagcactttgggaggctgaggcgggcggatcacctgaggtcaggagtttgagaccagcctggccaacatggtgaaaccccatctctactaaaaatataaaaattagccaggcgtggtggcgggtgcctgtaatcccagctactcaagaggctaaggcaggagaattgcttgaaccgggaggcagaggttgcagtgagccgagatcatgctactgcattccagcctgggcaacagcgcgagactctgtctcaaaaaaaaaaaaaaaaaaaaaaaaaggccgggcatggtggctcacgcctataatcccagcactttgggagctgaggcaggcggaccacgaggtcaggagttcaagaccagcctggccaatatagtgaaaccccgtctctactaaaactgcaaaaaaaaaaaattagccaggcgtggtggcgcatacctgtagtcccagctactcgggaggctgaggcagaaaatcgcttgaaccgggaggcagaggttgcagtgagccgagatcgagcaactgcattccagcctgggcaaaaaagcgagactctgtctcaaaaaaaaaaaaaaaaaaaaagtactaatacctaccacagataaagtgcttaccatgtggcaggcgcctgctgagggctttattcatttaaccatcccctaattttcccatggtggggaaatattccatttcacggctgggaaaccacaggaaggccggggtgttgcccatctgaccctgcgcgggtggtggctcctctctgagcctcagcttctcctttgtgggatggggtgtttggtaatctacgtcctccccaccagaaggacccatctgtgcctcagattcctctctccacatggggcttgtcccgtaaaaagagctccgggcctcagtgtcccctccacgggagctcctcctgcaggaaaggagctctgggcctcagtttcccctccccacactggggcttgtcctaaagcaagggagctctccaggcctcagtctcccttcctcacaccggggctcttcctgccgccaagggagctccgggcctcagtctcccctcttcatgtcggggctcttcctgcagccaagagagctccgagcctcagtttcccctcctcacactggagctcttcctgcagtcaacggagccccgggcctcagtttcccctcgccacaccggggctcgtctctcagcaagggagctccgggcctcagtgtcccctccctacactgaagcttgtcctgcagcaagggaactccaggcctcagtttccccttcctgcccgagccgcgatgggacgagggaggcggggtgctcaccaggtagtagatggacagcaccccggcgccaggctccagcagcgcgtctttgaggagcacccgcagtgtgaccgcgcgcctggtgagcgcgcccccgggcccgccgcagccccccgccccggccccgccgccgccgcctcctccgctgacgctactgccgccgccgccactgcgtccaccgcccgctcccgcattcggccgctcagggtcctcggcctccgcttcgtcctcgtcctcctccggcgcctcctcgcccgcaccgcccgccggggacagcggctccggagctgcggacagcgagaggctgcagggaggccgctcgccccacggctctgcagccccgcgcccctgcagccccgcgccccgcgcctccgccccgctgggcccgccgtacctgccatggccgcgcctccccgcgcccggagctctagactccggcttcccggcacgtcacgcggccccgccccggggaggggaggggcgccccaaccattggccgtcgccggggtcgggggaagggctcggcgcgctggggtgggcggagaaactgaggcctcggggatgcccacgcgggagagagatcgggaactcagccctctgggaacattcgggaaactgaggcgtgacggggtgttgaccgggagctcattggtgcgaatggggaaactgaggcctcgctgtccagggatagaggttgcaaggtggaagcctggggcgggtgcgcgagtggctcagcctgctgcaaggagaggagaaggtgagacctgcggtcaccgcacttgaggaactcagaggcctcggcctttaggaccaggggagaaactcaggtccaggggaacaatgcggactccaatagggaacagcctcgcgcagacacaggtggagccaaagagcccaagccggcctcagtcgctaaagaattaactcccaccctcccgggcggccctcgactgattccatgattggaccgttgcggagcccgccagccaatgataagagtcccatttatttcaccctcaaccaatcgatagcaagctactggattcccgcaccaaccaatccgtgtcaactatctgattacaccaactcggatttgaccaatgggcagacgtccatgtaaaccaatcagtagaaacccttagttatgagcgcaaaccatcagaggcagggactggactcaccagccaatcagctccgggtataaggccagccgagtccggccctccatacccttgggcggagcaggaggcagggccgggctcgttgcgcgcctgatcagtgcagccccggcctttgtcccctaccctgtttctgcaactacatccccgaccctgtcctgggaccttcgtcccggagcccaggctctgggatttccctcagtccctggcagggttgaaagtccgggatggggacttcctaaagctccgggacgccgtgggatgggctcaagtgcgggtggctttgcccagaccgcagtcgggaagtgggaactggacagtaggggtgcgggggaggctctccagggtgctcgggaatgttctcaggaagaagacttgacatagagcaagagctgggtacatgtgaactattgttgtccagcccaggcaccctttaggggccccaccctgactgtccagccaacaacgggcatccccaaggcctgcagactcagcatagcccaaaccggcctcagtttatttccccaactccttacgcactttctctttggctttttttccgtcccctgccttccaaaaccctgagccacacctccagcctcttgcacccaaatcctggccatcgcagtgagtctcaggcctccaaactcatgccccaccctgtcggtcttccaccattgccccagagggctctttctaaaatgcacctattaccacctccctcccatattattattttgttttcttttcttttcttttttctttttttttttttttttttttttttttttttgagacggagtctcgctctgtcacccaggccggagtgtagtggcaagatcttggctcgctacaacctctgcctaccaggttcaagcgattctcctgcctcagcctcccaattagctgggactgcagatgcacatcaccacacccagctaatttttgtatttttagtagagaaggggtttcaccatgtttgccaggctggtctcgaactcccaacctcaggtgatccacctgcctcagcctcccaaagtgctgggattacaggtgtgagccactgcgcccagcctattttcttttcttttcgagacagggccttgctctatctcccaggctggagtgcattggtgtaatcatggctcactgcagccttggcctcctggactcaaatgatcctcttgcctcagcctccagagtagctgagacaacaggcgtgaccagcatgcctggctaatttttaattttcttgtaaaagaaggggatctcactatgttgcccatgctg

SEQ ID NO: 1560714 - DNA, 4001 bp, Homo sapiens
ccgccagcccactgttgggtgtgggttgtcaggagcacaggagactcccaccctccagggtggctggctacactgccacttggagctcacacgtgtagccccctggggagtcccctgggtgcctggtatgccctccacactcacccggtacttcaagtaggacaggtacgtgtcccagcccagcgtcaggccgttgatgtaggtgactcgaaattgggggggcacgaagaggaagttcacgaactgcgcagcaggccacacgcaccagtctgcctgcggggagaggcgggggatgaggggcggggccagagctgggcgggggcggagcggccatcagggggcggggccggacatgtgcaaggggcgggtgctcccaccttgtagaattcccagaacttctcccgcagctcctggcagctctcacccactgtctgaccctccaggcagccaaggcctgggaagcaaaccaagaaatgagagtgttagaggccaggaagtactgttgagacgacaagatgggctgacgatggagggggcggggttgggcccctgagagcccacgccgcccaccccgggcagagggacagggactttcagatgggatggacagagaattagggtagctggtgtagagacaaaacagagcaagtcagtcccagtgagagaaagagaggttataaacatataaacacgtgccccaatggagacaccctgaagttgagggagttgtgttacttttccatcacagaccaggaagccgggctgggaggtggagaatgagagactcctctattaataccgctgtctttaccgagcctagggctggcacggttgcaccccattaagtctagcctcaatttctcttccttcaggcctcagagcctttgcattagctgttccctctgcccgctggttccctcttcatgtctcaactgagtgtggtccccttctttgggaaatgctctcaacctcccgcccagggcagccccaacagatacagtcctcgtccctcctacactcgccagcgttcacatcggccgagtccgtcctgtccccgctgtgacctggctcctagtccagggcgacccaaacagggggcaaattggaaatgcacctctgcatccttcttaacacaaagctggctccacccctcccgacctatgagaggcaaagcctaggcttaggaggctccttacccaagaagtaccagacgcccagcaatggagaggctaccagctgatccacgaggaccttcttgaggacatttgggaagcctcggaggccagacgcagggaataggcggtccagcgacaagtaccagtagtgcaggaagggacccatgctgcagcccaccgcaaacatgctcgctataagagtgtaagtcagggggctgggtcgggccggcaagttcctcagtccattccctctctccctccctggctaaggcctgggtaagcccaatgccatcccggagcctcagcctcaccgggaaaaccggaagagcccacccgtgcattcttccactacaagccccaccaggaggcgcggctccagaggctcctgggtagtgggcagagacctccgggggttgggaggtgatggagacccagagctgcggggagacagacacccggggagaggcgcggtcagggcaagggtcctgcgggggactgaggccacgggtcaggggtcacggcccgcagtcgggtgtcgggatcaaaggtcgcccggggtgaaggactaagcagcgtggcgtcctcaccggagcgccgtgggtcgaaaacctggccgggccgggcgcggatctcccaggactggcgcacgccatcaccggccgccatgagcgcgccgcagcccagcgtgttagtgacgagcagcgcgcggccctggaatagaagctgccccgcggataacaggcggcgtagccggcgccagccaccccgcgccatcgccctcaggaaccaaggaaccggcgcgccgctctgctttcgccgcgccgaccagtcgcgagtcactgtcgatcccaaattgcccgcccctccggctccccggccaatcgcataaggatcttcagtccgcaggtccgccccgagccgcgacgcgttcaccaatcgcaggcagcctcggggagccacattgcccggcccgaagagtattgaccaataaaaggcaggcgttctatcccaaggtcgagcccccaacgacctcccgagcttcacggaccaatcggaaaaaagaattgcgttacgtcccgcatgccgattggtaacgttgcactcttgtttccccgcccctttctgtgccagcctatgggaaaccgtcgcagccccgtcctaccgacacgcccaggacggcactggccagtcgcagaccggcgtcacgctggcaaatcagtgaccgtcgtcccgcctcccgcgttagggttggtcaatcttaggcagttacaacgccttctggcctggttgccctacgtatttccagattctcctggacttaaccagaagggatgtgatctgtggccagaaacaattatatcctaattataccgttcccgtagggaacaattattttttttctttttttgaaatggagtctcgctctgtcacccaggctggagtgcggtggcgcgatctcggctcaccgcaacctctccctcccgggttcaagcgattctcgtgtcgcagcctcccaaacagctgggattacaggcacgggccaccacgcccaactaattttgtatttttggtctagacaggggttttgccatgttagccaggctggtctcgaactcctgacctcaagagatccacccgccttggcctcccaaggtgctgggatgatgataggcgtgaaccaccgtaactggcttaaaaaatgattttcaatggaaatccctatgcattctctactagagtcgcaaactactgcctgtgggctgttaactgttgaaggtgtgcaggttcttggcatcttgaacaaagaattggacaaagtgcacaaacaaagcaaggaaagaatgaagcttaacaaaagcagagatttattgaaaacgaaagtacactccgcagggtgggagccagtggagcatacggactcaagagacctgtttaagaattttctggggtttaaatgccctctagaggttttcactggttacttaatgtacgtcctatgtaaatgaagaggatgaagtaaagttacaaagtcatttactggatgtatgccctctttaaatggagaagatatttcctgtcatagctgaattgtttccatttgatttggccttatgttccctgcctccagacctattctcctgcctcagggccaaatcctgtccctgcctgttttgtgctgctcatgatgagctaaaggtgtttcttacattttttaaatggtcagtcaagaaggtggggattggccaggcgcagtggctcacgcctgtaatcccaaacagtttgggaggcggaggcagctggatcacctgaggtcaggaattcaaaaccagcctggccaacatggtaaaaccccatctctattaaaaatacagaaattagccaggggcgtggtggtgggcgcctgtaatcccagccactcgggaggctgaggcagggtaatctcttgaacccgagaggtggaggttgcagtgaaccgagatagctccagtctgggccacagagcgagactgtctcaaaaaaaaaaaaaaaaaaaaaaaaaaaaggctgtgcctagggccgtggtcactcacgtttggctcagaattaacctctttaaatattttacggagtttcttttttttttttgagagagtctcgctctgtggcccaggctagagtgcagtggcgcgatcttggctcactgcaagctccacctcccgggttcacgccattttcccgcctcagcctggcgagtagctgggactacaggttcccgccaccaaacccggctaattttttatatttttagtagagacagggtttcaccgtgttagccaggatggtctc

SEQ ID NO: 1560715 - DNA, 4001 bp, Homo sapiens
ctggctctaggcatatggctcaggcggggcccatcgaatgactgctctgggatgggcaggtgccctagtggaccccctgagatacaaggagacttttctagtataggaggctcttttcctcatgatttggaccctaacagccgcctgccagcccatggaacctgaagatgaaggagggcagagctgaagcacagagatagataggtcctgatgctactggttgagccccttgatcttgccatacctgaagccaactgtataagtgtttccgtactagaactagtaccttcccattttttttgtggataaagtggtttgggtttgggattctttctcttgtatctaaaaaagttcctagaaggccctcccctaccccctgaggaggccctctcacctagggctgtaccatagccagcggtggccagagcaccagtgttacagtgggtcagcacagtcaccttgccaccgctgggggccacccgctccaggaggtggcgggctcctaggtccccaatgcttcggttgtctctgaggtctttctccagcatgtcctcggtgcagcagatcactctggggtgacaaggagttttcagcaccagccaccaggacccggggcccaggccaacgcctcctctctgcctaacgctgctgtcctggagccctcctgctcaaagcctctcattgctgtggggcctggacccttcggccagggccaccgaagtgtcactccgttcattcatgcaaagacatgtttaccaagcagttccggtatgacccagcagtaaacaagacaaaaatctctgctcctgtggagttgacactggggtgagtgagccagctgatgaagagataataaaatgaaggaaaagccggcagaatcaggcaacagagagcagcgggtgagctggatcatatagaatggtggaggagggcgctatggatacctggcccgcaccaatggcacgtgcaaaggctgtaaggcaggctcgagcttggtggggtaaagtgacattgcagggagggctggagcagaaaggaagtggggggaaaaagatggcaggaaggggaccaggacaggaaaaaaagttcctcaaaagcagaaaccaagagaacacggagatactaaaaagggcctccaagggcggataaggggctgcgtgtattcaggggaggcacgattaaggagttaggtttcagggccaggctgcccaggctagactctgggccccatctgtggggccctggacaagggacttaaggtcgccgtgcctcagtctccccatctgtggggccctggacaagggacttaaggtcgccgtgcctcagtttccccatctgtatagtgggtcactgtacttaaaaagagtcaatataattcctgctcagcgccgtgcctggtaccagatccccgtacctctcccggaccgcctcttccgtagcgccctcccgttcggcctcccgggctgcaacatcagccaggtcgcgggcggcgcgggccatgttgacagcggtgggccgggcggtgacgaggaagctcagcttgtcgcgcacgaaggccacgagcgcggcgagtcccggtcccccggcgcccgcctgcagctccacggcgaggctgagacagcccaccagggctatggccggggcgccccgcacctgcggggcagggatttgggcgtcggaagctgcaggcgcgggcgcactcccacctccaacccggccgccccgccgccccgccgccccgccgccccgccgccccgccgccccgccgccccgccgccccgccgccccgccgccccgctgcaccttcatggcgcggatggcctcccaggcctggtgcaccgagcccaccgcctcgtagcggctctgcttgggcagcagcagctggtctaggatctgcagggagccccgcgagtagcggatcgcctccagggtcatggtgcagcagccaagcccagcgcaactcagagggagctaggggtccgcgcgcacttgggagcggggcggggccgtgggcggagcctcccccggaaaaagagacacgcacatgcgcatccaacccgattccacgggttcccaggaggcggattccacgggttcccaggaggcggattccacgggttcccaggaggcggattccacgggttcccaggaggcggattccacgggttcccaggaggcggattccacgggttcccaggacgcggattccacgggttcccaggacgcggattccacgtggccgaacccactccacgactcctgccaagcccgaacggagtgagccgcctcctcggaaccacaaaagtggcagcatttatgggacgcctagtggataccaggccccgtgtttaacaacctgctgtctagagttagggatgtatccccagtggcaaggtaacatcaagtgttcaaaccaaagaatttgttaaatgatcttccaaggttgagggggaggtagtggggggtcgtgtgccccttgatggatgcaaggctgtttctgggccattttctgctcggtttcattcaaaagtaacatgcaggacaggcgctgtggctcacgcctggaatcccagcattttgggaggccgagtcgggcagatcacttgaggtcaggagttcgagaccagcctggccaacatggtgaaacccagtctctactaaaaatacaaaaaattagctgggcgtggtggcgcacacccgtagtcccagctgctcgggaggctgaggcagaagaatcacttgaacccaggaggcagaggttgcagtgagccgagatcgcgccactgcactccagcctgggtgacagagcaagactcggtctcaaaaacaaaacaaaaaaaccccaaaagtaacatgcacggggggcttttccatgggccacccctgggctgggtataataaaaagctcacacctgtgtgctccagcccctgctgcatctggcacacatcctgggtaccccgtgtgccttgtccctggccttgtgtgtgtggttcctggcccccttttcacccttcacacttggcccatgcctcctcctccaggaagtctgtcctgattcctggccaaccgggaccaccaccttgagactcttgttactctggaaggggaccatgtctgtggtcacagctatgaccctataccagcatttgctgatgagaggcctaccaagcttggtcaaggtgggggggtgggggggcagccccagggtccatctaacaacccaagacagggaagaagagacaggtctttaatgtacggagtctcacaaggcacaaacaccctcaccaggaccaaataaataactccacggttgcaggaaggcgcggtctggggaggatgcggcatctgagctctcccagggctggtgggcgagccgggggtctgcagtctgtgaggggcctcctgggtgtgtccgggcctctagagcgggtccagtctccaggatggggatcgctcactcactctccgagtcggagtagtccgccacgagggaggagccgagactgcaggggtgccgcgtgtcgggggtgtcagctgcctcctgggaggagcctgctggcgacaggggcttgtcctgacggctcccttcctgccccctcgggctgctgcacttgggggtctcagttgtttccggaggacagtctccgggggacatgggccggtcctgggcagcctcctctggtacccgcggttccccagacttgggggtgtcggccgcatgctgggggctctccgggacgtcccgagacctccgccgcacgatgcccaggtccccgacggtgatgggggaggtggcaagcgcggttctgcggctctgtgccagcttcttcaggacgccgctgaccttgctgctggaggcggatccgggggcagaggggaaccaggagcggctgatgatctcggtccgcttgagtttctgcttgtcctcgtaggctagaggagaggagaggacatttcaggggcggcaggggagggggtccagaactgccctctggtagac

SEQ ID NO: 1560716 - DNA, 4001 bp, Homo sapiens
gtgaaactcccctctactaaaaatacataaattagctgggcgtggtggcatgcacctgtaatcccagctacttgggaggctgaggcaccagaattgcttgaacccaggaggcagaggttgcagtaagcagggatccgacaactgcactccagcctgggtgacagagcgagaccctgtttcaaaaacaaacacccccccgcacacacacacagttttccaccagtcttcccagacctataaaatttatgacacaggctgggcatgacggctcacacctgtaatcccagcactttgggaggccgaggcaggcagatcacctgaggtcaggagttcgagaccagcctggccaacatggttgaaaccccgtctctactaaaaatacaaaaattagccgggtgtggtggtgggcgcctataatcccagctattcgggaggctgaggcaggagattgcttgaacccaggagagggagtttgcagtgagccgagatcgtgccactgcactccagcctgggggacagagcgcagtggttcatgcctgtaatcccagcactttgggaggcagaggagggcggatcacctgaggtcgggagctcgagaccagcctgaccaacatggagaaaccccatctctactaaaaatacaaaattagccgggcgtggtggcgcatgcctgtaatcccagctactcgggagggtgaggcaggagaatcgcttgaacccgcaaggcggaggttttaatgagccgagatccccccattgcactccaacctgggcaacaaaagggaaactgtctcaaaaaaaaaaaagagttatgacacatataaggcaagtggaactttgaacatttattacacgtttaataatatttcaaaattattgataattcttttggatgtgataagctttgtaattgtcttttaatgagctctcatcttggagagatacattctgaaatatttacagaagaaataatccgatgcctgagatcagcttcaaaagaactcaggatggggcagggacgggttgtaggtagtcggtagtcagggtactgggtacacggatgttctttgtactgttctttggtctgttgcgcaggttcgaaatgcttcctaattaaaaagcctaaaaagggacttggcaagctcccatccagacttcaaccccacaatatggagagcactcaggtccgaggcgttcctgctccccagctccctgcaaaaatagcgccaggcaaggtccgaggcgagggcgatgcttccatgagggtcccgccgactgcgtcgcgatcctcaatggctcagcgacttgcggcccttgagcattcggcgaaggatgacctgcacgccggccggcgtgctcaggcgccggacccagccgtgcttgttcttgcgtttgatgttgctcggctgatactcattcccgcgagccttgccccgggcctgctgcggggtggggaggccccaggcgtctgggaaccccagccaggcccggggctggagccacctgcgtgggtagagggacggcgagaaaggtcagacggggcgctgggtgaccttggcgctcaacctctctgagcctcggctcccggagacagagcctggctgcaaaatgcgcaaggcactggcaggtcacgcgggcagtgaagagtggcgccagcctccgaagccgcccttattccctgatttggggaagggtccccctgaggacttacctgccacccagcaacgctgccgacctactcgtggggcccaacagggatccagccaagacagccatatccgcagtgggtcccgcagtaccggctgcgggcgattccggagcccagagccgctccagccctggaacaaaggattatgggaaatgtagtttctcctaacgtgcaaaaaagaggccgttggggaaaaccctgaagttgtagttctgcgcctgcgcaacagaggcgcgccagtctatatccgcggggcacagggatgctctgcatacacaccaacaggtagccggcgaacggcgccttctgagcaagcgcgtgcgcacaaggcattatctcccgcggtcagctggcagctgagctgtagttctctctcctattgaccggcagagggtgccccgcggtggccgggcgcagctggtggcagctgcaggaagcggctggttggtcttcccgcccccagcgggagctgggcagatggcacacagctggctggcagcttgtcctggctgcagccaagtctccgcctcttggcaggaagccgaggaggcctgagttcaagctcgctgcgtgtccttggggtggtccctgcgccactctgggctttctcaatctgtaaactcagggattgcaagcttgtctttggcaatcttgcccccattttgggccctagaagaattctcctctgttgttagaaccaaaaaaaaaaaaaaaaaaaaggaagaaaaattttctgatactcagatctgaacccctcccctactcacacactatccttggctccccatttccccaggtaaaacctgctcagcccttccatcaggcatgcaaaaccctctacacacaccatcttacatttcagccacactctcctctctgcctggtgttcccctatccgccctttaaaaatcctttcctctccaagggctgagtgaggtgtggctcatgcctgtaattccagcattttgggaggctgaggagggaggatcccttggggccaggagtttgagaccagcctggggacatggtagcaaccacctatagtctcaagtacttgaaggtgaggtgggaggattccctgaacccaggagatccaggctgtagtgagcaatgatagcgccaatgcactgcagcctgggcaacggagtgagatcctttctcaaaaaaaaaaggagtcgtcttctctcaaccgctgtccattcttctggcccgactgctttcccttgactctcccccaagttcaagggctcctcaagggccaggggcctggggctgtatccctacaagtgccagcttggggttcatgcagagaggtgtttgctaaatgaataaactgtatagtctcccagaagtgcccttagtgggcaagagtaggtgtctggacggaatccagctctggcagcaaattccaggggatgtgagtggccaagcagcaaggagcatttaacccctcgtcctccgaagcccatcctacctgtagcatcgtttagcaaaacatcaccactataataatgcccataatatatggagcatttgttatatgcacgacactatgatgagtgctttacctgcgtagcaaacttatgagaggattaatttcatagagaaataaacggaggctcaggaaagtgaagtaacttgcccgaggtcacacatcagcaaagggcagaggctggatttgagacctgagctctcctgagggcctaccatggccccgccggtaccacagagctgggatgcctgcctcttgctatcagcccttctcagaaccatggcagccatgggttaaatcggctgattatgaaattcaaactctctaattacccacagctccaagactttccttgaaagctttagagaagcccgtcacgatggctcacgccagtgatctcagccctttgggaggccgtagacgagaggattgcttgatgcccagagttcgagaccagtctgggcaagatagcgagacctcgtccctaccaaaagaaaaggggggggcgtaggggggaggttagcaaataatggttcccagggtttggaatcacacagccttgggttcaagtcccagctttgctccttgcttgatttatgctcttgtgccctttatgagcctcagtttccccaccggagattggaaaaagatcttggagtctctgcttctagaatggaaaggtcaatacagagagaagagtatgggggcctcgtttggagaggaacagggcaattgggaggcaggggctggggggcaagggcttgggagacccatttgcagagagagggccccggccgcaca

SEQ ID NO: 1560717 - DNA, 4001 bp, Homo sapiens
attgccaccttcttcagggactggttttcctctctagttctataccattccatacagtcacatactcaacatctgaaacatggccagtgccccatgctacaatgtgatttcgacatagttttaaatacaggttaaatacattattgaaatcaatttcacctgtttttttttttgagatggagtctgtctctgtcgcccaggctggagtgcagtagtataatcacggctcactgcaacctccatctccccaggtgcaagcgattctcatgcctcagcctcctgagtagctgggactacaggcttgcactaagacgtccggctaatttttgtatttttggtagagacggggtttcatcatgttggccaggctggtctgcaactcctggtttcaagtgatccgcccacctcggcctcccaatgtgctgggattacagatgtgagccacagtaactggcccctacattttcttttctttcttttttttttttttttttgagacagagtgttgcccaggatggagtgcagtggcgcgatctcggctcactgcaagctccgcctcccgggttcacgccattctcttgcctcagcctccagagtacctgggactacagacgcccgccaccacgcccggctaatttttttttgtatttttagtagagacggggtttcaccatgttagccaggatggtctcgatctcctgacctcgtgatccgcccgccttggcctcccaaagtgctgggattacaggcgtgagccactgcgcccagggtggcccctacattttcttagagatgttatgaacagcagggtaactaaaatgcaaacagcctcttccaggcaccgaggaatggtttagtctttttagtgctcttatttgcaaaaaccagttaacaaagattatcaacatttctatagaacttattatgtgccagaattaagtcatttattcatcacagcaacctcccgaccgctgacaaaatagggacactgagggacaagaggggaaggcaggatttgaacctaatcagtcgggctccagaattctgtctccctaacccttagatgatgtcacctctcaggcttcaatctcacacagcgctacagcaggggaaactgtcatcattcccctttgacaggtggagaaacggaggctgtagaaatacagcactttcccaagggtacaagcccaaagtcatcgtgactcctgaaatcccgctcttcatccctctgccactcagttcaccattacagccctcgctcacctgggcgcggtggcgaaaacatcggggtgcaggtcggccaggcccacgcgctcctgctcgaagccccgcaaggactcgacccaggcctgcactgggcgtcgatgagtgggtaccgggagctcgactttgcgcagcacgggctccgggagacctggagcgattgcgggggtcagaggttagggtcaagggtcagacctctctgtcgccgcccctcctggagccaccccggttgccttaccctcgctcgccacctgctccgggttctcggtcgcacgcgctgcctcttccgccagggaactcaggccctgcaagggttgggcgaaagtgagagacgacccctggacacccccaaatttcatccttcgaccacgcctccagcccctggcctcacctggctgccggtaggccgaagccaggcccgcgccccggcccggacgaactgcagcatcgccgcgcagcctcccacgccgcgggaggtcaaggccactggagcctcgcgaggcgccgctggatgacgtcacgcacgcgacgccgccctacccgccgcgactccgcgctggaaagcggggtgtgcaaaaccgaagatggagggggtccgacccggcgtgcccagacctccaccccaggactaacccccagacccaattttcactcctgcctcaaggaccctccgtaacactggggaacgcgacctcacagcaagaagacccagcttccgtaggcctagcctactttgggtcccgcctccgacgagccggtgcaggaattcagccaatgagacctctctggcccaattcagccaatgactgttaagcctgaaggagtgacccccgcccataagtgggcagttctggagtgagcaactaaggaatacagccaataacgcttaaacttttgctgttggtcacgcccaccgggccacgccttcatcccgcctccaaggctgtcggagatggttttttctttatccagttatgtggttttgtttttttatttgtttttttgtttttgtttttgtttttgtttttgttttttttgagacggagtcttgctctgttgcccaggctggagtgcagtggcgcgatctcggctcactgcaagctccgcctcctgggttcacgccattctcctgcctcagcctcccgagtagctgggactgcaggcgcccgccaccacgcctggctaattttttgtatttttagtagagacgggtatcaccgcgttagccaggatggtctcgatctcctgacctcgtgatcctcccgcctcagccttccaaagtgctgggattacaggcgtgagccaccgtgcctggcgttttttcatttgtttaaaggcagggccttattgccctcagaaagccttcaggattgggcctgccagaccatgcctcccagtttagattccccagggcagggccatgtccccccgaaacccctcagattaggtatttgtgtcccttaccccctagaccagggtcctctcccctacccccttaaaccaggtcccgtcccctctcagaccttccagggctctccaaggacagaacaaagtggggagtccacagatcctggagtgcctcccttgtcgccccctaacaaatccgaatgcttatttttagtttctttgttttggtttttagagacaaggtcttcctctgtcgcccaggctggagtgcaatgggcaagatcatggcttactgcagcctcgacctccagagctcaagggattctcctgcctctgtctcctgagtagctggtctacaggtacgcaagcccggctcatttttgtattgtatttttttattttgtatttgtattttgagatggagtatcgctctgtcgcccaggccggagtgcagtggtgtgagatcgcacatctcggcctcccgggttcaagcgattccctgcctcagcttaccgagtagctgggactacaggcgcccgccaccacacctggctaactttttgtatttttagtagagagggggtttcaccgtgttagccaggatggtctcaatctcctgacctcgtgatccgcccgcctcggcttcccaaagtgctgggattacaggcgtgagccaccgagcccggccctaattttcgtgtttttattagagacagtgtggcaccacgttggccaggctggtcttgaactcctgacctcaggtgatccacccgcctcggcctcccaaagtgctgggattacaggcctgagccaccgcgcccggcctaattttttttttgtagagatggcggggggtgggtctcccaatgttgcccaggctggtcttgaactcctgggctcaagcaattctcccgcattggtcccccaaagtgctgggattacaggcatgagctactgtggcccacccatttttaggttctttaccatgttcccgatagacctccagggggcgccaccggatcatagccggcttccctaccagtccagggctgtctacttggaggccagtgcgttctggacagagcacagctgacaacgtggtctgtgaaccaacctcattttcctctgctggaaaaggaggttatgagattcagtgacgtaatggaggcaaagcttcccatgcctggtacaaggtgtaaagtcaataaatagcattattattattttttttttgagacagaatctcactctgttgcccaggctggagtgcagtagcgcgatcttggctcactgcaacctctgcctcctgggttcaagcgattctcctgcct

SEQ ID NO: 1560718 - DNA, 4001 bp, Homo sapiens
gaggtgggaagatcacctgaggtcaggtgagtttaagaccagcctggccaacatggtgaaaacttgtctctactaaaaatacaaaaaaaaaaattagctgggcatggtggcatatgcctgtgatcccagctactcgggaggctgaggcaggagaatcacttgaacccgggaggcggaggttgcagtgagctgagatcgcatcgctgcactccagcctaggttacagagcaagattccatctcaaaaaaataaaaaatctaaaaaattaaaaaataaagacagcccggccgggcgcggcggctcacgcctgtaatcccagctctttgggaggccaaggtgggcggatcacgaggtcaggaggttgagaccatcctggctaacatggtgaaattccatctctactaaaaatacaaaaacattagccgggcatggtggtgggcacctgtggtcccagctacttgggaggctgaggcaggagaatggcgtgaacccaggaggcggagcttgcagtgagccaagattgcgccactgcacactccagcctgggcgacagagcgagactccgtctgaagaaaataaaaaaataaaaaataaaagcccaggctggagggcaggggcacaatcatggctcactgcagcctcaaactcccaggctcaagtgatccttctgcctcagcctcccaagtagctgagatcacagttgtgagccaccatgccccgcttatttttatttttatttatttatttatttattttgagacagagtctcactgtgtcgcccaggctggagtgcagtggcgtgatctcggctcactgcaacctccgcctcctgggttcaagcagttctcctgcctcagcctcctgagtagctgggattacagacatgtgccaccatgccccactaatttttgtatttttagtagagctagggtttcaccatgttggtcaggctgatcttgaattcctgaccttgtgatccacctgcatcagcctcccaaagtgctgggattacaggcgtgagctaccgcgccaggcaatttttttttttttttatacaaacagggtcctgctatgttgcccaggctggtctcgaactcctgggttcaagcaatcgatcctccctccttggcttcccaaagtgccgggaataaaggtgtgagccatcatgcctggcctcgaaatcactttaagtgggatttggacacagcattaagtaactttaagtgggatttggacatagcattaagtaacaccgatgcttggaatgaccaagtcattcaagttatattttgtctgctatgtgtctgtctttaaggccgaacattggacaatttccccctttcaacaaaggagatcaggcaaggctgtatccagctaaaccttaataaccttgttttgttcttgctgaagtggccaattaaacgggctccataatttctttgaatgtttggtaacgtcttggccaaggttacccagcgatttggaggcaggcagagaaacagaactggaacccaagttcatgacctccccagactcccttcaaatcctttccaacccgcgcctgcgcagtgaaacgcgtggtctccacgtaaccacatcctcctcccaggccgctccgccccaagctggcgcctgcgccctgggtccaatcgctacagtatctccgagccagacgcccgagctccaagcggcgctgggtccctcaaactgcgcctgcgcatacagcctggcatccgcctctctgcgcttgcgcatcagttctagcaccacctccccaaccaccgcctgcgcactgtcaattcctcagtgcacccaccgtccccatttggttcctcttaacccagctcacctggtttcttggcataatcccgggccaggagtcttccggaagtggcggggtttaggagctcccaggccccccagccggcccacgtccgggtagccccgaaaaggcgtttggtcgccatgacgtattgcgggcagcttgcaagtgcacgtttccggaagacgtcagtggcccaagggtgtttgggagttgtaggccccgtggaagtgtaggccccgtggaggtgtctgggaaatgcggtctcccaagctttcataatctatggtgatttcttcagacttttgtagacatacacagttactataggaggaggcgttcaagggatatttcattgacttcttgcccttcttcaattacataacatttactaaaaatatcacactttatatgttcctgattccatccaatgagtaattattcaaagctttaaagttaaaaaaagaagattaacaatgagtctaatatactccagtagggctggagtctaatcactgttaatttttataacattatatttttaaaattatatataacatatataatacatataatatatagtatgttttatatataatatataaattaataatatatattttatatattcttttccagctctactactgctaaatccttaacccgcttgatctaatttaatcctcacaattgagaggtaggtactattttttccccagcttataatgaggaaactgagttctcagggaggtaaagttcccaggccgaccccaaatccatggtgcacctatgtgtctccctactgtgagccaaaccgaaagtccgtctttaacagggtctccacgacgcttccggtgcctcaaggtcccaaggaaaccacctctcacacttctttaatatttcccaaccccacttctccccatctgccatcctttggaataatgaacacagcccccagagccaggcagtgattattaaccctattttgcaggagaacaaacaggtcctggggccagccggggcagtctgcgggccgggaagcctgggattcgaactcccctccaacatctgcagttgtcccagcgcccccgcgtggcgaggctgggtgggagaactacatttcccagcaggcctcgcgaggccgcgcatgctcaatgggccagggctctgcgcggatagaggagcgggcgccgggaccgggaatccccgagctgcgccttctggggacgcggcccgggctacgtcggggccgtccgtggggagcggggtcctggaggctgcgcggggctgaggcggcctcgatttgggaagtgagtgtcctcgaggtgcagagcgcagtctgagtcggcgcttgaggtcttcggtctgaggggggactagggtctgggcttggggctgggtcctgaagtcggggtctgagtctggagtcgatcttggggtagcattggaggtttggagactggggtccgccttatggcgtcttgggtctctggtattaagtccagggtcctgggtctaaagttctggatggaggtattgggggttgaggtcatgggactggggtcttgggtctggggtcttggggaactgcctctgaccagtcggtagagtcagggtgtgaggtctgggtctccagcctgggttccgcgtcttgagggaggaggacctggaagaaccagggctggagtgaacagactccattagttgagagaggtctgggatgacacaggggctcgggaagccactgcctcacacctccccattctgtggctcagtttcttcatctgtaaaatgggaatcctaacttccttgcaagggttagtgggtattaaattatgtgccctgtatgaacagtacccagctagagcctagcaccggataggcagccgggaaacctcaagttttttgtttttcgggtttgtttgttttttttaagacagggcctcactctgtcacccaggctggagtgcagtggcacaatcaaggctcactgcagcctctgcctcccctggttcaggtgatcctcccacctcagcctcccaagtagctgggactacagcctacaccaccacccctagctagtttttttttttttttttggagatagtctcgtctgtcgcccaccttggagtgcaatggcgcgatctcagctcactgcaacctccgcctcccgggttca

SEQ ID NO: 1560719 - DNA, 4001 bp, Homo sapiens
tgtcccagcagaaaaggtccttcaggccacccctctaaacacaggagccaagggtgttgacagaggggcaccctttgcacccccaggactcctatggcttaatagtggtcctgatggaagaggcggagccaggacttgaatccatgagtggctgcctctagaggcgcaaaggccagcatcggaggaccctgtggcagccaggagcggaaggttcatgttctgcaggggcgcccagcccactgtgcccccagccgtcacttcttctgcacgtggccacagtcgtacttgccacgcacaacggtgagcttgacgcctggcaggtcctgggtgcggccgccctccacaaggacaatctggtgctcctgcagggtgtggccctccccagggatgaagcagacggcctcgcggccagtgctgagccgcactcgacagcacttgcgattggctgagttgggcttcttcggcttgcgggtaaacgtgcacaggaccacacccttcagctgcggccggccttccgtggggcccagcttccgaggcggccgcttggggggccccaggcggtgcatctggttcagggtagccatggagcaggtagcccagagccggggaaccagagctgggcctggagagggccgaaaggggttattatcccagagaacagatcttagagtagtagcaactcaattttggtgttttaggcattgtttaaagcactttacaaagatgcatttgttcacatctaatgttatctacagacaaaagtaactctttattcttcaaggaagcattaccttttttttttttttcttttttttttttgagacaaagtctcactctgtcgcccaggctggagtgcagtacctcaatcttggcccactgcaacctctgcctcctgggttcaagcaattctcctgtctcagcctcctgagcagctgggactacaggcacccaccaccacgctcggctaatcttcgtatttttaagtagagacggggtttcaccatgttggtcaggctggtctcgaactcctgacctcggcctctcaaagtgctgggattacaggcgtgagccaccacggctggccaggaagcattatttttaatgctgtttaaaataatagtaggctcagtggctcatgcatgtaatcctagcacttttggaggctgtggagggtcacttgagctcaggagttaaggccagactgggcgacacagggagacctccctctctacaaagaatcaaaaagttagctggttgtggttctgcaggcctgtggtcccagctacttgggaggctgaggcgggaggatcacttgagcccaggaggtcgagactgcagtgagctgtgatcacaccgctgcacttcagcctgggcgacagagggagatcttaaataaataaataataaaactgacccaaacgccgcttgacacgcagtagccctccatgcagctgcttcccacctcttgctctagcagccctagctctgccaaaaccccaccgtgtttttccacccccgtttccctcggggctccgacggaggcacacaagtccaagagcgaataaccctccccctctagcctcgtccctgaagcccaagtcccccacttaccacaagttagggacgtgttgaggccatggagaaggccagaccaggacatcctgccacctgggccgtccctgtggtaggggataagagactcagaaaggaggaaaaagtgaccgatccgcaaatgctccccgatccgctctcaggactttctggcttaaatcaaaggaaatacctctataggtctaaccacaggccctcatgctgctaacagaaagtccctccgtaaatttagcctcgctctgagtgggttcccgagggcccaaccactctcgcccgcacgcaggaagaactgggaaactggggagatggcctggtagatttggaggaccccaggattccaccgacctcacaggacctaaaggtgaggtcgcggacacgctgaatccagcttctagcctcttccgggcgctatccgtgcagggattggctggttctgcctcgcgtcactgaagaggcgggacacagacgacgattgggcgacgaaggactctatcgcggtcaactttcctcaggatctgattggctcgtcacggtcaggttcgctgccttgcaattggtctaaacgcggagtgggcgggacgaagtgccgccttgttcccggtccaagatggctgcgtccatggcgcggcgcttgtggcctttgctgactcgtcgggggttccggccccggggaggctgcatctccaacgatagtccaaggagaagtttcactacagagaaacgaaaccggaacctcctgtacgagtatgcgcgcgagggctacagcgcactccctcagctggacatagagcggttctgcgcatgcccagaagaggccgcacacgccctggagctccgcaagggggagctgcgctcggcggacctgcccgcgatcgtgagtgcgcctgcgccggccggggggcgcagacgtttgctttacggaagaattgggtttgcaagatgccctccggcagggggcgaacctgtagtaggaattttagttatttcccaagttagccaacgtcttgtgcatggcacccacttatgtgccagttgtccagtgagtgctgaggccctactatgtgccaagaatgcctactgtgtcctggacacccattatgcgcttgtttcatactgctcgctgggtacctcctgtcctttaggaacttgctatgtgacattgccctccgtgctgcaacctcatgccagcctttccctaagaccacaaaggaaaatggggagccaagtgtgaatcggacggggtcagggctggggtgtggtggagctcttgcgtttagagagagaggtagggagagttgtgcacctccgccacacatagcaggcagttaaatagagttaatgaatgaatgaatgaatccattaatgaatggttctattaaactgatacttaaggtgcaactgctatattccggtgttctagatgttgcaaatatgcggtgaataataataaaattgctagcacttataaaagggaattaggaccgggttcacaatatctctgtgttgaggtgctaacgatagtggggtccccacgtcttcccattcctctcttggactcccctcccagcctgtttgaagtgctttattcactttaacctcgtttaattttcacagcaactctatgaagtaggtgccattatttctcccattttatcagaggggaaactaaggcttcgagaagctaattcacttgcgctaggtcatgcaactgggaagtggcagagtgggaattttaacctgtgctttctggcctagaatccactttttttttttttttttttgagatagggtgttgttctgtcgcccaggatggcaggatggagtacagtggtacaattatagctcactggaaccttgaattcctgagctcaaataatcctcccactcagcctcccgtgtagctgggactacaggcagacaccaccacgcccggctaaacttttgtattttttgttgagacagggacatactatgttgcccaggctggtcttgaactcctgcgcccaagtgatcctcccaccctggcctcccaaaatgctgagattacaggcatgagccaccacacccagactccacaatcttaagtaccctgctgtgccctctcatgatctgagttcacagtctagtaaaagacattttttttttgagatggagttttgctcttgtctcccaggctggagtgcgctgcgacttctgcctcccaggttgaagtgattctcccacctcagcctcccgagtagctgggattacaggcacatgccaccacatctgcataatttttgtatttttagtagagacggggtttcaccatgttggccaggctggtctcgaactcttgacctcaagtgatccacccaccttggcctcccaaagtgctaggagtacagatg

SEQ ID NO: 1560720 - DNA, 4001 bp, Homo sapiens
cccagccgtcacttcttctgcacgtggccacagtcgtacttgccacgcacaacggtgagcttgacgcctggcaggtcctgggtgcggccgccctccacaaggacaatctggtgctcctgcagggtgtggccctccccagggatgaagcagacggcctcgcggccagtgctgagccgcactcgacagcacttgcgattggctgagttgggcttcttcggcttgcgggtaaacgtgcacaggaccacacccttcagctgcggccggccttccgtggggcccagcttccgaggcggccgcttggggggccccaggcggtgcatctggttcagggtagccatggagcaggtagcccagagccggggaaccagagctgggcctggagagggccgaaaggggttattatcccagagaacagatcttagagtagtagcaactcaattttggtgttttaggcattgtttaaagcactttacaaagatgcatttgttcacatctaatgttatctacagacaaaagtaactctttattcttcaaggaagcattaccttttttttttttttcttttttttttttgagacaaagtctcactctgtcgcccaggctggagtgcagtacctcaatcttggcccactgcaacctctgcctcctgggttcaagcaattctcctgtctcagcctcctgagcagctgggactacaggcacccaccaccacgctcggctaatcttcgtatttttaagtagagacggggtttcaccatgttggtcaggctggtctcgaactcctgacctcggcctctcaaagtgctgggattacaggcgtgagccaccacggctggccaggaagcattatttttaatgctgtttaaaataatagtaggctcagtggctcatgcatgtaatcctagcacttttggaggctgtggagggtcacttgagctcaggagttaaggccagactgggcgacacagggagacctccctctctacaaagaatcaaaaagttagctggttgtggttctgcaggcctgtggtcccagctacttgggaggctgaggcgggaggatcacttgagcccaggaggtcgagactgcagtgagctgtgatcacaccgctgcacttcagcctgggcgacagagggagatcttaaataaataaataataaaactgacccaaacgccgcttgacacgcagtagccctccatgcagctgcttcccacctcttgctctagcagccctagctctgccaaaaccccaccgtgtttttccacccccgtttccctcggggctccgacggaggcacacaagtccaagagcgaataaccctccccctctagcctcgtccctgaagcccaagtcccccacttaccacaagttagggacgtgttgaggccatggagaaggccagaccaggacatcctgccacctgggccgtccctgtggtaggggataagagactcagaaaggaggaaaaagtgaccgatccgcaaatgctccccgatccgctctcaggactttctggcttaaatcaaaggaaatacctctataggtctaaccacaggccctcatgctgctaacagaaagtccctccgtaaatttagcctcgctctgagtgggttcccgagggcccaaccactctcgcccgcacgcaggaagaactgggaaactggggagatggcctggtagatttggaggaccccaggattccaccgacctcacaggacctaaaggtgaggtcgcggacacgctgaatccagcttctagcctcttccgggcgctatccgtgcagggattggctggttctgcctcgcgtcactgaagaggcgggacacagacgacgattgggcgacgaaggactctatcgcggtcaactttcctcaggatctgattggctcgtcacggtcaggttcgctgccttgcaattggtctaaacgcggagtgggcgggacgaagtgccgccttgttcccggtccaagatggctgcgtccatggcgcggcgcttgtggcctttgctgactcgtcgggggttccggccccggggaggctgcatctccaacgatagtccaaggagaagtttcactacagagaaacgaaaccggaacctcctgtacgagtatgcgcgcgagggctacagcgcactccctcagctggacatagagcggttctgcgcatgcccagaagaggccgcacacgccctggagctccgcaagggggagctgcgctcggcggacctgcccgcgatcgtgagtgcgcctgcgccggccggggggcgcagacgtttgctttacggaagaattgggtttgcaagatgccctccggcagggggcgaacctgtagtaggaattttagttatttcccaagttagccaacgtcttgtgcatggcacccacttatgtgccagttgtccagtgagtgctgaggccctactatgtgccaagaatgcctactgtgtcctggacacccattatgcgcttgtttcatactgctcgctgggtacctcctgtcctttaggaacttgctatgtgacattgccctccgtgctgcaacctcatgccagcctttccctaagaccacaaaggaaaatggggagccaagtgtgaatcggacggggtcagggctggggtgtggtggagctcttgcgtttagagagagaggtagggagagttgtgcacctccgccacacatagcaggcagttaaatagagttaatgaatgaatgaatgaatccattaatgaatggttctattaaactgatacttaaggtgcaactgctatattccggtgttctagatgttgcaaatatgcggtgaataataataaaattgctagcacttataaaagggaattaggaccgggttcacaatatctctgtgttgaggtgctaacgatagtggggtccccacgtcttcccattcctctcttggactcccctcccagcctgtttgaagtgctttattcactttaacctcgtttaattttcacagcaactctatgaagtaggtgccattatttctcccattttatcagaggggaaactaaggcttcgagaagctaattcacttgcgctaggtcatgcaactgggaagtggcagagtgggaattttaacctgtgctttctggcctagaatccactttttttttttttttttttgagatagggtgttgttctgtcgcccaggatggcaggatggagtacagtggtacaattatagctcactggaaccttgaattcctgagctcaaataatcctcccactcagcctcccgtgtagctgggactacaggcagacaccaccacgcccggctaaacttttgtattttttgttgagacagggacatactatgttgcccaggctggtcttgaactcctgcgcccaagtgatcctcccaccctggcctcccaaaatgctgagattacaggcatgagccaccacacccagactccacaatcttaagtaccctgctgtgccctctcatgatctgagttcacagtctagtaaaagacattttttttttgagatggagttttgctcttgtctcccaggctggagtgcgctgcgacttctgcctcccaggttgaagtgattctcccacctcagcctcccgagtagctgggattacaggcacatgccaccacatctgcataatttttgtatttttagtagagacggggtttcaccatgttggccaggctggtctcgaactcttgacctcaagtgatccacccaccttggcctcccaaagtgctaggagtacagatgtgagccaccatgccccactaaaagacatttaacatatacaactatacatatatactaattacaatttctggtaaatttgactacctagagtaatcaaattcatagagacagatatactcattataatctgtggtaaatgctgtgaaggcaaagtggaggacagcctgggaggacttctcagaggaggtggcattaaacaaagatctgtggattgagaaatcaccagggaagagggaagaagagtat

SEQ ID NO: 1560721 - DNA, 4001 bp, Homo sapiens
gttgggccagctgtggattctccgatgagtgtgtctgcagatgtttcttcaagccaaatcccttttgtggagctggtcttcagggtggtgaagccagagaccactgagggaacagaagtggtgataggggctgccacactggttgatgctgggggtctctctgttttcatgctaggacttgtctccacccactgtgtgtgctggggttcactaaattgctgagctgtgctttcactggtccatgatgatgcttttgaggtgctggaagtggttgccctcaggatgtcagagctcccgtgggcagctgtgctggaactctgcctcccagaggtgctgcctgtggttctgagctctcttgttgggtgggatgaagagacctgagatggacttctgatcttgctgtcaagagttgtaaaacctagagtggggaccaaggtggcagtcatttcggactcttctccaggagcagaggtctcaagtggagtcatagatgtattcaaagttccttctgtttcctttccactcgtggagtgatgggtgttggtctcctctgagactaaagtggtagatggagatgtggttgtcagcgctgaagtgctggtgccaccaagggtacctggacttcccaaccattctgaagccaaagtcttggctatgtgggtgctgggtatatccatggtctcagcgaaggcatggaaggtaaggatagtctctgctgtctgctttgtggatattgatggagtccccagagaggaaattgtgcttctgaccctttcggcacttgtttctgcattgcttagtgtcatggaaaaagggatagctgagttgggcattgtgctggctctggcctcgggcaccccaggagacagaggggaggtgagactctggcctgagaatatgctggtctctgatattttattatcgagaactgaagcagatgatgacaaaggcgcactggtacttattctgctgtgtcctgcagagccaggttcaggagaggagaagggatatccagtggttgatagaatcagttccaggcttgtttcacctctggaatttggggtccctttaggtgataggtcaaggaaggaagaataaagtgtcccaaatgatgggtttgtccttcctggagtatgtgagtcagtaactgtggtctcagctggagtcatagacactggggcattttccttggatgcagttgaatctgcaaatgttttcattggagatgtgatttttacaggaatatatcttgtgtcccagggggtctctgtgctgtcaccttcagttgttgaggtctcagtggggactgtgtacttctcagtgactgggccacttgtggtctctacagtgagtgtgtatgtagatgcttctttggtaaaatttccttctgtggaactggtcctggtccttggggaactcaatcctgaaaccatgcttgtagcagggtagttcctagagggagttccattgacctggggactcagcgatgggctggttctttgctcggagtgtgtcattcctctagaggttgactcagggagagcagaggacatcacccccaaagactgggtggttcttcccacaaccgaagatgtaggactggccaaggtcttatctggggaagtaaagggcagagtatgttctgtcaccacgattgcacctgtagatgtcttaggtgacaaggtggctcctgtcagtcctgaatccatttctggtgtggctttagtgctcctgctccctgtcatcaaggagcgggtgggagaagatgacccaggaaggcctgagggtttcagcatggacaggtcaacatttgcctctggatggaggtctaagaagaatcccctcagagagggtggcctctgcagagcttctgagctccctgaaactccaaaatttctcagggtgggagatatggctggggtccccgcatttgacctgggaaaacctgtgtctagaagagctgccgtatgtatggaggttgggggaattgtgcaacgcttctaattgagaagaccaaatctcagggagagaaaggaaaggatagttcaaccacagacaatttcctcaaataaacacctgatgatctcaattcttcccttcaaactttttaacggattctcagtgtctgcagaatagaatttcttagtgtatcatgtcttaatgatcctctctctctctctctctctgagtgtgtgagtgtgtgtgtgtgtgtgtgtgtgtgtgtgtgatgtcttagaaaccaggaaccaggctgggcacggtggctcatgcctgtaatcccagcactttgggaggtgaggtgggaggatcacctgaggttgggagtttgagatcagcctgaccaacatggagaaaccccgtctctactaaaaatacaaaattatttttaattttttaaaaataattttaaaaaaaattttaataaaaataaatattgggtgtggtggcatgtgtctgtaatcccagctacttaggaggctgaggcaggagaatcacttgaccctaggaggcagatgttgcagtaagccaaggtcacaccactgcactccagcatgggtaataagagctctgtctcaaaaagaaagagaaagaaagaaaagaaaggaaggaaggaaggaaggaaggaaggaaggaaggaaggaagaaagaaagaaagaaagaaagaaagaaagaaagaaagaaagaaagaaagaaaggaaggaaggaaggaaggaaggaaggaagggagggagagaaagagaaagaaggaaggaaggaaggaaaaaaagaaagaaagagaaagaaagagaaaggaaggaaggagggagggagggaaggaagagagaaagaaagaaagaaggaaagaaagaaagagagaaagagagagggagggagggaggaagggaggaaggaagaaagaaaaggaaagaaagagaggaccgagggagtgaggaagggaggaagggaaagaaagaaaaaaagaaagaaagatgcagatagagcccctacctacacccccatgagatggagctaatgctcagtgtgtgatactggcagatactaaggctcttgaattgagaagtggaggtcagagaagacacggcacttctgttcagatcagagcaggggcccacagatgcactctcaggaatcagtggaagttgctcttgattaaaatctcatgaccctggcctgctgggcgtggtgtctcatgcctgtaatcccagcattttgggaggctgaggtgggcagatcacgaggtcaagagatggagaccatcctggctaatatggtgaaaccccatctctactaaaaatacaaaaaattagctgggtgtggtggcgcccacctgtaatcccagctactcaggaggctgaggcaggagaatcgcttgaacccgggaggcggaggttgcagtgagccaagatcacaccactgcacttcagcctgggcgacagagccagagtctgtcccaagaaaataataaataaataaataaaatttcatgacccagagggtgaagaagatgaggttgaatcatgtaaaggtctagcgatgctgatttaggacagaagaggaaaaaaaaaagaatttcctggcagctcactatctctggctgtttttgttgagggaaaagtgcagggaagatttttcactttgggcattactatgatttgaatgtcccctccaaaactctgttgaaacttaatccccagtgtggcagtattgagaggtggggcctttaagaggtgattgggtgatgagggctctgtccgtatgaatagattaatccattcatgactaacccatggattagtgggctaacatgggaagggacttggtggctttaaaagaagctttaggccatgcatggtggctcatgcttgtaatcccagcactttgggaggctgaggtgggtggattacttgaagtcaggaattcgagaccagcctggccaacatggtgaaaccatgtctctacaaaaaaatacaaaaattagccagacatagtggtgcgcacct

SEQ ID NO: 1560722 - DNA, 4001 bp, Homo sapiens
ttacaacagctgacagtgagaaacagtggcaaactttagcacaaatgcagcaggtaatcctgaaggcctataaccatgggatttcagatatttggtccaatccccattgtttcacagatggggaaactgaggcatgagaggccagtggcagacaaagacaaggacctgggcttttgcattgcagctgagcactgtctactgaattgctggaaagcattccctgaacacgaccataatttactatcacagggctgcttgccagatctttccttgagttacagccttacatgcctttttacagctgattctttttttttttttagtgtgaaaaaaaaaagacatttctggaagtgtaaccttggaagcactagaccaaaaccccattaaatggggaacgagaatcagtgccaaccgtgttctggctcaattatttcactgaagcaaatcctaggtatctcctgatcaagattttacttgtcacccgaaagtcatttctaagtcctgaagttacagaataatggctgtcaccttcgcaggccataatcgcttttcccatcggcagaggacatacttggcatccgccatcatttacactcatgtggcaagtggcaatgatttggcacaacgtactcccaggtctcacgccaatgtgtcctggaacgaaatttgcacggtggtttatacaactgtttgctggcgatgttaacgcagacacagccctcaggggcaaaggttagctcgacttagcctcaagtagatggtttaattccacaatcttgcattgagatgctcaatgccaaaaagcagactgacaaacagaaacgacggggctcggtatccagggaggcgcctgcattttttcataaataaaatacagcacagtccctcccaaaggttctatctagatcagttttaaaaggctcctgaataaatcatctccgtgcggaagacctgcctccgacctcggcaggagaggcattttacacaatcaaagctcacaaccctccccaatttggggagttaacagttgaccacagcacacacacaaaaataagagcggaaaaacgactgctcttttggctgccatgtccctgaaagaacggggacagctgcagaccgttcacagcatcaatgggaaggactggcttggctgttgacagaaatgaaaaggaggtttgggggtgggggtggaatttagcaacaacggaggggggcgtccccgcagcagggaagaggaggttcccagcagaggtaggggtggcgtttccagcaagagaggggatcacagcagcagcagaagtaggggtccaggcagcagggacaagatttcatggcggaggaagggttgcggcttgcaggaacgggggattcaggcaacagagaagggggtcacagcagaagcgggggggctcagggagcaagaacgagggctcacggaggaggtggagcggagggtccaggtggcagggatgggggatttcacggttgggggtggggaatccagggaagcagatgggggtccaggcaagagatggggttcacggcagacgtgagggggatccagggaaggagataggggtccaggcagcaaggatgggggagcgggtccaagcaagagatggggtccgggcggcagggacgggaaaaggagtccaggcaaagtgaggggcccacggcgccaggggcggaaaagggggtccgggcagagtgggggacccacggcggtagggaccgggcgctcccggaggagtctctaggccggggccccccctccccccaggcccggcctcctcgcctcagccccgcccggcggaaccgaggggacgcatcccgcgggctcaccgggcccccggctttccccagcgcggcgccccaagcccgggcaaggaggccgcagcggccgcaacagcggaggacccgcccgccaaccgctgccgtccgcgccgcccgcgctcaccgcctccgccaccgccgccgccgccgccgccgccgctccccgcggggccgggggcggggcttgcctcgcggcggcgccaagctccgcccccttccgcccgctgcccaatgggacgcgcgcgctcccaaggagcgccggcctcgccctctccggcgtccacggccgcgcgccggccccgccccttccgccgcgcgtctacccctttttcccgggagtgctgcctgaggagaccggttggcggggcatgtgtggccgctcccgggcgccgccctcccgcgctcccggccctttgtcctgcagtcagaccccggacaccgccctcgcgggtctcggtgggaaaacaggctcccccgcccgcggcgatccctgagagaaccttccagaactttcgagaatcttccaggtcctacggcacctcccagcccgggagctgcgcgccacggacccaattccagcagatcccaaccgatcccaaagccaggcatccccgcaaaggcgtcataagcttctgaactagagcaggacccaccttgggagggtcccaagaccccggggggcaccggaaacagccgcgggtggcgggagccccggagcggtcgctccatcagtgtcaggcctttccctgagcggtttttgattttttttcagacggagtctcgctctgtcacccaggctggagtgcagtggcgcgagctcagctcactgcagcctcctcctgctgggattacaggtgcgcgccaccccacccggctaatttttgtatttttagtagagaatactaaatgttgatcaggctgctctcaagctcctgacctcaggtgatcggcctgcctcggcctcccaaagtattgggattacaggcctgagccacctcgccagcccccacagttctttaaaagcaaaggaggccgaattggcagatcctttaagcccaaggattggagaccagcctgggcaacatggcgagaccccatctctataaaaaagatacaggctcactcctgtaatcccagcaggaggccgaggcgggcagatcacatgaggtcaggagatcgagaccagcattgccaacatggtgaaaccccgtctttactacaaatagaaaaattagccgggcgtggtggcgatgcctgtaatcccaactattcaggaggctgaggcaggagaatcgcttgaacccgggaggcggaacttgcagtaaggggagatcgcgccactgcactccagcctgggcaacagagtgggacttcgtctcaaaaaaggaaaaaattaaaagacttacagcagcattcgtcacgcactggccccgactcttcaaggggaaggggcgacagcaaagccggctctaacttctttttccttctcacatttgcgggaatagaaggtttgtgtcttcggtcgatcccagcaacctcagcgactgattttttttcctttatcaagttgagaatgttcacctttcacttgttttttatttttatttacatttttgagtcgaagtttggctctgtggcccaggctggagtgcagcggcccagtcatagctcactgcagcctcaacctcccaggctcaaatgatccttccaccttagcctccggagtagctgggaccacagtgcgcaccaccatggctggctaagatttttattttttgtagagagagggtcttgctatgctggccaggctggtttcgaccttttgggctcaagtgatcctcccacctcggctccccaaagtgctgggatcacaggtaggatccaccttgctcagccgtctcagtttgtctataaaatgggggtggtggtctgtgggtggttggcaagaactatgtctctgatatcctctcacgttaaatctgagctggcggtggctcaggcctgtaatcccagcactttgggaggtcaaggcagacatatcgcctgaggtcaggagttcgagaccagcctggccaatatagagaaacccccatcgctactaaaaatacaaaaattggctgagcgtggtagtgtgcacctgtaatcccagctatttgggaggctgaggc

SEQ ID NO: 1560723 - DNA, 4001 bp, Homo sapiens
tgcctcagcctcccaagtagctgggactacaggcgcccaccaccatgcccagctaattttgtatttttagtagagacagggtttcaccatgttggccaggctggtctggaactcctgacctcaggtgatctgcccgcctcaggctcccaaagtgctgggattacaggtgtgaaccaccacaccaagcctaaggcctggtttcatacagctgatgtgttaagagtgatttttacatttttaaggaattgtaaaaaaattgaatatgcaaaacacatcatctgccctgtaaagcctaaaatatttactataaggccctttacataaaagtttgccaactctaagaaaaaataaagaaaaaaagtttggccgggtgcggtggctcacgcctgtaatcccagcactttgggaggcccaggcaggtggatcacctgaggtcacgagttcgaaaccagcctgaccaacatggagaaaccccgtctctactaaaaatacaaaattagccaggcgtggtggcgcatgcctgtaatcccagctactctggaggatgaggcaggagaatcgcttgaacccgggagtcggaggttgtggtgagctgagatcgcgccattgcactccagcctgggcaacaagagcgaaactccgtctgaagaaaaaaaaaaaaaaaaaggtttgccaactctagtatgaatgaatatagcctgagtcaaataaaaatgacaagaaagggtgggaaagttcaggtggggctgggagggctgcactagggttgtgggcccagaagaggaggggtagggaagggtgaaggtgacatctgacggaggacggagaatgagctacaaaaaggagagaaaaagtgccccaggcagaggaagcggcgtgtgcaaagcctggaaatgaaaaagaaaactgcgcagtggttttgcttggctatggtgtaaaaagacacaagtagcacaacagtagtgaaacaggtggcgtggactgaacacttaactcgaggatgcaggctgtgccaatcatatcacacattttgaatcaggacaggggatgtcggtccaccctagggcagggctctgagtcctcagccaaccctgtcatcaccccgtgtgccagggggcagccgaggctcagataccgcgcgcccgtcgtccctcctcccccgctcctccctgcaagggacccggacaactctcgcctccgaagcagcccttactggaatccatggggtcgcagacgggggagaagcccagcggcagggggctcttgtccaccacgatctggatatcggccaccacgttctcctgcgggttctgggggtggaagggggacacggcgagggtggctagcagcggggacagcgcacctggcatagggcaccgtgaatgggcaggggaggtgggcagaccctggtggttccgaaggtgggcacctcttacctctaggctgcccagagaactaaggcacaggaagtagccagatttctgcgcgaagctcttgccaaagctggcgggtgccccctcgacggtgcaggagatctaccgggaggacgcgggtcagcgccggactcccaccccacagcgactgcctcccccattcgacccccgcccctcgacgccgctcaccgcgctgaacccccgcggcgggggtgcagaggccgacgaccaggccaggccagccagcggcgccgagtctgtcccgggtacgggatccatcctgcgagccgagcgccgaaggcggggtcgcggggcacagcctcgaacctcggagcgcctcccgacggcagcgctcgcgaccgaactacaactcccagaaggccatgcggggggggggggcggagattgcccggaagcgcagtatacgcgtgcccgaggagctgctggccaatggcgtggggaggcggagcctcgccaccacgcgtcgccagggttgcgcgcgtgagcgatgatggcggaaaaaaaggtcttgccggctttccgcgcccagcaacttccgccggaaatgctacggcacaggaccaagagactcgttctctgcaagtctgcactacgttccccagaattccttccggcctcagctgctagtctagaaaaaagctcggtgcttaacggaaaagttgggagctttgtggccgcgcgcagtggctgacgcctgtaatcccggcactttgggaggcggaggcgggcggatcatgaggtcaagagatcgagaccctcctggccaacgtggtgaaaccccttctctactaaaaatgcattgtgaagaatctgcaattccagttctgggaaatcatcccaaaggaaatcatctgtgggatacgcagctattgatttaaagagcgagtactatggaccatcatgagctttgaaatcttgggtataacttgaagatttgttcacaggcacaatacgtttaaaaagcgacgtataaaagaatttattgcctgtagtcccagctactgaggatgccaccagcaaaccgagttacctccccactttgtgtaggtggcaaagaaggaacatccaatcggaaaaggcaatcaggttttattcactggccaggaatggagaaggagaggctctcactctaactgccccttctccctcaacagtaaaaagcataacgttttattgtttcttcccctgggtacaggaagggagaggaatgctagcatgtgcagggtgggactccagacacgcaggctcaattcatgagcctcaattcctgggttgtcttcatacaacccatctacacaaaatggagattttcttttaagagaaggaattttagcattataattatatattgatgatctaaagtcgactagaggtcgtctgttccagtttgtggtgatttagggatcttatcttcctctggtatctggtcaggggtcaagaaggtctggggacatccctggctgtctgcaatctttaagcagctgtgccttttttttttttttttttggacttacaataagaaagagaactttcccagttattttatcagggctgtcatggcaacagggtaacagggaggctgaggtgggaggatcgcttgagtccaggagtttgaatctagcctggacaacataaggagaccccagtgtttaaaatgaaagaaagaaagggaaaaaaagtatttactataataatatgcttttaagccgggcacagtggttcacacctgtaatcccagcactttgggaggccgaggcgggcggatcatctgaggtcaggagtttgagaccagcctaacatggtgaaaccccgtttctactaaaagtacaaaaaactatccaggcgtggtggtgcgcgtctggaatcccagctactaagggggctgaggcaggagaatcactggaacccgggaggtggaggttgcaatgagctgagatcgcgccattgcactccagcttaggcaacaagagcgaaactcgtctcaataataataataataataataataataataatatgcttttttacacccattgggggaaaagtttagaaaaatagcgaacaagtgtcctgcgctgcccagactagcaaacaatacagtcaggatggctaatggtgaccccaagaaaccaaagggcaaaatgtctgcttatagtttttttgtgcagatgtacagagaagaacataagaagaaaaaccggcctggcacagtgactcacgcctgtaatcccagcactttgggaggccaaggcaggcggatcatgaggtcaataaattgagaccatcctggccaacatggtgaaaccccgtctctactaaaaatacaaaaattatctgggcatggtggcaggcgcctatagtcccagctactcgggagcctgaggcaggagaatcgcttgaacctgggaggagaaagttgcagtgagcggagatcgtgccactgcactccagcctgggcgacagagtgaaactccatctcaaaaaaaaaaaaaggaagaagaagaagaaaaacccagaggtccctgtcaattttgcagaattttccaa

SEQ ID NO: 1560724 - DNA, 4001 bp, Homo sapiens
gtccatctacctccaccttctctccccaaaacccagccagctggtcccccagcttctgggaaactcagctccccagatttccaactgtccagtaggaaccccaggcccttccactgaactctctctaggcctcacaatcctgttttttggttgttgttttttttacatggagtcgctctgtcacccaggctgcagtgcaatggtgcgatcttgactcacggcaacctccgcctcccggattcaagcgattctcctgcctcagcctcctgagtagctgggattacaggtgtgtgccaccatgctcggctaatttttgtattttcagtagagatggggtttcgccatgttggccaggctggtctcaaactcctgacctcaagtgatccgcccgccttggcctcccaaagtgctgggattacaggcatgagccactgcgcctggccatcaccgtcctgttataaggggtcagacctctggccctggacccttagcctgaaggatcccagatgccccagactccagaaaaccaatttgcttctttagtccttgcaaaacctacagcttccacctccttgtcctaatggcccccaggaatcaagtgcccgtcctcttagaaaccaggtgcccagttctttccttaggctgtaaactgtctcaacgcagccacaggactaaacccaaggcctctcctagccacaggaaagtaacttcctcctttcagcttcaggcactttgcagggcagtagcacaggccttaacctcttcgtggcagtcgcaggacagcagctccctgagacaaaggagccagggcctggactcgcttcttcctcagatacctcagtgtctgggaccctattccttggagcccaagcttcctggtccttctcccaggatctaggagcccaggacctaatccttcctccttcagacccacgagtccagaccccagcccctcctccctcagacccaggagcccaggcccccagcccctcctccctcagacccaggagcccaggcccccagcccctcctccctcggacccaggagtccagaccccagcccctcctccctcggaccccggagtccaggcccccagcccctcctccctcggaccccggagtccaggcccccagcccctcctccctcggacccaggagtccagaccccagcccctcctccctcggacccaggagtccagaccccagcccctcctccctcggacccaggagcccaggcccccagcccctccttcctcggacccaggagtccagaccccagcccctccttcctcggacccaggagtccagaccccagcccctcctccctcggaccccggagtccagacccccagcccctcctccctcggacccaggagcccaggcccccagcccctcctccctcggacccaggagcccaggcccccaggcccccagcccctcctccctcggaccgaggagcccaggcccccagcccctcctccctcggaccccggagtccaggcccccagcccctcctccctcggaccccggagtccaggcccgctgcctactcaccagcggtcttagcagaggaatccacggagaaagatctggtggtggagacggattaagccacacttggaacaggctgtaagagcacctgagggggaggtaggccgttagcgtccgtttggacaggctcctccctctagggatcgaacgccctgcggagacaggaacgtggcgtggaacccagcagggccctggcggtgaccccgggtaagccccgccccctcccctccccgttcagttaactgtttgggctgcggcggacggaacccagcgaaagtgcacgccccgcgggccggcgtgggcgcgtgtgtgatcttaaccccgcgggggcgggggtgcgggcggcagtggcgggagaaccctgggcggcggctgtggaggcgggcggcccagccagagccggtgtctccgcgccttataagggcttcgagtcggcccaggcatctggaatgtgtcagggaccaggaggcggtgcccggacccccgcccgcctccggggctgcccgccctctcccggatttccggggggtggggaccccgactctcagggttggaggcctgcatttctggatccctataaacatgggctgagagcccccccaagagcatctctaagaccggagtgggcagggacccgggcctctgaggggctcaggctccaggccggaaactgcacgcggtgctggcgtcaggcccgaggcccagctacgcctcccacggcctccctaatcgccattcggggcttgcgggagcacctgggaggctccacccggagccagacactgcctgcccccacgcccctccaggaccctcgaaggagaaggaaatcgggactggcccagcgtcccgtgctctagaaggcgggctactgccccgtcccaagcaggggaggaggacgagcgagggcgtcactcattctgtcccccgcggaaggtgggctagccgcggaggggggcgcgcaggggaggggggcgcgccgaggggaggggaggggaggggtccaccccgcccttagggcctccagccatcgcccgagatcagagctcaggaatgcgcagccagaccctggagggtgaggaaacacccctccgggattcctcgcagcgcacccgactctccgggccacacccagcccctcagtgtcctccctcgtccactccagacgccacacccatcgctcacgctgagaatcgggccccggaaccccagcttcggctctcggcacccagaggtgcgggacgcagccctgtcttctcctcctttcccagctccttctgcacttcggaagcacggggctggatcttaacacccccctccctcggcctttcaggagcccaaagttccgattctgtctgtcccctggatggggaggggtcagtaattctgaattccttccattctcattcccaaacccaggacacctaaccctaagcgcttcccctcctaaaggacctccacgtaccagattccagcctccaactagggcacctacgagtccccatctctctactcccgcagacccagcccctcctccctcagactcaggagtccaggcccagctcctcctccctcagacccaggagtccaggccctcagcccctcctccctcggacccaggagtccagaccccccagcccctcctgcctcggacccgggagtccagacccccagcccctcctccctcagaccccggagtccaggtccccttccccactcttccagacgtatgacctccacagtccaggtcctcagccctctcctctgcagaaccccaagaatcctggcccagccccagtctttctagggacccagacattctgagacccagcccattcctctctctggccataaagaccctagactgttgcttatgccctctggggtccccacaacctcacctcaggcagccagtggcgactgcggctgaagcaaagacgacagcggcagctggaagggtctgagggctgggtggggttggagggctggggagccagcgcgggcgggacgggggcggggccggggcggggcgcagctccggctagggcggtggacagggacttccccgagtctgggctatcccagccccgccccgaggcggggccaagagcagaccacgccccccagagtaaaagtagcgtggagctcccgccccaccccagtgagcagggtggagggctgaggtcacggttgccgtggtgacaaaacaggaagacacaacagctggcggcgtggagactcctgggggctgccctcctcgacacagccctagaggagtctcccgggtaggccagggaagaccgttaccatagaaaccccgcatgtttagggtttgtttagtgcagagccccccagctcaggtccccgcccccgtctcacctcactcctttcttccgctcccttcctaccccctccttcctggtctgttccgcccccaccccttccttgccggat

SEQ ID NO: 1560725 - DNA, 4001 bp, Homo sapiens
cggagtccaggcccgctgcctactcaccagcggtcttagcagaggaatccacggagaaagatctggtggtggagacggattaagccacacttggaacaggctgtaagagcacctgagggggaggtaggccgttagcgtccgtttggacaggctcctccctctagggatcgaacgccctgcggagacaggaacgtggcgtggaacccagcagggccctggcggtgaccccgggtaagccccgccccctcccctccccgttcagttaactgtttgggctgcggcggacggaacccagcgaaagtgcacgccccgcgggccggcgtgggcgcgtgtgtgatcttaaccccgcgggggcgggggtgcgggcggcagtggcgggagaaccctgggcggcggctgtggaggcgggcggcccagccagagccggtgtctccgcgccttataagggcttcgagtcggcccaggcatctggaatgtgtcagggaccaggaggcggtgcccggacccccgcccgcctccggggctgcccgccctctcccggatttccggggggtggggaccccgactctcagggttggaggcctgcatttctggatccctataaacatgggctgagagcccccccaagagcatctctaagaccggagtgggcagggacccgggcctctgaggggctcaggctccaggccggaaactgcacgcggtgctggcgtcaggcccgaggcccagctacgcctcccacggcctccctaatcgccattcggggcttgcgggagcacctgggaggctccacccggagccagacactgcctgcccccacgcccctccaggaccctcgaaggagaaggaaatcgggactggcccagcgtcccgtgctctagaaggcgggctactgccccgtcccaagcaggggaggaggacgagcgagggcgtcactcattctgtcccccgcggaaggtgggctagccgcggaggggggcgcgcaggggaggggggcgcgccgaggggaggggaggggaggggtccaccccgcccttagggcctccagccatcgcccgagatcagagctcaggaatgcgcagccagaccctggagggtgaggaaacacccctccgggattcctcgcagcgcacccgactctccgggccacacccagcccctcagtgtcctccctcgtccactccagacgccacacccatcgctcacgctgagaatcgggccccggaaccccagcttcggctctcggcacccagaggtgcgggacgcagccctgtcttctcctcctttcccagctccttctgcacttcggaagcacggggctggatcttaacacccccctccctcggcctttcaggagcccaaagttccgattctgtctgtcccctggatggggaggggtcagtaattctgaattccttccattctcattcccaaacccaggacacctaaccctaagcgcttcccctcctaaaggacctccacgtaccagattccagcctccaactagggcacctacgagtccccatctctctactcccgcagacccagcccctcctccctcagactcaggagtccaggcccagctcctcctccctcagacccaggagtccaggccctcagcccctcctccctcggacccaggagtccagaccccccagcccctcctgcctcggacccgggagtccagacccccagcccctcctccctcagaccccggagtccaggtccccttccccactcttccagacgtatgacctccacagtccaggtcctcagccctctcctctgcagaaccccaagaatcctggcccagccccagtctttctagggacccagacattctgagacccagcccattcctctctctggccataaagaccctagactgttgcttatgccctctggggtccccacaacctcacctcaggcagccagtggcgactgcggctgaagcaaagacgacagcggcagctggaagggtctgagggctgggtggggttggagggctggggagccagcgcgggcgggacgggggcggggccggggcggggcgcagctccggctagggcggtggacagggacttccccgagtctgggctatcccagccccgccccgaggcggggccaagagcagaccacgccccccagagtaaaagtagcgtggagctcccgccccaccccagtgagcagggtggagggctgaggtcacggttgccgtggtgacaaaacaggaagacacaacagctggcggcgtggagactcctgggggctgccctcctcgacacagccctagaggagtctcccgggtaggccagggaagaccgttaccatagaaaccccgcatgtttagggtttgtttagtgcagagccccccagctcaggtccccgcccccgtctcacctcactcctttcttccgctcccttcctaccccctccttcctggtctgttccgcccccaccccttccttgccggatgaaaccttagacacctgggtcgcagcggattgggggaccaggcccctcagttcaatgggggggctaggatctctgtctcttggagccctgagggagagcagaattgagagcagtattcctgggctttaggtggttctgggctacgatccctgactgatgggtctccccaagaaacagaggctagattcctgtatttaaggacttgaaggggcggcaaaatgctcccctagtacccactggcaccgggcgccgcagggtaagggactcgggctggacgcaggtctcagatatcacagtggataggggtggggtgtgttgggggcaaaattcctgggagctagcgcggtagcagttgggggcccggattcctgggctccacaggatgcctaggctgaggcccagattcttggctcaaaagaacaatcaggcctgggcgcggtggctcacgcctgtaatcccagcatttcgggaggctgaggagggaggatcccttgagcccaggagttcgagaccagcctgggcaacataaggagactctgctctattaaaaataaatcatcatgatcatcataatagaaccattaaagctcagactcgggttttccgagcaggtgttgcaagcctagccgcctgggtctggaaggcagcgatatttttggcctacattcctgactcctggatggagggagggactcagaattttaatgaggatggggctggggctggggcttggggctctggattcacggatcctgcaagaggggaagggatccaaggggctggtgggcccgaagccccagggcagggaagggatgcagggtgtgtttttaaaaggcggctctgcggccctaaaacggactgccggagccaaaagaaaaagagggagctgagggtcgggatgtcgggcccccggggaggggcagggcggggacctgggacgcctgagtccctccctctggccgcgttcactcaccgcgctctgcagtcgtcccgggcgcggcctggctggctgcggccgctgggcggggcctggtggcggctgcggatgctcagcgacgctgagctaacggggcgcgtctggcgctgccgccgctgggcaccttccagggccgacaactgaggaggctttgaggccaagcccaggggtggaggccgagtccaggagtggaagccgcgcgagtggcgaagggagcagtcggaaggggtccgggagctggggatccgggtctacgtgccctacggagcagggaggggccggagggggacctgcaggaaggcgggggtctgcaggagtggagagggggttgggtagaggaaggtagagcctgtgtgcgggcttgatgtgcttctgcaaagggaaggggacacagaccctctttgtcactctgggccctgcataggggagggaggtctcagtgcacccagatcaggccttgtccttgtccaaggagggagggctgtggacagatagggagtcgggacatggtgttagttggagactcccctgggacgcctctaggttctat

SEQ ID NO: 1560726 - DNA, 4001 bp, Homo sapiens
cagaccccggagtccaggtccccttccccactcttccagacgtatgacctccacagtccaggtcctcagccctctcctctgcagaaccccaagaatcctggcccagccccagtctttctagggacccagacattctgagacccagcccattcctctctctggccataaagaccctagactgttgcttatgccctctggggtccccacaacctcacctcaggcagccagtggcgactgcggctgaagcaaagacgacagcggcagctggaagggtctgagggctgggtggggttggagggctggggagccagcgcgggcgggacgggggcggggccggggcggggcgcagctccggctagggcggtggacagggacttccccgagtctgggctatcccagccccgccccgaggcggggccaagagcagaccacgccccccagagtaaaagtagcgtggagctcccgccccaccccagtgagcagggtggagggctgaggtcacggttgccgtggtgacaaaacaggaagacacaacagctggcggcgtggagactcctgggggctgccctcctcgacacagccctagaggagtctcccgggtaggccagggaagaccgttaccatagaaaccccgcatgtttagggtttgtttagtgcagagccccccagctcaggtccccgcccccgtctcacctcactcctttcttccgctcccttcctaccccctccttcctggtctgttccgcccccaccccttccttgccggatgaaaccttagacacctgggtcgcagcggattgggggaccaggcccctcagttcaatgggggggctaggatctctgtctcttggagccctgagggagagcagaattgagagcagtattcctgggctttaggtggttctgggctacgatccctgactgatgggtctccccaagaaacagaggctagattcctgtatttaaggacttgaaggggcggcaaaatgctcccctagtacccactggcaccgggcgccgcagggtaagggactcgggctggacgcaggtctcagatatcacagtggataggggtggggtgtgttgggggcaaaattcctgggagctagcgcggtagcagttgggggcccggattcctgggctccacaggatgcctaggctgaggcccagattcttggctcaaaagaacaatcaggcctgggcgcggtggctcacgcctgtaatcccagcatttcgggaggctgaggagggaggatcccttgagcccaggagttcgagaccagcctgggcaacataaggagactctgctctattaaaaataaatcatcatgatcatcataatagaaccattaaagctcagactcgggttttccgagcaggtgttgcaagcctagccgcctgggtctggaaggcagcgatatttttggcctacattcctgactcctggatggagggagggactcagaattttaatgaggatggggctggggctggggcttggggctctggattcacggatcctgcaagaggggaagggatccaaggggctggtgggcccgaagccccagggcagggaagggatgcagggtgtgtttttaaaaggcggctctgcggccctaaaacggactgccggagccaaaagaaaaagagggagctgagggtcgggatgtcgggcccccggggaggggcagggcggggacctgggacgcctgagtccctccctctggccgcgttcactcaccgcgctctgcagtcgtcccgggcgcggcctggctggctgcggccgctgggcggggcctggtggcggctgcggatgctcagcgacgctgagctaacggggcgcgtctggcgctgccgccgctgggcaccttccagggccgacaactgaggaggctttgaggccaagcccaggggtggaggccgagtccaggagtggaagccgcgcgagtggcgaagggagcagtcggaaggggtccgggagctggggatccgggtctacgtgccctacggagcagggaggggccggagggggacctgcaggaaggcgggggtctgcaggagtggagagggggttgggtagaggaaggtagagcctgtgtgcgggcttgatgtgcttctgcaaagggaaggggacacagaccctctttgtcactctgggccctgcataggggagggaggtctcagtgcacccagatcaggccttgtccttgtccaaggagggagggctgtggacagatagggagtcgggacatggtgttagttggagactcccctgggacgcctctaggttctattcacaggcctccttggccccaagtgtagcagcaaatctttccccttcctgcctaaattagtcactgcctaaccccatagtgacacactcaaggtaccccaaacggcccagaggtggtctccacttacacaacttactgtgttattcctcgtggtggcagcggttcccttgtagacactagaacccctcaacagcagggttcagggtagcaggaacaggaagcaaacatttgaagagtgaaggccggtcacggtggctcacctctgtaatcctagcactttgggaggccaaggcaggcagatcacctgaggtcgggaattcaagaccagcgtggccaacatgatgaaaccccgtctctattaaaaatacaaaaaaattaatcaggcgttgtggcgccgcctgtaatcccagctactccagaggctgaggcaggagaatggcttgaacccgggaggtggaggttgcagtgagccaagattgccactgcactccagcctgggtgactgagcgaaactctgtctcaaaacaaaaaataacaacaaaacaaataaaaatttgaagagtgagtcatcgggtgtggtcctaagaaatggcactcttggccgatgcagcaactcatgtctgtaattccagcactttgggagggaggccgaggtgggtggatcacctgaggtcaggagttcgagatcagcctggccaacatggtgaaaccccgtctctactaaaaatacaaaaaattagccgggcggggtggcatgtgcctgtaatcccagctacttgggaggctgaggcaggagaatcgcttgaacccaggaggcagaggttgcagtgagctgagatcatgccattgcacttcagcctgggtaacaagagcaaaactccgtctcaaaaaaaaaagagagagaaaaataaaagaaagaaatggcactcttgagttcacaggtctttgtaatctgggatcatctggcatgtacccctggttcagagtggttacccatcctgtaacagcaccccgaccccaaagatgatgactccaaactggccctgtaacccagtctcaaacaggccgtgctgttccatgaggctggctgctttggggtaatggggtacatggactgccccccactgacttcctaatatatggagctccttgatcagaagcaatactgtgcgggttaacatgagggtgaatagggccattcagtgcatacacagatgctgctgttggcagaagtgcaaagggcaagaaaagcaaataacaagcccagagttgtttactcgagggaggaaaaactccctgcccagcccaggatgaaagggctccagtgtaatcctcacgggcccaggtatttggctttttggtcttcctaggaaactgtaccacactgggggatcagcacttgctactgccagctaggtgggcattcatcagtgacgtaggtggtgtagtccacctcggccactttgctcctgaacctatggagcaagccctgaggatgccagggaaggaggctgatccagatcctcagagtggtcatctgatctaccacatggcatcatagcattccctgtaatagaggttttagggggagagttcacttgggataaagattacgaagtggtttccactcgcaacacgtctgacaccaatgtgtgtgttttttcttttcttttttttgagacggagtctcgctcttgtcatccaggc

SEQ ID NO: 1560727 - DNA, 4001 bp, Homo sapiens
gggaccctattccttggagcccaagcttcctggtccttctcccaggatctaggagcccaggacctaatccttcctccttcagacccacgagtccagaccccagcccctcctccctcagacccaggagcccaggcccccagcccctcctccctcagacccaggagcccaggcccccagcccctcctccctcggacccaggagtccagaccccagcccctcctccctcggaccccggagtccaggcccccagcccctcctccctcggaccccggagtccaggcccccagcccctcctccctcggacccaggagtccagaccccagcccctcctccctcggacccaggagtccagaccccagcccctcctccctcggacccaggagcccaggcccccagcccctccttcctcggacccaggagtccagaccccagcccctccttcctcggacccaggagtccagaccccagcccctcctccctcggaccccggagtccagacccccagcccctcctccctcggacccaggagcccaggcccccagcccctcctccctcggacccaggagcccaggcccccaggcccccagcccctcctccctcggaccgaggagcccaggcccccagcccctcctccctcggaccccggagtccaggcccccagcccctcctccctcggaccccggagtccaggcccgctgcctactcaccagcggtcttagcagaggaatccacggagaaagatctggtggtggagacggattaagccacacttggaacaggctgtaagagcacctgagggggaggtaggccgttagcgtccgtttggacaggctcctccctctagggatcgaacgccctgcggagacaggaacgtggcgtggaacccagcagggccctggcggtgaccccgggtaagccccgccccctcccctccccgttcagttaactgtttgggctgcggcggacggaacccagcgaaagtgcacgccccgcgggccggcgtgggcgcgtgtgtgatcttaaccccgcgggggcgggggtgcgggcggcagtggcgggagaaccctgggcggcggctgtggaggcgggcggcccagccagagccggtgtctccgcgccttataagggcttcgagtcggcccaggcatctggaatgtgtcagggaccaggaggcggtgcccggacccccgcccgcctccggggctgcccgccctctcccggatttccggggggtggggaccccgactctcagggttggaggcctgcatttctggatccctataaacatgggctgagagcccccccaagagcatctctaagaccggagtgggcagggacccgggcctctgaggggctcaggctccaggccggaaactgcacgcggtgctggcgtcaggcccgaggcccagctacgcctcccacggcctccctaatcgccattcggggcttgcgggagcacctgggaggctccacccggagccagacactgcctgcccccacgcccctccaggaccctcgaaggagaaggaaatcgggactggcccagcgtcccgtgctctagaaggcgggctactgccccgtcccaagcaggggaggaggacgagcgagggcgtcactcattctgtcccccgcggaaggtgggctagccgcggaggggggcgcgcaggggaggggggcgcgccgaggggaggggaggggaggggtccaccccgcccttagggcctccagccatcgcccgagatcagagctcaggaatgcgcagccagaccctggagggtgaggaaacacccctccgggattcctcgcagcgcacccgactctccgggccacacccagcccctcagtgtcctccctcgtccactccagacgccacacccatcgctcacgctgagaatcgggccccggaaccccagcttcggctctcggcacccagaggtgcgggacgcagccctgtcttctcctcctttcccagctccttctgcacttcggaagcacggggctggatcttaacacccccctccctcggcctttcaggagcccaaagttccgattctgtctgtcccctggatggggaggggtcagtaattctgaattccttccattctcattcccaaacccaggacacctaaccctaagcgcttcccctcctaaaggacctccacgtaccagattccagcctccaactagggcacctacgagtccccatctctctactcccgcagacccagcccctcctccctcagactcaggagtccaggcccagctcctcctccctcagacccaggagtccaggccctcagcccctcctccctcggacccaggagtccagaccccccagcccctcctgcctcggacccgggagtccagacccccagcccctcctccctcagaccccggagtccaggtccccttccccactcttccagacgtatgacctccacagtccaggtcctcagccctctcctctgcagaaccccaagaatcctggcccagccccagtctttctagggacccagacattctgagacccagcccattcctctctctggccataaagaccctagactgttgcttatgccctctggggtccccacaacctcacctcaggcagccagtggcgactgcggctgaagcaaagacgacagcggcagctggaagggtctgagggctgggtggggttggagggctggggagccagcgcgggcgggacgggggcggggccggggcggggcgcagctccggctagggcggtggacagggacttccccgagtctgggctatcccagccccgccccgaggcggggccaagagcagaccacgccccccagagtaaaagtagcgtggagctcccgccccaccccagtgagcagggtggagggctgaggtcacggttgccgtggtgacaaaacaggaagacacaacagctggcggcgtggagactcctgggggctgccctcctcgacacagccctagaggagtctcccgggtaggccagggaagaccgttaccatagaaaccccgcatgtttagggtttgtttagtgcagagccccccagctcaggtccccgcccccgtctcacctcactcctttcttccgctcccttcctaccccctccttcctggtctgttccgcccccaccccttccttgccggatgaaaccttagacacctgggtcgcagcggattgggggaccaggcccctcagttcaatgggggggctaggatctctgtctcttggagccctgagggagagcagaattgagagcagtattcctgggctttaggtggttctgggctacgatccctgactgatgggtctccccaagaaacagaggctagattcctgtatttaaggacttgaaggggcggcaaaatgctcccctagtacccactggcaccgggcgccgcagggtaagggactcgggctggacgcaggtctcagatatcacagtggataggggtggggtgtgttgggggcaaaattcctgggagctagcgcggtagcagttgggggcccggattcctgggctccacaggatgcctaggctgaggcccagattcttggctcaaaagaacaatcaggcctgggcgcggtggctcacgcctgtaatcccagcatttcgggaggctgaggagggaggatcccttgagcccaggagttcgagaccagcctgggcaacataaggagactctgctctattaaaaataaatcatcatgatcatcataatagaaccattaaagctcagactcgggttttccgagcaggtgttgcaagcctagccgcctgggtctggaaggcagcgatatttttggcctacattcctgactcctggatggagggagggactcagaattttaatgaggatggggctggggctggggcttggggctctggattcacggatcctgcaagaggggaagggatccaaggggctggtgggcccgaagccccagggcagggaagggatgcagggtgtgtttttaaaaggcggctctgcgg

SEQ ID NO: 1560728 - DNA, 4001 bp, Homo sapiens
acacagccctagaggagtctcccgggtaggccagggaagaccgttaccatagaaaccccgcatgtttagggtttgtttagtgcagagccccccagctcaggtccccgcccccgtctcacctcactcctttcttccgctcccttcctaccccctccttcctggtctgttccgcccccaccccttccttgccggatgaaaccttagacacctgggtcgcagcggattgggggaccaggcccctcagttcaatgggggggctaggatctctgtctcttggagccctgagggagagcagaattgagagcagtattcctgggctttaggtggttctgggctacgatccctgactgatgggtctccccaagaaacagaggctagattcctgtatttaaggacttgaaggggcggcaaaatgctcccctagtacccactggcaccgggcgccgcagggtaagggactcgggctggacgcaggtctcagatatcacagtggataggggtggggtgtgttgggggcaaaattcctgggagctagcgcggtagcagttgggggcccggattcctgggctccacaggatgcctaggctgaggcccagattcttggctcaaaagaacaatcaggcctgggcgcggtggctcacgcctgtaatcccagcatttcgggaggctgaggagggaggatcccttgagcccaggagttcgagaccagcctgggcaacataaggagactctgctctattaaaaataaatcatcatgatcatcataatagaaccattaaagctcagactcgggttttccgagcaggtgttgcaagcctagccgcctgggtctggaaggcagcgatatttttggcctacattcctgactcctggatggagggagggactcagaattttaatgaggatggggctggggctggggcttggggctctggattcacggatcctgcaagaggggaagggatccaaggggctggtgggcccgaagccccagggcagggaagggatgcagggtgtgtttttaaaaggcggctctgcggccctaaaacggactgccggagccaaaagaaaaagagggagctgagggtcgggatgtcgggcccccggggaggggcagggcggggacctgggacgcctgagtccctccctctggccgcgttcactcaccgcgctctgcagtcgtcccgggcgcggcctggctggctgcggccgctgggcggggcctggtggcggctgcggatgctcagcgacgctgagctaacggggcgcgtctggcgctgccgccgctgggcaccttccagggccgacaactgaggaggctttgaggccaagcccaggggtggaggccgagtccaggagtggaagccgcgcgagtggcgaagggagcagtcggaaggggtccgggagctggggatccgggtctacgtgccctacggagcagggaggggccggagggggacctgcaggaaggcgggggtctgcaggagtggagagggggttgggtagaggaaggtagagcctgtgtgcgggcttgatgtgcttctgcaaagggaaggggacacagaccctctttgtcactctgggccctgcataggggagggaggtctcagtgcacccagatcaggccttgtccttgtccaaggagggagggctgtggacagatagggagtcgggacatggtgttagttggagactcccctgggacgcctctaggttctattcacaggcctccttggccccaagtgtagcagcaaatctttccccttcctgcctaaattagtcactgcctaaccccatagtgacacactcaaggtaccccaaacggcccagaggtggtctccacttacacaacttactgtgttattcctcgtggtggcagcggttcccttgtagacactagaacccctcaacagcagggttcagggtagcaggaacaggaagcaaacatttgaagagtgaaggccggtcacggtggctcacctctgtaatcctagcactttgggaggccaaggcaggcagatcacctgaggtcgggaattcaagaccagcgtggccaacatgatgaaaccccgtctctattaaaaatacaaaaaaattaatcaggcgttgtggcgccgcctgtaatcccagctactccagaggctgaggcaggagaatggcttgaacccgggaggtggaggttgcagtgagccaagattgccactgcactccagcctgggtgactgagcgaaactctgtctcaaaacaaaaaataacaacaaaacaaataaaaatttgaagagtgagtcatcgggtgtggtcctaagaaatggcactcttggccgatgcagcaactcatgtctgtaattccagcactttgggagggaggccgaggtgggtggatcacctgaggtcaggagttcgagatcagcctggccaacatggtgaaaccccgtctctactaaaaatacaaaaaattagccgggcggggtggcatgtgcctgtaatcccagctacttgggaggctgaggcaggagaatcgcttgaacccaggaggcagaggttgcagtgagctgagatcatgccattgcacttcagcctgggtaacaagagcaaaactccgtctcaaaaaaaaaagagagagaaaaataaaagaaagaaatggcactcttgagttcacaggtctttgtaatctgggatcatctggcatgtacccctggttcagagtggttacccatcctgtaacagcaccccgaccccaaagatgatgactccaaactggccctgtaacccagtctcaaacaggccgtgctgttccatgaggctggctgctttggggtaatggggtacatggactgccccccactgacttcctaatatatggagctccttgatcagaagcaatactgtgcgggttaacatgagggtgaatagggccattcagtgcatacacagatgctgctgttggcagaagtgcaaagggcaagaaaagcaaataacaagcccagagttgtttactcgagggaggaaaaactccctgcccagcccaggatgaaagggctccagtgtaatcctcacgggcccaggtatttggctttttggtcttcctaggaaactgtaccacactgggggatcagcacttgctactgccagctaggtgggcattcatcagtgacgtaggtggtgtagtccacctcggccactttgctcctgaacctatggagcaagccctgaggatgccagggaaggaggctgatccagatcctcagagtggtcatctgatctaccacatggcatcatagcattccctgtaatagaggttttagggggagagttcacttgggataaagattacgaagtggtttccactcgcaacacgtctgacaccaatgtgtgtgttttttcttttcttttttttgagacggagtctcgctcttgtcatccaggctggagtgcaaagaggtggtcttggctcattgcaacttctgcctcccaggttcaagcgattctcctgcctcagtctccccagtagctgggattacaggcacccaccaccacacgcagctaaatttttttgtatttttagtagaggcggggttttcaccatgttggtcaggctggtctcaaactccccacctcaggtgacccacctgcctcggcctcccaaagtgctgggattacaggcatgagccaccgcgtccagccacctggctacatttctaggactgtcctctaaaaacaaataagttgtttttttcatctcaggtcaattcttttctttttatttatttatttatgttttaagatggagtctcactctgtcacccaggctggggtgcagtggtgcgatctctgctcactgcaacctctgcctcctgggttcaagcaattctcctgcctcagcctcccgaatagctgggactacaggcatgggccaccacgtccggctaattttgtatttttagtagagatggggtttcactctgttagccaggctggtctcaaactcctgacctcaggtg

SEQ ID NO: 1560729 - DNA, 4001 bp, Homo sapiens
caggccctgccccatccgcccaggccaccacgccctgaccttttgggtccgagggtataattagctctccctctgggctggaaactggacacctggtgctgaccgcagcatccttcccctgccctgcctgctgttccttgccggctgggtctgcagctacagtaggggctggacccaccccacagcctgcttggcctgatgccagcggaccagacatcccaggagggggtccgcccagcggtgcatgattcctgcggtgagttcctcatagagagaaagcctcatctccacagaaagtgttccccattcaaagaaggtccccaaaccccgcaaaaaggaccccattccctgcatgaagaagccccgctaattcctacacggggaagcctcagtgcccacagaaatgaggctcccccatccttaatacagagacttcccctgtgactccatgcagatgggaaccactaatctttatacccacaatcaccccatatcctacagagaaggtcccttggaatctattttttgtttttgtttctgttttttcccagcagggtctcgctccgtctcccaggctggagtgcagtggcaagatttgggctcactgcaacctccgtctcctgggctcaagtgatcctctcacctcagactcctgagtagctgggactacaggcacacccccacaagcccagctaatttagtattttttgtagtgacggggttttgccatgttggccaggctggccttgaactgctgggctcaggtgatccacccaccttggcctcccaaggtgctgggactacaggtatgagccaccgcactgggccatttttgttgttgctgttgcttgttttttagagacggggtctcactctgtcacccaggctggagtgcagtgacgtgatcacagctcactgcagcctcaactgcctcctaagtatctgggactacaggcatgcaccaccacacctggctgatttttaattttttgtagagacaaggtctcgccatgttgcccaggctggtcttgaactcctggcctcaagcaatcctcctgcctcggtatcccagagtgctgggatgacaggcgtgagcccctgcacctggctccctctgagtcttcactcagagaagtggcccagaccctgcccagaggatgccatccccggatgtggagaatccagtcacatgcaaagacctcccagtctggccgggctcggcggctcatgcctgtcatcccagcactttgggaggctgaggcgggtggatcacctgaggttgggggtttgagaccagcctggtcaacatggcgaaacccgtctctattaaaaatacaaaaatagccaggcatggtggcgcaggcctgtaatcccagctaccccaggcaggagaattgtttgaactcaggaggcggatgttgtagtgagccgagatcgcaccaatgcagtccagccccgggggcagagcgagactccatctcaaaaaaaaaaccaaaaaccaaaaaacaaaaacaaacaaaaaaacccagtctacacacacagacccccatccccatcaagcaaaaggaacccaatttacaaccagagaatcccatctccaccagagatgcccccccaatcacttatagaaaaagaaacaccctccctgctgagtgaaggggatccctcaccccacacagatatgagacccaccccatctcatacaaggaaggaaactcctgtcacaaagggaagggaccctcttccccatgcagagtcgagaccctcaccctaaactgatgcgggaacccccatcccgcacagcaaagggagcctcctcctcacacagcgaaggttcctccttctcccaaccctacaaacagaggggtcccaaatccccatccagaaaagaagagccccatccccacacagggagggggtcctggcgccacctggttttgcctcaggcatgtcgggggacctcctcctgctcctctgaccgcagccgcgtcccgctaggccctagggaggacaggtgggcccctaaggggagccttttaatgagtcctgagactcccagaaggctccgggagacatcagaccacagggccgccccacattccgcccgcatgttctaaagggcgagaaataacagctggacctagggagatggctgagagccaggtccccagggaggaggggctggggctcggacacctgggtctgagggaggagggggctggggctcggactccagaatctcagggaggaggggactgggtgcttggacccctgagtctgggagcagaagcaactggggtcccagattcttgggttccctagaaaggacgagcgcctggacgcctgggtcccgggagaaggaagaggaagagactgagggtctcaagggggtaagggctgcgggccagagctctggcatgaagcagggaggggagggacagggtctaggaagccattcttagcatctgcaagtcaggagttttcgggaaaccggagccgggagggagggtccggtttcctagcgtaggcaggacggcggcggggggaggaggtccctgcgcctccggggagggcgccgcggctctgggactccggagtttcgcgccccgggcgtgggcaaacccaaagagctggggccccggccatctgggaccccggactggccgccgcccctcctgggaccgctccccgcgactcttcccggagcgggcacggcaggcaccggacgcgggtagggggtgggcgtccccggtgggggcgggtgggaggctgggaaggccctggagggctgcccggacgttggcgcccttcccggcagggggacctgtgactttctgaatggggtggctctggacgcggcggggagccgagggggcggggcctggggaggggcggggcttggggacaccaggtgttgtggggaggaaggagggaaagggtgttggggacttagggttaaggctgggggactgcctggctagtaacgcagcgtgagggacccggtgtgaggaaaacaagtccctccgcttttttttcctgttcatcttccccctcctccttttccaaaaccccctacgagccggaaatttctccgcctccggggagcgtccagccaatccggcgtcagttccatgtgatgtcacgggttgccaggcagactgccactgcgctcccgcgagccccgctaagttggggaggggcccaggcctgcagtgccgcggccacctgaagcctcgcgtccctcgctgccagcccgagggctcaattcagagggaaggggacagacacccagacggaaggggaagcggggaggaggtggagaacttcagttggcaggaatagaggaagacataaacggaaccctctgtgcctgcgcgtcaagcctcttatttctcggcattaaggttcagataggttttgctgtatggtgtctttgtgatttgtttgtttgtttttgagacagggtctcgccgtgtctggagtgcaggggcacgatcacggctcactgcagcctcaacttcctgtgctcaagtgaccctcccacctcagtagttcggagtagctggaattacaggcatacgccaccacaccccgctaattttttattttttttgtagacgggtgggaaggggatctcactatcttgcccaggctggtttcaaactcctgtactcaagcgatcctcctgccttggccccccaaagtgttgggattacagagccaccgcgccagcatataattctctctttgaactcctctcatcatcacccgtgatgtcacggtgtctctgagagccagcggcctcagtggaggggcaggattgcagtccctgacaaaaggtcccaggaggtttgtctacgtcgatgcatcttattttattccacatttagggtgacaatgatagcttttgtaaaaagtaccttccccgttgcagggggccctggggaggacgttttacctgcccttcctccctcccccttcccactcattctcttaagggc

SEQ ID NO: 1560730 - DNA, 4001 bp, Homo sapiens
gagccccgtacccattcccctggacccaagcgcctgtgtcgccgccccctcaactcgcagatcctcggggctacctgggggcgccgaccggagcggggagatggggtgagggcgcgggaatccccgttctcttcaggtgcagcgacctccgcggtccagcgcagggcggggccccgtcgcgtcacagggcgggagcccggctctgatgtcacccagcacctgcccggctgggaacggggcgggcctggagcttcagggcctctgacgggggccgggggaaggcgggggttgagcctgttgccaggtgggcggcggcggcggcggcgccaggggctcctcccccttatggagggcaaaggtcgagggcccgccgcggagaaggctgaggattcccgggattcaaaccccgctggagcttcctgggcctcagctttccctgctgtgcattgcggccagtgaaattaataaaacgacgttcagaaagttccccagcccagtgcttcatcattaatctccctgagcctcagtttcccaactgcgggaagggaacaacaaaatctatagacagtaagagtaccaaagaagaggacaatggtattctgtcctgagcttcagtctcgggagtgaaataaagactacatggtgataagagtacctactatgtgtcgggtattttctcctcttagaacagctctttgagatcataaaatgatttaaaaaaaaaaaaagagggagagacagggtctctctctgttgcccagcttggagtgcaatgccacgatcatggctcactgcagccttgacctcctgggctcaaccgatcctccctgctcagcctcccgagtagctgggacagcagggtcacgccaccacgcccggctaactcttttactttttgtagagacgaagtctcgctgtgttgcccaagctggtctcgaactcctgggctcaagcgattctttcgcttccacctcccaaagtgctgggattacaggcctgagccactgcgcccggcctagaataacctcaacaaccaatgacataggggtgatcagcatgtccatttctctgatgtggaaactgaggcaggaagggtcaaagtaaggcactcaagatcacacagcgtaagagggaggtctggaattcaagcctataccgttttctgccattctaaaggagggggtctggaaagaacttgtagcaggtccctaaagacatgaatttctgcgtcccagttggtgattactaccaacctgcttccccatctatgccacagggaccaccgctttccttaggggactcctgtgggactgaaaaggttaaaggacccagcacacagttggtctctggagtgttcttctccaccaggtccccctgcagtcaccaattcggcccagtctcagccttcccctctctgtataatgggtacaatataactcacctcgagtcaacacgataaggaaaggaaattatttagttataaaaaataaaagcgtccaagtacatcataggttctcaaatatgtccttccctacccctccgcctcttccagtcacgacccctctctctggcctccgattctgacacgtgagaacagagacatgtcatgctgggggcgggggactggaggcgatgactcaggtattaaagcggccgaggttccaaagacagcctcagtttccccttctgcggaacaggcccggggctgacaacgaggaccccgaccgggcctcgcacacggcggcaactggagttgggggagtgtagacgtcccgcccccccacctccctcgccgccgtcccgctgcgcgcccaaggtgagtgtccgcgtcacctccccgccgtccccggccgcctgcccgggctcccgggccccgatcgcagcccccaggctccagcttcccctggctcagtcccgttccgccgcccccggagggctgccggccccgggcactcaccggcttccagggccgtcccgaggcttcggcctggggagaaagaggggcgtgtccgccaggacagccccgcccccaagagagcagcagaggccaatcggcgcccgctgcggcaagctacggccccgcccctgggggacgggagccgccaatcaaaaagagcggctggcgggctgggccaatcagaagttgtcgaagggtgccagccgtgggaaaagaacgcggcccgggcgcggagctaggcggcgcggtcgggggtggaagccgaggcctgatgggcacggggcgccaccaatagcgaggcgcggggggcggccgggggcgggaggcccaaggggccagggtgaatgggccgctttgtgcgcaaggcatgaatgggggcctttgtaagggccggcgtgggggggccgaccgaaggccggaatgcctgggtcccccgggacccggcgggcaggagagacaggagacagaattcacttttgtcgaacgtagaccatgtaccaggcaccctcccaggctctcacccaccggggaggtgtgggccgtgatactatcggaataacaatgatcgtttatcaagcacttcgatgtagaccgggagctgtgctaagcgccttacctgcatgatctcatttaatccttacaacgaagcccttgaaattggtgctattaagatcttcatcttctagatgaggtaaccccaagcttagaaagagggtgttaattgcagaaagtcacagagctggccgatggcagagcaaggactcagatccaaccagaagttgtgcttttaaccgccatgctatgcccaaacgtggtaatgattccccatttacaatttacagatgggaaaactgaggctcaggagagccaaaagacttcccaaggttggaagggtgccgtggctcacacctgtaatcccaacactttgggaggccagggtgggaggatcacttgagcccaggaggtcaagaccagcctgggcaacataggccccatctctatttaaaaggaaaataaaaagagccaagggcacaaaggaatggctccactgaacccaaggaggcctgccagcttggctcggctgctcagcagctgtgtgggctcaggccagttgctggacttttttgagattccatttatttctgcactcgtaaaatgggagtgatggactgtctgccttcacccttgctctccctacagtctactctattcagatggggcctttcctctgttcagagccttccatggctcccatttcactcagtaaaagtctaagaactcaccatggccaatgaggtcctgcgggatgtggctggcccttttgctctctctgatctcacccccaggccctccccttcatactgctccagctacactggctcaatttctcaaaccaggaggcctggtgctgccccaaggcctttgcattctctgttgggtccaccaggaatgctcttccccaggttttgcatgacaacctctctcccacatcatccgttctgctccaatatcacctcttccaagaggcctttcctggccatcctatataagacagttcctctcatcactctctctcgtttaaccccgctttgctttttctcatagcactgggagtgtttgctaatttatctgtttatcatctgtctcctcactagaatttaagtcccacgaggacaaagatctttattttgttcagtgccgaatcctcagtgcctggcacacagtaggtgtttaataagtgtttgttgagtaaatggtaatgagtgcttgtattgagtggattaagtgaattagtgcctacaaagctcttagtacagtcctggcaccagggaaaaggctgaataagaaagtactggccaggagcggtggctcacgcctctaattccagcactttgggaagctgaggcaggcagatcacttgaagtcaggagttcgagagcagcctggccaacatggtgaaaccccgtctctactaaaaatacaaaaattatccaggcatagtggcccacgcctgtaatcccagcttttcgggaggctgaggcag

SEQ ID NO: 1560731 - DNA, 4001 bp, Homo sapiens
ctgtgataatctaatggcgcccccgagaatctgagaggaggtggagctcgggcttgcttgcctgccactcatctcctgctctgtgacccgatagggctcatggtttctaacagacagaccatggcccgatagcagtccatgaccccgggggttggggaccctgttgtaaaggacttcagaaatactgtttcattgaatccttcagcgatcttcctggcattcaccactcctccaggaagatttcagcatccccagacagaggtgggtgtcatttttttctcttctatcatcctctgcgatacgggtggcccctcccagaccttgtctgccaagccgactgttgactaagcattttcagagggcttccttggggaggggttgcctttctttcaagtagcaaatcacttcctgtgttcttttgatcaaagccctgcccatcccaggacctgagcctccctggcttgcttctcatcttggaagaattcccaccccaacagtctcagagctccagctgatggtttgggtgtgaattccgggatgcccaatttctcatcagctttccttttttgagacggagtgtgctctgtcacccaggctggagtgcagcggcaggatctcagctcactgcaccctccgcctcctgggttcaagttattctcttgcctcagcctcatatgtagctgggattacaggcgtgtgccaccacgcccagttaattttttgtattttttagtagagacgaggtttcaccacgttggccaggctggtctcgaacacctgacctcaagtgatctacctgtctcagcctcctaaaatgctgggattacaggcatgagccactgtccctggccctcactggcttcctgaaagaaggtgttgtctctcagactaacaccacctctgcctcttgccctatgtccctgactccaccctagtaagctgtacctgccaagaatcctgcagtggccgctgtcacagccacatgctctcatcctcactgactgaatgacgagaaatgaaagctgaagtggtctacacagcagagagctgtggggtggggtcagccctggccacctcttactttgcgtcttatggtggtacgatactgctaggaatagcgccatgatcacgacagtctccccgttgctatcatcgacagacctcagacttgacaggcagcaacacctctggctgccatcctcctcttgggataagggatgcccaccaaagggtggcatggacgtattcagcctctcctgcctctgctgcagccataccgcccgtcaccggcacagggagggcgtcaatccaccccatcgcttgttagacatagcttcccatctcagccgaggactctgtggcagaacccacagaccttgagaatgttgcaactgaaagacccctgaagagcaacttccgcatctagacggatttccaaatatgacatctgtgggaaccggggccaagagaggggaagtgactagcccaaggctacacagggagacgagagactgggctggactgggaaagggctcccttaatttgcaagcaaaggaggctatgtccttgtccctgcagactctgtgattctccctgggccaccttctgtcttccaggtcctgccctatccttggatccagggataccaccctggcatccccaccacctacagatgggagcttgctccctggtaagggatgctggaggcacctgagctgcactgagagacaccccacccccacagaagtccaccatgcccctcccctcaccccaatttctgatggtcatttttaggacacctccacctggctggtgtccctcctctttcttcttccagatcccacccttgaaggacttaccatggtggggggctggtgtctgggctcctggaggctcctgaatgggtcgtgatggaggtgcaggttcagggggatcttgggggtggcttgggcatggccctgcttctgcccgttcaccggactcccggctttagttcctcttacaacagccccttctcacttcctttggcgggaggggccgaggccatgggggagggaagctgggtgtggaggggggcggggagctggctgtttggggctctgagcctgaagggaggggtcagaacttgatggcagccactactggacctcagaggcctcttccccaactccttggggacagggctgctgcaggaacatttgggtcagctggctgcaggacgaaccacctcttttcagggcgattcaggaagcatttgggcttcccgggtctctttttaaaaccaaggaaggggcccaggggaggtggctcacgcctgtaatcccaatactttggggggccaaggttggaggatcgcttgagtccaggagtttgagaccagcctgggctatatagcatgaccccatctctacaaaaaatgaaaagaaaaaaaattagctgggcatggtggcatgagcctgcagtcccagctactcagagggctgaggtgggaggattgcttgaacctgggaggtggaggcctcagtgagccctgattgcgccactgcactccagcctgggcgaaagagtgagaccctgtctctaaaaacaaaccagaaaaaacaaaaaaaccaaaaaaacaacaacaacagggaagggtgccttcttcagctgtgtctgctctgggcatccctgggcaacctccttcattattattattgttattattttgagacggagtctagctctgtcacccaggctagaatgcagtggtgcaatctcagcttactttaatctccgcctcctgggttcaagcgattctcctgcctcagcctcctgagtagctgggattacaggtgcccaccgccacacctggctaatatttgtatttttagtagagacggaatttcgccatgttggccaggccggccttgaactcctgacctcaggtgatcctcccaactcggcctcccaaagtgctgggattacaggcataagccaccacgcctggcccaacctccctctttagatgaccctcagaagtcacacgtgtttgtgtgcagaagtggagggtactgggaagcaggtgcatctgaaaggtccctgactttggatgtcacatctagatttaacagcctccagtttggctacttcctggatgacttagttactcccttttctcattgtaaaatgggaacgtgggtccccccagcagagcctggcccaggtacgtgtcagcctatgagctggtctttgggacaccagccaaccacctgaggctcctcttgacatgtgaggaaatggcagttctaataggttgttacttccccacaccacccagcaaggaggtggccgaggcaggacccgaccctgggagaccctgggggacccatgttcagatctatctttggtccagggcgataaacccgcatcccccttgaagatgttaatatgcagcgcccctagtggccacagctgggaaggagcccgtctctgctggaatctcctgagcgagtttgcagaattgacgggcttggggcatgcaattctcagcaatgtctccaggcactcaagagtgaatatgaatgggtaagaggaccccactttgttgggggccatcaggggaggcttctaggaagaggcaacgtttgtgctgacaccggcgagtaagctggagttaaaaaaggtaaaggggcaggagcgtgcacctggccatgctaagcgctcaagcaaaggcccagatatgggaaaaccatagggcaattgaggaagttcggggaggctggtgtggctggagcatgcggagtgacggagagtgtgatggccagggtggcaggtgctagaccgtgtggctttaagagcctctgtgagggccaggcatggtggctgatgcctgtaatcccagaactttgggaggctgaggtgggaggatcgcttgagcccaggagttccagaccagcttgggcaacatagcaagacctcgtctctacaaaaaattaaaaaatcagctaggtgtgctgttg

SEQ ID NO: 1560732 - DNA, 4001 bp, Homo sapiens
tcgcagccaggaatggagagtgggggtgctgtgaggagttcaaggccgggagctgggggacatggactggagacaagacggtgatgagaagagttgggtttcaaggttgaaaaacgctgatggaggtcaattcattcattttgcaggtgagaggtcagaaacaggcacagagacttgaccaaagccaggatctccaacacagtgctccccccacaagaccctgcttggccattctctagcggcagggaagaggcgattgcagggctgcgggatcagaagatcccggtcctgttctgtaggccagtgcaagcctacagttcaatgtttgcaggaggcatgactgtgggctgtcactgcatgtcctggggcaagccaggccaaagccacctttcctaaaggccaggatattctggaagtgaagggggtgcttatctttctgtggccctctttatattccagctatccgggttcatctcctgaatgagctataaactaaacataagctggggttccccagcccttctggcagatcccagataaagatccctacagttgggaaaggggagaaatgaatgccaatcaaaagcaccctgcacaaagtccctgccagggccacaagagccaggcctgtcagatgtgaataactttcctgtagcccaggtcacctccggctgctcctggacaccttaagattctgaagactccaacatcaaaaaacaaaccgagttgggactctctggctggaaagtgtccccacgggctcccacctcagacaaagaggcagagaagccatcccttaaagacccctggcctccagggtgcccaggaaagaaaggagggctcgtggctgtcgtgcctctccagggctgagctcagagcaaccgggggacagatttcctgtatgtcgttttacccatttaagtccaaggatgcagctctgcggaggtggcgacagtcctgtacatgagggtgcatgcacactccctcctgaaacacagttccggccccacaaccggccctgaggtcccttccttggatccagggaatcccagaatcctgctagtcctgtcttaaggggagggtggtgaagtttccaagacgaggacactggcacagagggtgttgggactcgtcccaggtcacccagctgttaagtgtgaagtcaggagggacacgaatcaagaggggagggtggggggacggaatctccaggggctgcatctcaacatctatctgcacggggccactctaaccccttccttctcttccctcctctccgggccctccctccctaagcctaccctcagttcttaccgtgacttctactccgtttacttcccttccagctcccatttccccgcttcccaatagccggctgccgcatcagttagttcagaaccccccgcatttactgagcgcccactgggggccaggcgccgccctcttctcagacacccttccttcaatcgcgcgggcagacgtccccagatcggtctcgcaccccttcccctcaaccgcaccccggctgtcccgcccctggccttgcccactcccccagcctgggcctctcgttcccgcctccgtgcctccccacaacgccgtttcctgcgaccccccaattaccacttaagccacgtcctcttcagagaagctgctcaaagccacaagactcaccccccccacgccctcgaactccctcaccagctccatccccatccactttctccttcaccgtctcgcttccacctcatccccagcaatctctccaagacccccaggctcgttcccgccccctcgacccctgccgtcgcgtcccccatcagccctcagctccgtccctcttctgcgcagcccccaaaggcaggcttcgagctcgagtcgccaacccgaggctgcctggtactcacctggcctcggccgccgcgcgccgccggtcccgggccgggtccccggccggacgaccgcctgccagcccgccgctgctcgagccgctccgccccgccgcgcccgccgctcccccgcgcgctcccgcttccgggttccggagaggcggggacgggggcgtgacgccagcgctcctaggggcggggcatcgcgaaaagccccgcccctactgtccgacagatcaggtcccacccaccgcccctacccactaccgccgatggtgggcgagaccaagtgcgaggggaggacaggcgaagcgcgcgtctggggccgcgctctccacacttagccggcgctgcctcacgcctcgcagccacccctcctgcgtctccacaaatggtccgacccgcaagcaagggggcgggtccggctttgaaaagccggcgggtcgggccttgaggtggaaggcgggaaaatggcggattcctcggggcgaggcgctgggtgagttggggcttccgcaggtctggatttgtagacgccatagggctggagaggatgggcagcggaggtggggagttaggaccctcggggtgagttcgggttcgaccccgccaggaactgcgcgggcccctgaagaccccgatggcgtgctgcctctgcgcatgctccggagcgctgacacccgaccggccctgagttccgcgtcctcggctgggacgctgggcgacctccggcaagcggcctgaccgcccagtgcctcgctttcctccgctacgaaatggggccgatgacgcagctcaacctcgtaggcgtcgcgtgaggctgaaacgcgcttagatcggcgcctgggtctttactgtgatgtcgctcttggaattatcgttatgcagtgaacaagtgttgggcgaccaaagtgtcccctttaatcctcccacgcgctttattctgtgctcccagtttactgaggagatgatggagacccagggaggggaagtgacttgcctagggtaacacaccatgaacaagaaagaagttgaatactgaccgagagctaggcatgaatgatcatgaggctatatttgtctagttttgttaattctgccagtgttgattgtgccaggtgcaaactgaagtgaaattggccagcaagaggaatcactccaccgccccttgccgtaaccgatagattgacagtagcacctcccaggtacaggtgcagtagctgaggctcgcacaggttgtagggacccccctcaggtcgcagcaggttcacccaggagcccattcggtttgaggccacagccctagcacagtccccagagggagtctgtgctcttgtctctttctggctgtgagactgccccgggggtgacctatgtaaaacctgtgcgtctttgttttgcagcgacgaaaaagcaggtgtgaacagttaggaagctgtcgggttaggaggagcctacgggcgagcgcagctgctggcacctggcgaacatttgctaagttgcctctccccacggtggcctggaagtgtccccaacattgtctgggtctcactttggggtcctgggagcctgcttcagaggaggtggccgcagggaccagtggagccgcctttggtgatgggagcaggagttacagtgccctggccttggccctgcccctccacttgcccatccacttgcccctcctgtgttgctggtgtctgttcttggatcccttcttttctcaccagctcaggctgaaaccctgaaacccctagtcatcccagattctccctctcctgcacccccacagctgatgagtcagcgattcctatctcagggtcccttctttcctattacatcaggcttcattctatttttatttttatttttatttttatttatttatttattgagacggagtctcactgtcaccctggctggagtgcaatggcgtgatcttggctcactgcaacctgtgcctcccgggttcaagcagttctcctgtgtcagtctcctgagtaggagggactacaggcgcatgccaccaccccagctcatttttgtatttttagtagagatggggtttcaccatgttagccaggatggtctcgatctcctgacctcgtgatc

SEQ ID NO: 1560733 - DNA, 4001 bp, Homo sapiens
ggcaggtgctcagggaacggctgtagaagaaataatccagaatcaaggctaagcaggaagtttctgtagtcagctctccacacctctatccaaggcatgaccttgggaaaattaccaaacatgtctgagtcttttatttatgaaatagtgaaatagtatgcatcttaccgcattgatgattctatcaagaactaacaatgagagttgaggaggtgctgaactaagcaacttacccatattagctcatttaatcttcacagcaacgctttgaggtgcagactatttttatctccattttacagatgcagcaactgaagtacagtaacttactcagatgacacagttcagtggcaaagttgtgatcggagcccaggcagcctgcctccagagtcactactcgacactgcatttaatgaaatcctgcctgtgctgatgaccccaggtgtggacctgagtcaggcctcctaaatctggttccattcctggctcttgacagttactagctatcggaactgaggcaagtcatttcatttttctgagcttcagtttccctagctataaaatggggcgaaggacagcatccacctcacagggctgcagcaaggctttgatgagacatgtaaaaggcttgcaacagcgcaggcacacagcctactctgaagacactcacctgcacgtcggtcctcccggcggtcttccgacaacacgtagcgctgagggcaggcgcttgggggcggcggctgtgaagagggggccgcagggggctcctccgccccagcacctgcccccggcgccgccacacctggccccaggatggcaaaaatggtctcctcttccgcggagaaagcgtcctccgcggcgggcccggcgccctgcgtggagtgcggcacgcgagcgagcttctccttggtgcggcgcttgaagtcgttccagcgcttctgcacctcctggcccgtgcgcttccagctggtgataccgttgatcttggcggcgatgccgtcccacacgcgccgccgctctgccacgctcacccgacggctctgcgcgccgtagagctgcgggtagtgggcgcgcacctcgcggatcaggatctggttctcttcgaatgagaagcgcggcttgcgcaaccgggtggtttcctccgcttcgcccgccgccgccgaggccatggcgccccccgacgccgccgtcctgccgtctggcgcatggggggcgccggcgctgcgggcaaagggcgcacggggctggctggggttcggggtccccccgccgccgcctctcccagaccgccgggccgagagctccttagtccccgggggcaggagtgggggcggggggcgggcgggggcgacgggcacccgggtaagtcggaagcgcctaagagtagctgacaccggctgagcgcttggctcggacttcgcgcggcgcgaagtgccacgctgaagagttgatagaaattgggggagggtctggagggatggaaggaaaggaggaaaagtgcgaggagaggaggtgtctgcaggagttagagaatgggggcacgggaggataggaaatggagggaggatgggggtgcctcgggggggtcttagatgcatgaagataaggagatgcggaaggggggatgcagcaagaaggggggaatctggagcagaggaggcgctctaggggctctagggggcaacggggcgtctgtaagaccgatatgagaagggcccttagagggatgtccaggaataatggtgaggtgggagctcctgtatcactggaagagctggaacgatcaaatattagggatcagggtctgcgaggattgtgggggctctggggattgccagaaattaaggggagctctggaaataacgggggtcccgtatcacaaggagacaacggaggctacgggggacggcagggagagcgaaggtcgcggagggtggggaccgagtcgggccacgggtcactcaccggctccgccgcagccgccggtgggtcagggctcgggcttctgcggcctgttcccaccccccgcctccctccctcccctctttcggccccgcctccggccgccccgcatgccaaggcgcaggcgcgcccagggccagtcggccccaatgcccttaccgccagggtttcattcccacctaccccagcacagcgcaggcgcagaactgcgctccgccgagccccaccagcaggccgcaactgcgcagccgcaacgttagcgccgcgcgggtaccccagcttcctggggccacaacggcgcacgcgcaaaaactccatcgcgcgcatgcgcgtgcctcgggttgtacccggtaccgggtctcggcgcaggcgttgcgagcttggatgggagagatgctgggagcgcgccagtacccaacctttcggacagtcttccagcccaccctgccctctaaccaaaggggagggagacagcgctgaagggaagcgctttgtctccttgacaactgtgtgggtggggtggaggcgtgaggaaaccgctttgcctcctggcttgcccgcccctgcgctgggccgctccagagcttcccacctcgcacccctagaggctgggcgtcctggggatgtcccgccccgggcggatgcagtaaccatagcgacccacaagccttccagtcacgccttgggggcccctctgtgcgcacctttacctcgaggagcggggaaaataagagggaagagcttcctggctggtaggaagggagatcctgacgccggcacgactttaagcaagtgcatggagacaggaatgaagccagaacgcaggtggggtgagccgcatggcaggatgatggagctcagtccggctgagaagtgtgttcgttagcatcctgcaggagtcctcaaggtcattcgacaattggtgcttcattcatcgactcaataaatatacatgagcacttacacagttcctggtacaatgaacataaaagctaaaatccgtagcctgggccgggcgcggtggagctcacgcctgtaatcccagcactttgggaagccaaggcgggcggattacctgaggtcaggggttcgagacaagcctggccaacacagtgaaaccccatctctactgaaaatacaaaaactagctgggcatggtggtgcatgcctgtaatcccagctactcgggaggctgaggcacgagaatcgcttaaccccgggaggcagaggttgcagtgagctgagattgcaccactgcactccacctggacgacagagtgagactccgtctcaaaaaaaaaaaaaaaaaaaatacatgcctgtagtcccagctacttgggaggctgaggcgggaggatcgcttgagcccaggagttgcaggctgcagtgagctatgatcaggccactgctctccagcttgggcaacagagtaagaccctgtctcaaaagaagagagagagaaaaaaaaggcccctctgcctgctgtgtggagggtgggtgggagggagcaagactactgggtagagtcaaaaaaagtcatgagcaggggtaagaaaaggattaggaaagcgaggggagactaaactaagacagggacagtgtcaagggggacacggagagacatttgagagaatatatggaaagcatggtgagtgtcgcgctagcgagggaaaggaagatgtctaggtgaaacccaagtctctggcccaggttctcacttgggggtgtggggtcaggtaagatgtggtgaatgtaaggctgggtgcagtggctcacgcctgtaatcccaacactttgggaggctgagacaggtggatcatctgaggtcaggagttcgagaccagcctggccaacatggtggaaccctgtctctattaaaaattcaaaaaaaaaaaaaatagctgggtgttgtgccatgtgcctgtaatcctagctactcgggaggctgaggcaggagaatctcttgagcctaggaggcacagattgcagggaaccgagatctcaccactgcactccagcctgggcgacagagtgagact

SEQ ID NO: 1560734 - DNA, 4001 bp, Homo sapiens
cagacttatgcagctggaagccctcccttagccacctgtatccctggtcttctctccgcttgggcctgtgcaaagtctctgacagtctccctgctccaaacacaggcttttttttcttttctttgagacatgctgtcagtcagttgcccaggctgaagtgcagtggcgagatcatgcgtcactgcagacttgacctcccgggctccagagatcggcctcccaagtagctgagacaacaggtgtgtgccacgacatccggctaatttcttaatttttctgtagggatgggatcttactatgttgcctaggctgttcttgaactcctgggctcaagcagatgatcctcttaccttgacctcccgaagtgctgggacttacaggtttgttccaccatgccagcccacaggctgttttttaggactagaagacacttctctcccctgtatccttcccttcttctacatgtgcaacctcattcctgcgctacagctctctctttaccaggtggatggcacctatacacctacagcctgggcatcagcatcactgctggcgtctccccctacccaacgccagcccttacttcaccttctattctctcatctacttcgatgtggctcctcatttgggccccaccatcattcccctccctgcttggaagcctcactccacctaatcctccatgtcaacctgtgcagtcacttgtatggctcagctcccaggcagcaccctctctccctactcagccccatcttctaagcccaacatcacactacgcaatgccccatctcagcttcctgatttagctggggttggaaggggatgggggagcttcgcaatgggtgggggggcggcaaaggctccaagactgccggaacaggagcctgcaaggaagtcccgagactctgattccgcccatcttcagatcactgtgccttcgagaacttgtttccccatttgcaagtggggctgacctccctcctcgcgctgttccttctgcagctgcggctttaggaaggaatctgcgtttatgaaggggatggcaccgcagaatcattcccccgtgggtggcatcgatttcgagggccgcctcatcctgggggccaagcctccactcttcaaggtgccaagtcaacctgaaaccctgggagagacttgggtcatagccaagatggcaggtacctacggagggtcccgaaatacacttcccagaagtccaggcggcaacttccgctccagggtgccaaggtaggtccagacgacgcctaggcaaccgggggcggggctcccaaagcctgtcgtcgtggcaacgagtagtgattgacaagcctctcgctctagccctgggcgctcccgcaaggactgcccggattcgttccccgcgcttccggtctcactggggagccggaatccccgagtctgcagccaccgcccccgtccacacgatagccctcccggttaagaggaccccgccctcacctctgcgctcagcgggccgctccgcgctcctgagcacgcgcagtcttcgacttccccctcccgctggactacgtctcccaggatgctccgcgcaccagctcgagcgcctccttgcccttcccccaccctcgtccccgtttctacaccctctcctcccttcccctagcggtggtcgcaatgatcaggtcatactcctggccgcttcttcccatgctccccgcctcgaatccgtgcgtcggcatgcgcaagcctctcaggtacaacagacggcagcaccgcctaccagatcgcgcatgccccccaccacgttttcctcacttctctacgggccttcctgagattagcaggatcctgcaccaatcacggccgtcattagaactccgtcggtgccccaccgcgtctccatggcaactccctacaggaaggggcctctgctacttcctagaccgcaaaatggagaaaggcttggcccgatgctttccggcagatgtagtcagcaggcccttcgtgtgtacgtgcgcgcgcggcgcgatgacgttcctctgtgatcatgggcgaggggcgggccctgaacgtctccatggtaacctggggacacgactcgacatcgcctgggtaacccggagacgcggcgggcgttgaaaatgcaatggggcatgtgggatgaagaggtggggaagggtactggggcagagagatgccgatcgatagaaacagcgaggagagacggagagagaccagagactcaagggcaaagagagacgaaggaccggcgggaggaagagagagagagacagagagacagactcacagactgggaggaccggagactcgacgcgaggagagacagtgaaaataagtgaacaaacatagagacacgggtccaagttataagagggctgagtggatcagagggtcagggccgggcaaacaggtgtcagaacagttagcaagagagaggcagatcagaaagggatgcagatgaaagagacacaaagaaggaaacgcagaatgggttcacagagacaagaaatgcagatatccagactcaagaggtagacaagaagggagagggacagaaacaagaagggagaaaagggacagaaattagagatacagtaagatggattgacagttttcgaagacctagagaaagatgacagcacgaagagagacagggagaatccgaggtaaaactgttaggaaaacttaggagtccagatgctgtccagttatatgctaccctgtacaggttgataggttgcaaatgctttctgtccagtgtatcgctttgtagctcactaagcagttttgtatccaactttgtgcttttatttcagtgtttttctttttctttctttcttttttttttttttttttttgacggagtctcgctgttgccagactggagtgcagtggcacgatctcggctcactgcaacctccgtctcccaggttcaagcgattctcctgcctcagcctcccgagtagctgggactgcaggctgctccaccacacccggctgatttttgtatttttagtagagatggggttttaccatgttggccagactggtcttgacctccagacctctggtgatccgcccacctcggcctcccaaattgctggaattacaggtgtgagccaccgcggccggccagtgtttattcttcctttcctgtcttcctagaatcatcttgctgcttccctcagtacggtaaataaatcttttgacacatgctcactgagagtcatgtttttaactgttttgaaattatatttggcagtctgaagggaacctgttctccgggctaggggacaaacagggaaaaagaaaatagtggccgggcgcggtggctcacgcctgtaatcctagcactttgggaggccgaggcgggcggatcacgaggtcaggagatcgagaccatcccggctaaaacggtgaaaccccgtctctactaaaaatacaaaaaattagccgggcgtagtggcgggcgcctgtagtcccagctacttgggaggctgaggcaggagaatggcgtgaacccgggaggcggagcttgcagtgagccgagatcccgccactgcactccagcctgggcgacagagcgagactccgtctcaaaaaaaaaaaaaaaaaaaaaaaaaaagaaaatagtgacacatacccaggaaaggaaggaggaagggagggtgatgtaagacaaagacattaggcggcgagaaagccagcctttggtcagaagcagcttctggcgcccctggctggactctgtgcggtgcggcctcgttgccaaactacattttccggcagtacccgggacgccgggcgcagagcggagagcgtcgcaaggggcgggcctgacgcagcctcctccctgcccggccgtcgccaggcaaccttcccccttcgcggccgagatggaccctgggctcggcgtcctccggaaaactgcactgtgaggcggggcgatggggaagggccgaagccccgccagcccagctaaagcagacggctcgcac

SEQ ID NO: 1560735 - DNA, 4001 bp, Homo sapiens
cagccctggtggtgccaggcctcctcagcttcccacggtcagcccacagttccatgactcctgacctcttggctcccaggagggaaatggggaagaaggggtgaccaggcctccgagaaagatacctccactgttccattccccggggacaccatggaaactcagtctgtcccaaaggggattgacccatcccccggggtgagcagaagggaaggcctggacggaggagaacgcccgccagggaatccagaacgaggagctccttcagtcaccctcctggaaggccacttgagtgactatgggtttgggctgagggtcagacaatcccagttcagccactgtctgctcatgtgatctgagacaagccacaccaccccgagcctcagcttcctcgtctggaccccagagaaggcctaagttgaactggtggtggtgagccatcaatgagctcatccgaccagcgagctcggcacagggcctggcccaggacgagtgtcccagaggtagatccctgggccagggtgtgagtgcctgatttgatccccttaactcttctctgtgccctgccttcaccccgtcgggagcctccaaaccaccatcaacagagttttacatgctcattccctctaattcttcacccccagggagatggcacacagaactcaggctcaaggagttggtgcctgggaggccatggtactaatatatacgatggttgctgtgaggtcccatccactaggcttgaaccaccagcttctggccacaaaaggtagagaaagaatgcaggatcctaaaatacccaggtaacgtctgctgggctgcctccctgtagatatataaggtgggggtgggcaagggccaccttgtgataaacaagatgcctaagctaggtgttccagactgtctccagctgcccacacaaacacccactggccagtgcctttgaacagttggcagaggcttgcccaaggggtagggtcaggactctagaggcttcagggatgaggtgtgagaaagacggaaccccttaacacttgagttgggggcggtggggggcgcatcttagtatataccttctggtcacaccagcttttcctgacctgcccccacatcccccctagcctagcccaaaaggctctgctctctcgactcccaaaactcctacagcagtccctcaccttacctgatcgcccccacatctagcctccccctccccacatctgagtcctgacctcatgtgacccccggaaaacatctctgggatctcctatccgcccccacacgaagtaactccgcccacacccgccgtgccccacttcctgggcttctcctcagccgcccccaggcctgtaacttgacccacccacctcctccagcgcccaggcggtacctgcaggcccggcccctccccgcccccctccggccgcgccgctctcctctcctcccccactcggcctggccggagcccgactcctcctccccctccccctccccctccggcatccacgagaacctcctcacttttccgcctcggaccctccaacttccccggatccccggtacctgccccggcccgacctggccccctccctcgctgggagacgggggagcggtccaggtacgatcctgccgcccccaagccctgaagctcgggctggacgctcaaggccgcccgcggtagctgggcctccacacactcgcctgcccgggcacagtgcaggctgcgggcccggctcctcctcggtccgagaaagcacccaggccctccccactcagccctcgggccgccccggctggaggaggccggaaccgggcctgaggcgggccgcctcacctgcgccgtggccgcgctccggggggtcccggcgggctccgcagcggcggctggggccgggcctgggcccggggcgcgccccgctgcgccggggcctcggcctccgcctccgcggcctccgcggcctccgcctcagcagcagcggcagccgcggcggccattcattgtgggccaggccgccccagccgagcgccgagcgagcgcaagccgcgctgccgccgcagccaggccagggaggagcggccccggccccgcccgcgcaccgccctcgggccccgccctccaggcgaggccagccgagctccgagcgcgccccttctaaccggctccgtctcctctctatgcccctgggggatcctcgccagtacgtcggctcagctcgatggttcgaatcctggccccgccaccttctagtcccgcgaccttgggcaagtcgctctacctttccgaactttagtttcctgtaaaacaaaaacaataatgactgctgtttattgtggcaggcactgcgttacattctttatgggaattagctcgtttaaactacacagtaacattttttagtgagaactgctacagacacactatagaaaataaaggcagctgggcgcggtgtctcacgcctgtaatcccagcactttgggagaccgaggtgggtggatcgcctgaggtcaggagttcgaaaccagcctggccaatatggtgaaactctgtctctactaaaaatacaaaaattagccgggcgtgatggcatgcgcttgtaatcccagctactcgggagactgaggcagaagaatcgcttgcacccgggaggcggtggttgcagtgagccgagatcatgccactgcactccagcctgggcgagactccgtctcaaaaaaaaaaaaaaaagaaagaaagaaagaaaaggaggcacagagaaatgaagaaagctggtcaagatcatcacacagcaaggaagtgatggtaggtgccaggatttaaacacaggctcaaaagcgacaataagacctaagacttttatgatgcttaccggatgctaggttctgttagcattttacctgcactaactcgtttacttctcactacaacccagtaacaaatggtaaaaaaaagttctgcccattttgcaaaagcggtaacttaagttcagagttaacaagtcgcagggcgagctgagactggaacccaggtagccgggaccacttcgctgtcctgccttcatacactggttagaactttaccgagcgcttacaatgttagagtggttctttgcacactttccaggaatctgtcatttaatctttgctctatctgagaaaccacgattctcatttaataggtaagaaaagtgaagccgcgggagtaacctgcccagagcatgtgatgggactgagattcaaacccggtaaatccaactccagagcctgagtcattcctgcagggtgctctgaaataatgtgtatatagcacccagaacacagaagaggaccaataagtgttgggtttctccgcttaccgccccttttctgagccacaacttcctcatctgtgaaatgggactagggacgtgtcctctcccaggggatccactgtgattaacacccccggaacagcacgatcagcgcgcttcctttatggctttcattttgatcccggccgcccaccgtacgtttcctcattgactggccaaccactatcatgtgattcgcccacccactgtgccaacatggcggcgcccaggtcctaattcgggaaacgtgcaccttgactaattcggttttctgtggctacgagagcaggtgaggacgggctaggcagcgcggggagggattcggactcggggcgggcctgcacgagggcatcggctccacagggaccagtcatccccaaaacgaggggatatcagcttaccgaggccgcaggttttcctagtccctacctcatagatatgtaggacatccccgggcccggaatgcggctctctgaccctctctgtgccctcccccgccccccgaaccaggcttggcgggcggaggcgccagcggatgtctcatgcaaggatcgtctctgtggctaagcctcactttccgctccgcccgggtgctctctagagcccggtttttcgagtggcagtctccagggctgccgaatacagcagcgatgg

SEQ ID NO: 1560736 - DNA, 4001 bp, Homo sapiens
aaaacaaaaaccaaaaataaaaattacctgggtgtggtggcgtgcacctgtagtcccgcctactcggtcaccccgtctctactaaaaatacaaaaatggccaggcgtggtggtgcatgtctataatcccagctactccggaggctgagaggcaggagaatcgcttgaacccgagaggcagaggttgcagtgggccgagatcgcgtcattgcactccagcctgggcgacaacagcaaaactccgtctcaaaaaaaaaaaaaaaaattagccaggcgtggtggggcgcacctgtagtcccagctattcaagaggctgagggaggataatcacttgaatccgggcagtgagccaagatcgcaccactgcactccagcctgggcgacagagcaagaccttgtctcacaaacaaaccaaagacggaaacagatacagccatttcaaagacgactagaaaacctttttattcaccagagctcaatactcagggtcccgaccctgtgccaaaaactgaacaacttaaaatctgacgggggcccttcttctctttgcccctaaaataaaagctaggccattgccattcccatccgggtactcaaacccccttcttatcggcggttccttgacttgaacgttggaggttgaaaaacacaggaggaaaaaaaaatgtcctttagtcaactatcacgatttggggggtcggacgggaggtggtcgagagatatgcttctcgctgggggaaaggacccatcggtgatttggggatgggggcaggtaccgggtgcaatgggctgaacaaggggaagaacaaccagggggcattgaaaggtgtcagctcaccccacggctctccatccacaggtgagcctgcgaagacacggtgccctccagtgatacggtgctctccagagtcctactccgctcctgacggatgggtactgaggtcagggaaggaatgaacaggcgtggtccacgatgacaccgtggttctgcaggaggctgaagatggagaaggctggtcttaagtcgacatcccatcttgaagttcttgagtaggcacttctcagccagccttgttcagtatctcctaagggctggcttgggacagcaccgtggaatcctggaggttcaaaaatccaagaactccacaaggaacagagaagtcgaaggggcagggctccagtcaccagcaggccccacgaggacaaaagatccatgaaccggggcccagagggcgctacagggccgtgcaggaagggttcccgcggcaccaaggaccctcaggccaacgcccacaggccagagctccgagggctgacaggtccaagggggcggggctggcctggctcccagcagcctccactgtttcaggatccagccagggtggagttctgggggccagaaattccaaagggctgggtgactggaagagagagtttagggacttgggtgggatggaccaggagggtcaggggtgcgggtggtgagcatctcacgatgctcagcgcttgaccctgcgtccggccgagttgcgcccgctgcggcggtagagggactgctggccaccgttaagcgggcagtacttgagcgtatgggcctggtcaccggtggccccgcacacgggacacacgtagtgcctcaggatgggacacaccaccacgccatccggtgtcttcagctggtgtgaggagtagacgtggcgggactccccgttgtgcttgcagaagttgcacagggtccccaggcccccgttggcccctggcgcccccagcccctgatcctgccccagcggaggcccgggacttggctcctcaatctcttgggtctccagcctttgaccccgacttgcgatcagcgcccacaccacctggctcaggttgaagtagtccttccacatgtcgaagggtggcagctgcatggcaccaaagcaggggtggtgggccacaggagaggggctggggctgggggcccgtgggcaagggcaagagcagcaggcgtttcccagagcagaagggagctgcatccccttttataacgcccagagactcttctaagtaaaggtggagcttaggatttaaagggctcactccctgcccataacccccatctgactttagttcttcacagagatgtggaaggaggtcattcccctgatctctggtcccagctctgctgccaaggtgctctgtgacctctgggaagacacttccattctctgtgcctcagtttccctatctgttcaaagaaagtccatgtctgcaaatatcccccacccctaggctggaggggctgcacccttcatagacttcagagttattcctaatcatcatagcagccaggctgggcgcagtgcctcacacctgtaatcctggcactttgggaggctgaggaaagaggatcgcttgagcccaggacctctaggccagcgtgggcaaaatagcgagaccttgtctctacaaaaaataaaaagacaaaaataataataacaacatgacctgatttattttatttatttatttacttgagacggagtcttgctatgtcgcccaggctggagtgcaatggcacgatctcagctcactgcaacctctgcctcctgggttcaagtgattctcctgcctcagcctcctgagtagctgggattacaggcgcccaccactaagcctggctaattttttttttttttttttttgtatttttagcagagacagggtttcaccatattggccaggctggtctcgaactcctgacctcaggtgatccacctgtctctgcctcccaaagcgctgggattacaggcgtgagccaccgcacccggcctagtattttcattttacagagaaagatatgaagcttggagaggttaaggaatgtatccaaggtcacacaacaaggaaatggcagagtcgggtttcataatcactctgggaactgggaattgatgttaaaagtggcagaggaacttggcacagaacaatctcacttagaatgccccctcttgggctaggcatgctggctcacgcctgtaatcctaatattttgggaggctgaggctagagaatcacttgaagccagaagtttgagaccagcctgggtaacatagtgagaccctgtttctacatataatacaaaatcagctgggcatggtggcatgtgcctgtaatcctagctagtgaggaggctgaggcaggaagatcacttgagcccaggaggtttaggcttcagtgagccatgattgtgccactgcagtccagcctgggctacagagtggaccctgtctttttttttatgagatggagtcttgctctgtcacccaagctgtagtgcagtggcacaatcttggcttactgcaatctccgcctcccaggttcaagtgattctcctgcctcagcctcacaagtagttgggattacaggtgcccaccaccacacctggctaattttttgtattagtagagatgggattttgacatgttggacaagctggtctggaactcctgacctcaggtgtgattcacctgcctcggtctcccaaagtgctgggattacaggcataagccactgcgtctggccaaccctgtctctctaaaaaaaaaaaaaaaatagccctttcttggccccatccattgtcttaaatccttcctggcctttggaacgagcaaaagcctcatctcccgcccaccgcacctggggttcttcttccacccacagtctccatgggccaccttgatattcaacacatagttactgaggctccatattgggtgctggaaattcagcagtgaccaaggctaccttatgcctgcttcatgaacgagttcaggagagcgaccagtaaatgagaaaacgctagactgtaaagacctgctggcctgtgaaccgggtgttctaagagtggctggctcaggaatgggacttggaagctgagaccactaagaagaatcttccaggaagaggaacacaggatatggaaactgtggctgggtgtggtggctcatgcctgta

SEQ ID NO: 1560737 - DNA, 4001 bp, Homo sapiens
acctcactgggggccaggcatggtggctcaagcctgtaatatcagcacttcgggaggctaaggcgggtggatctcgaggtcaggagttcaagactcagcctggccaagatggtgaaatcccgtctgtactaaaaatacaaaaattagccgtgcgtggtggtgggtgcctgtaatcccagctactcgggaggctgaggtaagagaatcgcttgaacccgggagacaggttgcagtgagccaagatcgcgccactgcactctagcctgggtgacagagcaagactccatctcagaaaaataatcaaataaaagaaagaaagaaagaaaacctcactggggccaggcgtggtggctcacgcctataatcctagcattttgggatgcctaggcaggaggatcacctaagccgtgtttgagaccggcctgggaaacatagtaagaccctgtttctatgggaggaaaaaaaaaacacaccaggaatggtggtgcacgcctgtaattccagctactcgggaggctgaggcaggagaatcgcttgaacccaggaggcagaggttgcagtgagccaagatcgcaccactgaactccatccagcctgggtggatagagcgagactctatctcaaaaaaaaaaattaaaaaaaaaaaggaagaaaaataaattgataaataaataaaataaaagtcttctttctgcatctataataaccctgcgggccagatgtggtggctgatgcctgtaatcccagcactttgggaggctgaggagggtggatcacgaggttgggagttcgagaccagcctggccaacatggtgaaaccccatctctactaaaaatacaaaaattagctggccatggtggcaggcgcctgtaatctcagcttctcaggaggctgaggcagaagaatcgcttgaacccggaaggcagaggttgcagtgagccaagatcatgccactgcactccagcctgggtgacagaaagagactctgtctcaagataaataaataaatacataaacaaactggctcggtgcggtgctcacgcctgtaatctcagcagtttgggaggccgaggtgggcggatcacgagatcaggagttttgagaccagcctggccaacatggtgaaaccccatctctactaaaaatacaaaatttagccgggcatggtggcaattagccgggtgtggtggcgcgcgcctataatcccagctacccaggaagctggggcaggagaatcgcttgaatccaggaggtggaggttgcagtgagccgagatggcgccactgcactccagcctgagcaacagaaagagacctgtctcaagataaataaataaatacgtaaataaaatcaactgctgttctaagctctctctaaggtcttcccctaacccttggaggtgggtactggggctaatcttacttcacaggggggctcagccactaccctcggacaggtcccccccagccacctgtgcaggcacctgctcctcctcctcctcctcggcggtggcctgtgtcctgtgtcttcgccttgtcaggccggaccagcttcttgcctgccgagtttcgggtggtgtggctgtagacggaggtgtagccctggccagtaagtgggcagaagcgtcgggtgtgggcgcgctcacgtgtggcgccgcactggggacacacgtagtcccgcaggatgggacacagcaccctgccagcctcgtccttcagcacgtgggactggtagatggcccgggactcgccgttgtgtttgcagaaagagcacaggcgttcgggagctggcgaggactccaggctgcgcttctgatccttgggtcccggcactggcaccgactccggcgctggcatcggctccagggctgacaccggctccagcattggctctggctctggctgggggctcagcctggtttcaggaccctctttcccactcagagccctaaccaggtgtgccaaacccaggtaatctgtccacaggtcaaaggtccccatagctgggcagcatgtgccaggcggaaggagtcacagagacaagtaaccctgcctggcttaagctccctccttctgacccctctctgctgccccttccttcccctctctggagcctgggagtctgtgctggccgaccctccttttacctccaagggggtgtgaagagggaggagcaggctgtgggaggttccttattgtcacaggggggcctggtgccccactaatactcctcctaaagggctgtatggcctctggctgtgccgggggactacaggacacagggtgtgtgggggggcatcctgcgaggtgcaccacagccccccgtacacacctccagggaattggggggctaccctgcctcccctccttgtaggagtccttagccctccagccccactggaggatggggagaatgggttggaaaccccacccccaaagactagcagttaccagtaacttaaagaagttaacttagtaacttctttataactttttcttccttcccctgggcgggggagtggccaggtgcccctgggttctttgtgtgtgtgtgtgtccaggcgggaggttgctgatgctccagctgtctctgaaaggagtgtggtagtcccaggctcatgggctggttgcgggggtaggggggaaggatcatgccccccggcccccagctctggtctccctccaagagttttcacatcggttgtcttagtggaacccccattgaatggatgagcaaactgaggtgtgaagccacctgcccatccagttatttataaagacatgcaccaggccagggagtggtggctcatgcctgtcatcccaacagtttgggaggccaagacaggcggatcacctgaggtcaagagttcgagaccagcctggctaacatggtgaaaccctgtctctactaaaaatacacacacacacacacacacacacaaaattagctgggcatggtggcgggtgcctgtgatcccagctactcaggaggctgaggcagaagaattgcttgaacccaggaggcagaggttgcggtgagccaagatcaagccactgcactccagcctgggaaacagagtaagactctgtctcaaaacaacaacaacaaaaagcaccacatctgcctccttcttctagttactggggccccctgaggctaggtgctggggagggagccctttcctggcgggggctgcagaggggtgagaaagaaccctctggagttgggaggtgggggatagcaagttgggctgttaggaggggacccctagtacctacaggtcttcagtgtcctccccgagatgagatctcagctcagtcccaggaggggagggtgtgctcaggacttggacacagaggagagacgctgtgccgcttacacagctcatccacccatccattcatttaagaaacttttattggccaggcactgtggctcattttgagaggccgaggaggattgcttgaacctaggagttggagaccagcctgggcaacgttttgagaccctgttcctacaaaaacactttttcgaaataagctaggtgtggtggtgcgtgcccgtggttccggctactggggaggctgaggcgggaggatcaacgcttgactccagttattagaggctgcagtgagctaaggtcacaccattgcactccagcctgggtgacaagagcgagatcctgtctctaatttaaaaaacaaaactatggagcactccacggagcagaacttaccacccacatttcagaaaggggttttaggccaggcaaagtggctcatgcctgtaatcccagcactttgggaggccgaggggggaggattacttgaggtcaggagtttgagaccagcctggccaacacagtgaaatctcgtctctactaaaaatacaaaaattagcccactgtggtggcagatgcctgtaatcccagctacttgggaggctgaggccagagaatcactcaaaccctggaggcagaggttgcagtgagctgagattg

SEQ ID NO: 1560738 - DNA, 4001 bp, Homo sapiens
cagtctctccctctcctgacccctcccagacctctccgctcgggcgtccaccttgaacccccatcagctctctgcacgctccgaacctgtttccttctggaagtcacattaacaacagctaacactctcagagatgtaactccacgccaggctcaattctaacactcatagcaaatgggaggtaggtttgatttgtgatctcctttagcagggagactaaacaatttacccaaagtcatgaagtaagtggcagagctacttgggctcttggcacttctaagccactacaatttatcacaggatggtcgtgtcagcttttaggagctaacgtgagttttatgccacgtcatatgtgttagttctgtctcccaggccttttcccatccctcttctcagcatgtctctgtcatccctattactcgaggatcacacagcaggaatttgatcccccgttttggttctctcagtccccctgtctctccctgttatccctccatctccttggccaagccaccaccacgcattcccccacccaggagtctccagcctcaacccaggcctcctcaggcttttttctttctttctttctttttttttttttttttttttgagacagagtctcgctctgtcccccaggctgtagtgcagtggctcgatctcggctcactgcaacctctacctccgggttcaagtgattctcctgccccagcctcccgagtagctgggattacaggtacccgccaccaggcccagataacttttgtatttttagtagagacggggtttcaccatgttgtccaggctggtctcgaactccccgcctcagataatctgcccacctcggcctcccaaagtgctgagacctccacagtcttgactccatcatcccgggttcctccgttcagctgtccttaaactagtcactgctaaccagggccgtactcaccccatgcaccccccacacttcagacgcggctcaccgctcctaggatcatctagccctgagcccctctgcctggtgtcagcccccttcagccttcaccctcaccgcccagggcccacgcaaatccactgctccaggggttgaaaaggtcagtccctcgggcaggcgtcctcagccccaggccccatcactgccgcctgagagccttcaaacagactcccctagagctccgaaaagcctctggacctggcttctctcccggactccctccgtccccccaggccggtcccctccaaggcttcaggacgtactccctcggtccaggttctcccccgcccgctggcctgtcttcggcctgggtccccttcctcgcctcaagatagtgtcgcctcggtccgtgtgtcctcagcccaaatcccttccgccatgtcagaccgtctctcctcaaaccgtgttgccccggcccaggctcttggccctcagcctgcgtcccctctgccgcctcaggccatgtcaccttattgcaggttcctctccgtcccctcggcccgagctctgcgtgccctaacccgccacctccgagcgtgactccttcgtcctctcagcctaggtcccggccgacccctcagcccggttctcacccaaagaggccagagaagaaggactgcgagttcttcactttgcgctccgcctcggccaacagcgccatcgcctccgcttccttcccggaattgtccatggcggccacaaagggactcagcaaagcgcctgaccctgaccctgggaagactcagccgcggccgggccgcggaacacagatcggtaaaactcgcccggctgcgttgacgtcgcaccggcgcgcgtcgcttgcggccaggaaccacgtgactagcgctggccaaccagcggcctcgtaacgccgcgcccgctccgccggacacgcccccaccagccgccgcacgccgcccgtgactcgtgaccccccaatcggcgtcaagagacctcaacgcatgcgcacataccggcgaacggcgctccactctctccccagcgctctgtacctcacctcccacgtgaccctgtggaaggcaatggcagtaccccccgccgaggccccgccccacggtgttgctgctggatcctcctccaccaatcagcaggagccctcggctcgcgctggggcggggggtcccccactcgccctccccgcggaactctggcacagtcagctgaccgcagacactcacgtgacagctcggggcccacgcccgggtttgacagttctgcgcagaacttagtcccgcccccgcggctggtctcgccggtttcttcacttggaaaggcgtttgtgggaaaaggaaaccgttctgctttttcttgctccctctgtcggccagtactagaactgctttggggagaccggtgaagagagactgcaaacaaaaacttaagaggttctctaactctggtttcataaaaaatagctgaagagggccgggcacggtggcttacgcctgtaatcccagcactttgggaggccgaggcgggcggatcacttgaggtcatgagtttgagaccagcccggccaacatggcgaaaccccgctctactaaaatacaaatattaaccgggtgtggtggcacactcctgtaatcccagctactgaggaggctgagagaggagaatcgcttgaaccggggaggtggaggttgcaacgggccgagatcgtgccactgcactccagcctgggcgacagagtgagacttagtctcagaaaaaaaaaaaaaatagctgaagagagcgtgttaaaaaaaaattcagattcgaagatgggcgcggtgtctcgtgcctataatcccagctactcgggaggcgagaggatcgcttgggcccaggagtttgagtctagttcaagtcccgccttgggcaacatagcaagactctgtctctaaaaaaaaaagtttaggctcaaacacacctcctgctgtcccagaaaattgagttgctggtttctgagacagggtctcactctttgggttgttggttttggagacagggtctcggtctgtcgcccaggctggagtgcagcagcacaatcatagctcacctcagtataactttgtagtgccagaaaggaaggaagtattccacacgtgtgctcacacacaaaattagggggtatgccaaaggagccaactgaaagaactcccaatggccaaagctggaacaatttgagcatcaaaataaagtagtattggattataatcccaaacataaagtatccatgagcctatggtcatatagatgaatatagaacaaataaataaaggggggagaatagacaaatagtttgtgcagaagaattccaaataatctgcgtagatactctgctctcaagaaggtgaaggatacctccccattctgtaagtatggactgtgcatagtgacttcctttcaaagaagagggtacaagaaaggggagaaaaagcctaaatttacagtggagaaacctgacattgacatctaggtgattgaggttaacctcaacattgataagtcatgtgattaaaatggctctttacttctgggatctttcaatctaatcatgaaaaaaacactagacaaattccagttgagccacatcctccaaaatacttgcccagtactcctcaacactgttggtgggtgcagtgtgtcacatctgtagtcctggtactttgggaggccaaggcaggaggatcacttgaggccaggagtttgagaccagcctgtccaacatggggaaaccccgtcgctactgaaaatacaaaaaacttagcccggtgaggtggtgcatgcctgtaatcacagctacttgggaggctgaggcaggaggatcacttgtaccctggaggtggaggttgcagtgagcggagattgcctcactgcactccagcctgggggacaagagggagactccgtctcaaacaaataacactgtcaagtcatcaaaacaaggaaagcctgagaaaccatcacagccaaggagacgtgactgctaaatgtaatgtcttacctt

SEQ ID NO: 1560739 - DNA, 4001 bp, Homo sapiens
tcctcaccctcctgaactagctgggaccatgggtgtgcaccaccacactgagctaatttttgtattttttgtagaggtggagtctggccatgttgcccaggctggtctcaaaactcttggcctcaaacaagcttcccaccttggacttccaaagtgctgggttacaggtgtgagccatgtctctggccaaaaacatgacttcttcaggccagtttgatgggcgtgatgtgggggagtctcagtttaaatgtcacatatctggggctcgaagatgggaggagtgtgtcacaggtctggaaaccacagtacctaatcatcagagctcatagtagggtctgcagagacctctcaaaaacatgtcctggccaggcgcagtggctcacgcctgtaatcccagcactttgggaggctgaggcaggcagatcacgaagtcaggagttcaagaccagcttggccaacatggtgaaacctcatctctactaaagatacaaaaaaaattagccgggcatggtgactcacgcctgtaatcccagcactttcagaggcaggagaatggtgtcagcctgggaggtggaggttgcagtgagctgagatcgcgccattgcactccagcctgggcgacagggcaagactccgtctcaaaaaaaaaaaaaaaaaaaggccaggcgcggtggcttacgcctgtaatcccagcactttgcgaggctgaggtgggtggatcacgaggtcaggagatcgagaccatcctggctaacactgtgaaaccccatctctactaaaaatacaaaaaattagccgggcgtggtggcgggtgcctgtagtcccagctgcttgggaggctgaggcaggagaatgatgtgaacccgggggacagagcttgcagtgagccaagattgcgccactgcactccagcctgggcaacagagtgagactcagtctcaaaaaaaaaaaaaaaaaaaaagtcctgagaggagggggaggggtcctcaatctagagtctcagtgttgtaagatctgggacttaaaagggctctgggaccggacgcgggggctcacagctgtaaccacagcacttttggaggctgaggcggaaagatcacttgaggtcaggagttcaagacagcctggcaaacatggcgaaaccccatctctactaaaaatacaaaaattagccgggcgtggtggcatgtgcctgtagtcccagctacttgggaggctgaggcaggagaatcacttgaacccgggaggcagaggttgcagtgagctgagatcgccccactgcactccagcctgggtaacagagcaagactctgtctcaaataataataataataataaataataataataataataataataataaaagggctctggtcagccaggcgcggtggctcacgcctgtaatcccagcactttgggaggccgaggtgagcggatcacgaggtcaggggttccagaccagcctggccaacatggtgaaaccccgtctctactaaaaatacaaaaattagctgagcatggtggcgcgagcctgtaatcccagctacttgggaagctgaggcaggagaatcgcttgaacccaggaggcagaggtttcagtgagctgagatcatgccattgcactccagcctgggcaacagagtgagactccatctcaaaaaaaagaaatctggtcttaagagatgtcagagtggagcccttaggggtgacagcctggtttagagatctggaaagctgagaaagaagctctagggatcctgggtgccaagtttggggatcactgaactgggagtcctagacttaaagggcaagaggcagaaaatccctcctaaggttggggtggtagatggggtcaccataccggatcagtgtggccccggaaggctccacattcagcagaggcagcagcagcagcaggggttgcagcagcggtggtggagacatcgctggggacctgggtgtgaacccaggtgtcctggggcctcattttctttcccctgtgactccaccctgttcatgccccacctccaggtttagaaggagaccaggacatgaaatctgtccgcaggtgacgcagtgggacaaggatgttttttgaagatttgtgcagagtatttttgtagggttggcagaagtagcatcctgtgctcctggtgctcctcactccctacttgggtggcagtggtggtggggtctcctccaccgtcaccacctcccacccccccatccttcagctgctgtcagttttacttttaactttcacataacttttctgagacttattaaccacaagtgtttccttggccaagtgggagagaccagcaggtatctgtgaagggcctgggggaagggagaaaggacatgattagacacctgccctcacatatgaagtgggcccgcatttcaggacccagtctcttactgttttatttgtaggtgaagtatgtttcttgttgacaacagatcattgggtattgttttttgtttgtttgtttttgtttttgttttttggtttttttttttttgagaccgagtttcactcttgttgcccaggctgggattacaggcatgcgcaaccacgccccactaattttgtagttttagtagagacagggtttctccatgttggtcaggctggtctagaactcccgacctcaggtgatccgcccgcctcagcctcctaaagtgctgggattacaggcgtgagccactgcacccagctgattctcaattatttcaatctctttgttaaatttatgtgatggaatctgaattccttctgtgtgttagcttgaatttctttgagtttcctcaaaacagctattttaaattctctgtcggaaaggtcacatatctctgtttcttcaaggattggtccttggtggcttatttgatttgtttggtaaggtcatttattctggatggccttgatgcttatagatgttcattggtggctgggcattgatgagttatttatttatttatttatttatttatttatttatttatttagatggagttttgctcttgttgcccaagctgcagtgcaatggtgtgatctcagctcactgcaacctctgcctcccaggtgcaagtaattctgcctcagcctcccgagtagctgggactacaggcacccgataccaccctggctaaattttttttttttttttgagatggagtttcactcttattgcctaggctggagtgtaatggcgccatcttggctcactgcaacctctgcctcctgagttcaagcgattgtcctgtctcagcctcccaagtagctgggattataggcgcatgccagctagtttttgtatttttagtaaagacagggtttcatcatattggtcaggctggtctcgaactcctgacctcaggtgatccacctgcctcggcctcccaaagtgctgggattacaggcatgagccaccgcacccagcctacacccagctaatttttgtatttttagaagagacagggtttcaccatgttgtctagcctggtctcaaactcctgacctcaggtgatcttcctgcttcagcctcccaaaatgctgggattagacatgagccaccatgcctggccatgttaggtatttattgtagtctttgcagacaaggcttgtttgtacctgtcctttttggggaggctttccaggtattcaaaagtacttgggtgttgtgatctaagccatgtctgcattagggggctccccaagcccattaatgctgtggttcttgcaaactcatagaggtactatcttagtggtcttagataagatccagaagatttatctggattaccaggcagagactcttgctctcttcccttgctttctctcaaacagagtcagtctctctctctccctctctctctctctctctctctctctctctctgtctctgtctctctctctctgctgagctacctggagctgggagtggggtgacacaaacaccccatgcctactatcactgggattgcgctgggtc

SEQ ID NO: 1560740 - DNA, 4001 bp, Homo sapiens
ggccaggaaggaaaaggagtcattccactctgagaagctcaaacacaacagacttcacactgctgacgggtggacagaggccaggctcctcccctcggcaggcctctgtttctgggcccagggtggttgaggactcactgagggagagcaggtaaaagaacccgcagacagtaggcgatcatcaggtgctggcgcccctccctcctcccctgccctggctgtcagtctgtagcttcacaggtctttgctgaattccctcaccagcgtgtagcccaggcagccccagcccccctcggcctggtagccacagccctccagcatccctcccaccccccaggcggccacagccacggggaccacgagccgggcccggggctcccccatgcccccagcccaggcccgagcccgggcctccgcgaaggccagcagcctcctgcccacgccccggcggcggtgccagcgagagacagacaggcgggtgacccgggccccgtcccctgcatttgtgccaggggccagagccaggaccccacacacgtcaccggagccccgcacggccacccaggggccccccaggccacccggcggaggcagcgagccccatcgggcccgcaggcccagcttcacggcggccacagccaggaacaccggcaggaggagggccagggcgaaggaagccaggacaaagcgcaggccgctgctggccgccgccaggaggagcagggccggcggccgtgtcaaggcatggagggccacgcggttttccgtgtccttcacgccggcctgtgggcaggaggggtggctcagccatccgaaacgctagggcctcctggacaaagagaggaggtagaccctgcccggggcggggtgagagctcccaaatgggaagggaaggcagcacagtccgatgttcagtgtggcacactgggtatggagtgaatgaatgaacgagagcgaatgatggatggatgagtgaattaggagctgtgggggcactcaattcagtagcaatgccgcagtgaggccccagggaagtaaggacagggaggttgcctcaggctggagtggaggctggagggaggctgctgggctaggttggggtgctgggctgtgctttgaagagttggggtccgaggcacagagctggctgttgtgctggcgtgcacagccgactggagatgggagaccagggagggcgttggtgctggggtcccagtagggctgggggggtgagcccccacctgccacacctgctgtggttttcagcagcagggcggctgaggctcaggaggaaaagatcccgctccaggggtccaggctggctcaggtgggtgggagggggtggctgaatccacttgcaattcccccactgcagccactcccaggccccctggggcccctgcctctcaccttcagcatctccagcaccaggggcttctcatcttccctcatctcccgcactgacaggtggctgggggccatggcaacccccaggccccggccccccagaagggagctggcgtcgtgcacctggtgagaacataagtaggtcagcgtcaggggggcacctctgtccccaaagctcccccgaggggtagggagcagcaacggcacttcccagatcaggacactgagaaccctcggggcccccaagcgaggatctcggcaggacaggcgccccccacaatactcagcgaccttgctaaagtctcccgggatcccccctcccccgtattattcagcgatctacactcccaaacgcgctgcggacgccaacactgcagcacggggctccctcccaggcactggggtccacgaacaccctccccacatgccagagaacggaccacgctcgctccaccccggtccccagcgccccctcccccacagtcgtccccgtcccgcgccacaagaacaaggaccagcaagcacctgcaccggtcgcctttggtccttcgacaaggtttcgggagcgggtctggaagggggtcgcgggcggaagtgacgtcagaccgcgcgcggtggggcggggcggcgcccgctccgggccgtagcaaccgttgctaagctccccggagggcgggctgggaggaaccgagctgtgaccctgcggagggccgggaagcgacctctcctatccctagagaaggagcaacggggaaaggggacctggggaagaacgggagcggaagccggcaggagacgggcggcgggctggggaccagcgcgagctcccgccccacgttccctcgttgctgagcaacctgagcgccgggcggcgacgccagcgcgtggattctcatccgtgccggggccttcgcgggaggagccggccacgctcagcatcctggcgcccgactcccccatccccagggaccccactccacccacggggcgcccggggtcgcagaacccttccgcataaggatccccctacttctcacacgaggggggcagcggggcgacctacagtgaacaagtagcactccctggagtctgatgtcaccacctccccactataatgacccctgcggccttttttggtttcaggacaggggaactgagccctacgtagtggctggccccaggatgcagaacaagccatctgcgacccaggacgcaagacttaagactccacgctcccaggcgggggctaggaccatgactttgcccccttccctccccccaggaaaacaaaacacaggcggggagactcgggtctttattagcaagcccagcctgcggcaccctgccccgccccggctggcagtgagtcggggtctctgtgcggggcgggaggggaatcactgcctctcctcaaaacgtgtgcaccagctggactgcgggtagagtctggacaatctggatggagggcaggccctgaggggtcataacaccaggcccagctcctgcggggaccacttgcaccatctgggaggctggagccccggggagccccgcggggcccgaggctgggcctgacggcggtggggccaggagctgcagcgtggcggtgcctcctccagtgttgctgctgtccagcagctcagtggctggggcgctgcggatgatgaggagtttctgtccgggtgggccggtggcaggcggctccgtcagcccaggaggaagtgtttctacctcctgtacgcagagtcgagtctgttcgccatcggccccgctcagcaccagcacgctctgcaagccctcgtccgtctggagtgtctcaaagaggacatcctggaccacaccagtgctggcctcgccatcccccgcctccccggggcccgggccagtgagcaactcctcagctgccccgctctgaacaaccagcaggttgggtgcctcagtagccacagctcccccactggaattggagagctggccggccacgggctggagctggaccgtggtcacctcctgtgctggctggagctggaccgtggttacttcctgtgctggctggagctggactgtggtcacctcctgcgctggctggagctggaccgtggttacttctggggctggtcggaggggctggagctgcaccccactcatttcctgtggccctgcctccccaccccccacattctgcagaacgatgaggctctgccctgtcccgctggccccagcgctggccgctccctgcacccctagacccccagggcctggcagccagaccactcccgccccctggcccgctttccccactgcccgcgggccctgccttgcacggccgcccccagccccagcactggaggagggcagcaggatgagcttgggaggtgcgggagggggcggaggtgtagggggctgcacgctgctggggatcagctggaggccctgggcagtttgcaccaggaggaacgtctgagagttgggcgctgctggccccaagctcggggcctgggccgtgccccccgccacctcgagggagagcgtggcctggaggtggggcaggacgtggacatcttgggtggctggcggggcccgcgcagcagcca

SEQ ID NO: 1560741 - DNA, 4001 bp, Homo sapiens
atctgtggatgtgtgtgagtctgagtgaccctcagcagggggctgtgcgcacatgtgtgtgtttctgacctgagagtcagggtgtattagtgtgcatgggtgtgaatgtggaactccgtggaggagaaagggagatgggctcagtcatcatcccgggcttccccttggggatttcaacccctgctcaagctttccctgttagcgccccaactctgaacacagaccacgtcccacacccccgtgccaagggtgcacactgccaaccgcatggaaagaacccttggcccctccagatacacaagcgggacacacacagccacgcaccccagacacagaccctggggaaacacacactcacacagattcacagtgacattaacaaagagagacaatatgggcacttacaagacaggcggcgtgtcttctgcacaaagacacacacccacagtctcgggcccccccccccccacataaaccccttgatgaacggaacagcatcagacatagctcctcactcacacggcgatgccagcccctggcacaaaccgagatggataattgtggccttggtgaccgatggacacccatcattttgccacatggtgatgtggccctcggcacaagttttctgacaaagacacaaccacagtcacatcagactcacaggggaccctagaacccctgggcatactccccctccctgcctgtctggggtggacacacacacaaaacccccatatccttgagggggaacttgatttcagaatgtccatcagctattgcgacggctgggttctggggtcccacagtgcacccaccccttcctgcctgccctgcccccacgtcccccgctggggcccagagccaaccctctccctggcctggctgtttctcattgatgctgcctgagaggaacaaagccccacgcgtagggatgggggtctctcctgcccagacagggcccttacttcccagccccttacttcccagcccctgtgcccccaaaccaagccagcgcttccacatgtgtccatatggacaggtggaactaaagggggtgggggtaggggtctgtgtcatgctgtaaggacgtgggaggctgtgaaggtgctgggggacagccccccctctgagctggtatccctcacaggtcctggggatccatagctggggggtctaggggacccccacccaacattcacctgggacacccagtgtgttccctgggataagggacaacacctcaacccaaggtctaagggaataacggggaaccacgttgggatggggacccccaggacctcctccctgagtcagaacgtggtgaccggacctgacccaaaaggacagggagatggcagggagccccttccccatggccgttcgctctcagcgcagatacccttccattgggcacagggtgatctgggggccccctccccactgcagtccggcccggaatcctccattcaaccgcaaattgggaatccctacttaaaatcctggggtgtctcggctgagatacgggggtgccctgttccagagtcccccattcggcatctgggtgtcctcttcttccctccaaactcggggggcccctcccctagccctgtttcccattgctccctcctcaaccctgagacccacccccagcccggccccctccccaccggggggtagtctccggattccgcggacaaccttcctccccaaatgtctgttcacctagcattcccaagccccctcccagttcgcgctccctcctcaacctagggctcccctcccccgcttcagccccctccccattctggggacttctccctggtctcaggtcctctccctaatcctgagctctgtctctaatcccgaagtcttctcccgcaacacggccccctcacggatcccccacctggctcctagctcggacgcatcccggggcggccgccgggcacaaaggacgctgcgctccgactcagccagctccgcgccgggtccagcccctgcgccctgcgctccgctggccccagcgccgcctcagtgcttataaaggggccgcgagggctctctgcgcatgcgcccccgccagcccgaggcctctggctgcgcgagggagggggctcccctgcctaaaatccccaccccgcccattttttggacactcaccgcacccaggagaagatggcatcgattctcctcccattctctttgccccaggaaccgcgttaaacgtccccattatgccccaggatgaggccgtcccattttacaggtggggaaactgagccccaaggaggcaaagtcgcttcccaaggtcacgcacagaggcagagctgggattcgaacctcgccctgcctgattctccaggactcacgttcaaagcagttttggctacaattactggtttaccccatttacagagaggaaactgaggcacggacgagacggggagactccttgttcacacagctggtaagaggcacgcagggtgggagtccaggtgtgtgacacccccgagctgtttccagcaactacagccagattgtatcattcattcattcacctttgtctgatcagcatttatgtagcacactctatggactgggtactgctgttgacacatgaataattttgctttatgcagaggcataggcatgtccctgccatgagacatgagaccccaatctttttttttttttttcagacggagtcttgctccgtcatccaggctggagtacagtggcacgatgttggctcactgcaacctccacctcccaggttcaagcgattctcctgcctcagcctcctgaatagctgggattacaggcacctgccaccacacccagttaatttttgtatttttagtagagatgtggtttcaccatgtcagctaggctggtctcgatctcctggcctcaaatgatccgcccgcctcagcatcccaaaatgctgggattacaggcatgagccaccgcgcatggccttgaattacacattttaagatggtgagttttatgttatctgtatttgaccaccattaaaaatatggtaatgagggctgggttcggtggctcacacctgtaatcccagcactttgggaggccaaggcgggtggatcacctgaggtcaggagtttaagaccagcctggccaacatggtgaaaccctttccctattaaaaatacaaaaattagccaggcgtgttggcagacacctgtaatcccagctgctcaggaggctgaggcaggagaatcgcttgaacccaggaggcagaggttgcagtgagctgagaccatgccattgcactccagcctgagtgacagagtgagactccgtctcaaaaaaaaaaaaaaaaaaaaaaaagccatgaggagggaaatgtgcccagagagggcaggctttgcccctgccttccttcctatggtcgtggtgtttctgtgctgagaatgggctcgcagcgctccaccctgggtcctatatctgtgagtgtgtgtttagcatctctgagggtgcgtgtccatctggtaggaggataggcaaatgagggacaagatagcttccacaaggttatcaaagaaaggaggccttggccaggtgccgtggctcacgcccataatcccagcgctttgggaggccaagaggacagatcatttgaggtcaggagttcgagaccagcctagccaacatggtgaaaccccatctctaataaatcaaaattagggtgtggtggcggacgcctgtaatcccagctactcgggaggctgaggcaggagaatcgcttgaaccctggaggcgcaagttgcagtgagccgaaattgggccactgcattccagcctgggcaacagagtgagactccatcaaaaaaagaaaaaagaagaagaaaggaggccaagcaccgtggctcatgcctgtaatcccaacactttgggaggctgaagcaggcagatcacctaaggtcaggagtttgagaccagcccagcccagccaacatggtgaaaccctg

SEQ ID NO: 1560742 - DNA, 4001 bp, Homo sapiens
aggatggagacgtgtccaaggtcaagcagcaaacatgtggcagagccaggatcccaaccctggcctgtgtgaccctgagcctccaagtcacaccagctcatctactgtgcaggagcaaggctctgtttcatggaggacaggggcctggggtgactcttcccctcccagggaaagagccttagaataattacaacaataacaagaatagccaggcgcggtggctcatgcctgtaatctgagcactttgggaggctgaggcaggcagatcacttgaggtgaggagttcgagaccagcctggccaacatggtgaaactccgtctctactaaaaatacaaaatgagctgggcatgatggcgcacacctataatcctagctactcaggaggctgaggcaggagaattgcatgaacctgggaggcagaggttgcagtgagctgagattgcgtcactgcactccagtctgggcaacagagtgagacttcatcttaaaaacaaaaaccaaaaaccaataatagctgctattgactggtgctagccagacctggccgggccctatgctgtgtgttttacaagcattctctcttatgctaaccctgtttacagagcaggaaatggaggtccagagaggccaagtcagtttctccaggtctcacagtgaggaagggtggagcagggaatggagtgtaagccacactggccctggcgactcacctttggttctgctggagcttttcagttctaatgtaccagccacggaaattgcctgcaggttggggagcaaagggttaggacaccccaacgctggaggaccctccccaccctcagcaacctggccctccaagcacttacccagagtttccaggggtcgctgggtgggaccagtagggggtgctggctcataaatgttgatgcctgaaatggacaggtgagtggagcctctgggcagcccctccatcttccaccgcctcacccctccctacccgcagggctatacactggaagggcaggaatctgtgccaggtcagggaagcccggcagggatgagtgagtcagggctctgggctggggagagggcaatgccaggggtaagtggggtgtggtgagacagacagagacagagggacagagagaagaacccagagaaagagacaggccaagagtttgaaaccagcccagcctggccaacatgacgaaaccctgtgtctactaaaaatacaaaaattagccaggcatggtggtgcatgcctgtaatcccagctactcgggagactgaggcaggagaattgcctgagcctgggaggcggaggttgcagtgagctgagattgcaccactgcattccagcctgggcgacagcaagactccgtctcaagagacagaaacataggcagagggggagagagagaggaggagagagaaagagagatggagaggtgtgagggagaggtgtgagagaggtaggtaagagacatgacagagagacaggtggtaaaatggagaggcacaatgacagaaaaagagacagagggatgcagagaaatgcatagacagagagagacaaagaggtagagagataaggaaacagggaaagaggaagagacagacggtcagggtggtgcctcctggctgctctgggcccttgcgcaccttcggggttgggcgagcgcagcaggttgcggtagagcggccgccgcaacaggagcagcttccaggtgaggcgctggggcagctccaggcccccgctcagcggcccccactcctccagcagcagctgccgggcgtgagcctcggacggctgcgccggctcggggagctcgggggcctccggggctgcgggcgatggcagcgacggcggcgagggcagtggtggcggcgacggcggcggtgaaggcgaccgtggcgagggaggcagctcctggaggctcgcgggcccatcggcttccatcccgccaccgagcgcgtgtccctcacgcacctcctccatccctcgaggctgcgcgactgtcccggtttcacagggctggggttaactgggagcgggaaggggcagggcaccctggctgacatttaagagaggggcgtgtcgggggaggatcttgtccctcggaccctcctccctcagacccaggagtccaggcccctagcccctcctccctcagacccaggaattcaagaccccagcccctcctccctcagacccaggagtccaggcccctagcccctcctccctcagacccaggaattcaagaccccagcccctcctccctcagacccaggagtccaggcaccagcccctcttcccgcagacccaggaatccaggcccccagtccgtcctccctcagatccaggagtccaggcaccagcccctccttcttcagacccagaagtccaggcaccagccccctccttaggtccccagacttcctgccccaattttcccagggccagctgaggacccagcgtgagcctgacagagcgtgtgactaatgtgctaatgccagggctccgggctgtctaatgggacccgtgcacctcattaagatccagcatggcaggattaagaggctaattaacgaagacccccctcctccccctccccactctgcagagggggagtggatggatgagctgaggtgcaaagggaaggtcctgcctctgccacttccttctctgtcctcacctgggacacccccttggggccctgacacatactgtccagaaaaccaaggtgaggagagcagagagacacccaaaaccagagatgaggagcctcagagatgggggaccccagggaggcacaaagatggcagtgagagggaagcagtgatcccaactgggtgttctgggggcctgcacccctgcctgggactggggtggggggctgcagaagcctcccccatcagaggtcacgaggaggtgggagcaagggacggggcacaggtggggacaggaggtcaggtgtggaggaagtggggtggcagaggaacctgtagcgccagattcccacagccacttcctgcccgtggccacatccctctacctggcccaggtaagctcagcactgagcgcttgcttctctctctctctctctctctgatggagtctcactctgtcacccaggctgaagtgcagaagcacgatctcagctcactgcaacctccgcctcccgggttgaagtgattctcctgcctcagcctcccgagtagctgggattacaggcatgtgccaccacacccagctaattttgtagttttagaagagacgaggtttcaccctcttgatcagactggtctcaaactcctgacctcaagtgatccacctgccttggcctcccaaagtgctgggattacaggcgtgagtgctttctactgagcgcctctaagttcatttcattctcctacaaagacaaggtgggtgctactatgactggcattttataggtaaaggaaaagtaacagcaaacatgtgtgtgcagctgtgtgctggcggatgccctctgggacgggtctttccaatacaacaaccctgtgaggggtgccatggaaacagaagctgccttcccaggctgggtcccatatagtcccagataactccacatgctttcacaggcacttcctgccccaacgctcagacactcacagacactcagcgggtgggggacagaagtcacgccccagtgataatgatcatgtaattgaggctgccctcatgccaggcattgcactaagtccattagttgcaatggacttaggtaattaattaggcaattaattcagtctccacatccaccctaggaagtagcatgactaggaagtcatgtgcatttagcagatgaagaaactaggcacagagaggtctagtaactcacccaaggttgcacagctggtacacaacgagttagacacactcgcatacagaatcttagagaacatacacagggacacagattcaaattgcccccaagggctgagtgtggtggctcacaccggtaatctaacactt

SEQ ID NO: 1560743 - DNA, 4001 bp, Homo sapiens
aatcccaagcagcacggaaaacgcggtcactgcatgaggagcctctggccttccactcccaccctccagagcctgggccttgggtttatacaccaccactgtggccccagggcgcttcccctggacactgtggacattagggccggatcgttctctggggtggggccgtcctgggcactacagggaattgagcagcgtccctggcctccacccactccatgccaggagcacccgtggtcgtgacaaccacagatgtccccagacatcacccagcgtcccctcggttgacaacaatggctctaagtaaaaaaatcgtaactctggggcaaaatgggacctgaggccaaagtctggttccatctccagagatgggctccccaagggctggcagaagctgggggtccccgcgcctcaggttgagcctgagatgtgacgagagggaccaatccaagagaatccgggctgggaactaagggggccaggagaacaagcggacgggactccttcacagggaaggccaggccttgacttccagggacctgaggggccaggctgaaaagaagaaaaaccagggaccaggttctggaatgtcagggacagctatagccaggcaaagacaaggggatgtggaatggtctagacactggggtcagggccacgacgggagggggcgaggctgttgagtgggagacttgcagaatgcaagggcaagggggtgcgaatttggaaagggaagaggaaatcctggaaagatggaacaagtggggttctgggaagtgggtgtgaggaggctgagctgagggcgtgggtatgcatcaaaggcgggacagaaagggggtcaaagggaaccccaggcgagtggactgaactggggacgtgggaggagaccagggaagctgggctagcagattctgaaacatgactcacgaactgggaccagagagcgtcaggggtctggggacaaatgtgcccttgacgtgggggccggtgactagagcgagaaaattcaggggagttgaatttgggcactggacaaaatgcacttggcacccagggccgtgggagggggtggggaatgctggaccaccgcgtcgggtggctcagcctggcagaaatcagtgcagggacctttaactccaaacgcagtcagctaaaggcgagaggcctgggaacacggacgtgacccagtgaatccagagaccaaccagatggtctccagaacaggaccctgggagctggaggtcaggacgggagcgtctgctcaagtgagcccggaccaggaagcctaaggggcggagggggcccaggagggagaaactcggcaaggcaggcagacgccggcccagctggggacaggagagaggggacttagggctccagggacgcgggacgcttggcccggccatgggttccggggcagggagacctaggcaggggccgggggctgtgggagcgagcgcggggggtccctgggcgctaggcaaggagagcagggattccagggcgcccgggggtccagggcggcagggctctgcctcgcctggggcctgagcatgggtcgggcagcccaggccggagctagggatcggcctggggatcgccgggccggagtggcgtggccggggagcccggggagccccgagggtgggccggggacacgcaccgtagggctggccctgcaggtcgtactgctgcatgcggtacacggtgaactcgtgcgcggcgtcggcggcaggcagcggcggcgccaccagcagcagcacagcgggcaggaagacgatgaagccgagcggcagacaagacgccttcagcatgttctccagcacctcgcccgcttcctccagcatcctggccggcggcggggccgcgcggggcggcagctgggacgggacggcggcggcggcggctcccgcggactcacctcggcatgggtagccgccggggtcctgcgggcgccgcgcggggcagcccgcactcgccctgaggtcctgtgggcaccgcggcgaaccgccccgccagccgcgctgcctgtcgggaattgtagtccgtccgtccggcgctcgcggagccctgtgggagttgtaggcccactctggaactcccggaaggtgcggcaggctgttcggctaataccgttgaggtttcacataaactccaagtcataaaatgcaataaaatgctttaaaaaactatttcgcgatatcactttcttaaccttgtctttggcgttgggggagctagggtgaggggcgaaaggtggggacaggacgtgaccttgcgacctggaaggaagttggggataaagagaaaaggaagtgcctgcctggcgcgctaggtcttctgggagttgtagtcccgtcaaacacacaaagggtcacgggaactgtagtcgtcctggcagaaattgctgagaaaaacaaaaatcacttaaaactcccgaggatgtagatgtcaaactccacgaaggcaaaaacttttgtctgttttgtgcatatgatgtatccccggcatctagcacaagacctggcgcacggcgggtggcctataccatttttgaatgaatgaatgaaaaatagaaagtcatgatagtcagttcctaagggaggccgcagtgggttgtgggacttgtagtctggaacctgcggtttgtgcaggggtcggtggcaggtatttatatttatctttattcatatttggggcatacttatactaaaaaagtatttgttgttcatcagaaatttaaagttaaaacccagtgtctcagggctggaggtacctaaggaacgtccctttgtacagatggggagactgagccccagggtgcagcagacagtagccctggctctcagcacgttatcatcccaggctccgtacagctgcctaaggagtcagggcttcctttctgtcccaagtgagaagtggcattggtgccgattaagagcctgggctcaaatcccaactcctccatttcccagctgtgtggctttgggcaagtcgcttcacctctcagagtctcagtttcctcagatataatgataaagaatcaagcactctccctgccagcagcatgtgagaattctgtttgtttgtttgtttgtttgtttgtttttgagatgtagtctctgtcacctaggctggagtgcagtggcttgatctcagctcaccgcaacctccacctcctgggttcaagcaattcctgtgtctcagcctcctgagtagctgtaaattacaggcgtgagctaccgcgcccggctagaaagggagtttctgagtgtgctgctgggtcactgagcacctactgtgtgccagccgtgtggtgggtgctggggacacagccgggaccccagcaaagccacactatccaccgacacggagctcgaagtccaaaggaggaggtggattgtgtgaccaggggtgatgggagctgggatagaggacacaaaggcagctgggagaagcccagaggaggcctagggaggagaggaaatcagaggaggcttcctggaggaggtgacacttaagctgaaactcaaaagatgagccagagcagatgagtgaagaaagagggaaagttgtgcccagtataaagcagagctgtcatgcagggaacacaggcagctgtgggagcctagaggagacctagggaggaggagaaatcaaagaagacttcctggaggaggtgacgctaaaactaaggtacaaagaatgagcaggcagaagtcaagtgacgaaggagggaaggtgcgggctaacaaggcccctttatcagggacaacaaaggaggttaagcgagaagcccccagaagggaaggaccaagaaataattcagctcagccaaagcagggcagagggggcaacagggtcagccaacacgggcccagaaggcagacagagagctccaggcctgcccagactccacttatcccaaattccaccaacaccccaccctgcctgctgtggtccccactaaacacacagagaacaggaatcaggaaaagata

SEQ ID NO: 1560744 - DNA, 4001 bp, Homo sapiens
aaacactgcggaaggccgcagggacctctgcctaggaaagccagagacctttgttcacatgtttatctgctgaccttctctccactattgtcctatgaccctgccaaatccccctctccgagaaacacccaagaatgatcaataaatactaaaaaaattaaaaaaaaaagaataaatgagtagctgtgttcccctgccagaacctccaaacaaggtccaaagaccctgagcaaatgaaaaggcacagacaaaaaatatatatatttcaacacaagtatatgacacagaatatagaaataacttttcctaatcaatcaaaatataagcaacccaatttaaaaataggcaaaagatttaaatagacatttcacaaaagaagatatttgaatggacatgaaatactgttgtgagctgcataatgacattttggccaacaatgtaccacatatatgatggtggtcccataagattataatgaaactgaaaaattcctattgcctgatgacatcatagccttcctagcacaaagtattgctcatgtgtttttggtgttgctggtataaacaaacctaattgtatagcacatacaattatgtatgtatatgtaactatgtataatacttgataataataataaacaaccatattgttaaaaaaaaaaaaaagctaatttttttttttttttagaaaaccaccacctggctgggtgtgatggctcacacctgtaatcccagcactttgggagggtgaggcgggcggatcatctgaggtcaggagttcgacaccaccctggccaacatggtgaaaccccatctctactaaaaatacaaaatgtggcgtagtggtgggtgcctgtgatcccagctacttgggaagctgaggctggagaatcacttgaacccaggaggtggaggttgcagtgactggagattgcaccactgcactccagcctgggtgacaagagcgaaactccgtctcaaaacagataaaaaaaaaaaaaacccaccacctgtgatgggtgagggaagcaaagtgtaagccactgcgcctggcccacaggcattgtttttgaggacattcctcagtcatacccctgcatacaaatatctatctcagaatctgtgtcatggagaaactgactgaggacacatctgctcctaggacgtagagacacggtctgcagacaaccccttgtaggcaaggattgtgatggggatcacccctccttccagcctcctaccgagacaagcagtgtctgagtggggcttggaagagttcatagatgatgctgcatcccggatgcagactgagatcactctccagttagagaaccggacagttacctgttaccaccagatccagcaagttgctgggctctgaccagagctccccaacccgatagatgcagctgtattgccctgccatgcgggagttcatgtccgggatgtagaattggactttgttaatccgctcagggggttttggtctgtccacggcaaaaaggcttccttcaaagtgcagctggtattcaacagccccataatttccctggcaacagatggtcacttgcttttcctttggaaccatgaaatggggctcggcccagatgaacggttttgggagagtctctggaagggaatcagaggctggagttccagcggagccccctccccccaaccttaggctccacccagctgctggccccaagctctcctgggaagccagcaccctgtcccctcaccccagccgtgcttgggtggaaggagcttggcctgaatccggaagagtgaccctgggctttgaaggaaggactcacgctgctgggcgctgatcctctgactcagacacagccctggaagacgggagtaatgagacctgttgcctcccaggcacaccgtgatcccattccccttccacgccagaactcaccgacgcagagcagggcagggagtgtggaagacatcgctcagattctgccggcctagtgctgagcagtggggactgagccgggcgggccagggagatagatacacaggaagtggtgggtgagcaccagcgcccatcaccagagcgctttcacgttgactgctttcatcagaacgttcacaactcccctccgcctctgaccatgagcttacagaaaggccgtggtccctctgacacatctgtggtctagccagcaactctgacaattgtctgctcagcccaaaatgcatttctgggtcaacttctcaattctgcaatgtggaggtcgtacccagagctgactgtgggaagttgtgcccaatcatgcccagaggaaaccccctgagaatcgtataaaaacatagggagtttcacagtgagatactggaacaggaattaaaagaaattacagaatgtgtaaacaaaaactcagttgtatttaagaaaacccagttccccccgaggaagagaaagaggtggagtcctttaaacatgaactgcctgtttttctgtctgtggctagtgagccttatctctccctttcccaggcattgtgaagaccctgtttctcttgccgtgcggctgcaaggtcactagacaggataacctcaagtcgtaaaacatatttttcttgaaaagtaaggaataatgtgatgcatgtctcaattgaataactgcctttgtttcttgcttctgtaatatgcttccccctgcacagatctcccccaaccccacaaaatgcttaaaaggtaaccggactctctgttcgagcctcagtctttttggatgttaatctgactggggccggtgcacctaaataataataataataataaatcctcctcaacccctcggtctctctgattcctaaattatccctcaacaataccatctcacaccagtcagaatggccattactgaaaagccagaaattaacagatgctggtgagattgtggagcaaaggggacacttatacactgttggtgggtgtaaattagttcagccactgtggaaagcagtttggtttggagatatttcagagaactacaaacagagttaccattcagcccagcaatcccatcgctgggtatatagccaaaggaaaataaatcattctaccaaaaagacacatgcacttgtatgttcattgcagcaggattcacaatagtgaagacatggaatccacccaggtcccatcagaggtggactggataaagacaatgtgatatgtatacaccacagaacgctatacagccttgaaaaatcacaagattatgtcctttgcagcaacatggatgcagctagaggccattatcctaagcgagttaacacagaaacagaaaaccaaatactggccagacacggtggctcaggcctgtcatcccagcactttgggaggctgaggcaggtggatcaccttaggtcgggagttcgagaccagcctgaccaacatgcagaaaccctgtctctactaaaaattcaaaattagccgggtgtggtggcacatgcctgtagtcccaactactcgggaggctgaggcaggagaattgcttgaacctggaaggtgaaggttgcagtgagccgagatggtgccattgtactccagcctgggcaacaagagtgaaactccatctcaaaaaaaaaaaaaaaaaagaaaagaaaaccaaataccacatgttctcacttataagtgagagcgctaaacattgggtaaggaggggagcaaggcttgaaaatctacctatttggtgactagatcattaatgcaagcctcagcatcatgcaatatactcataaaaaacctgcacatgtatctgctgaatctaaaaagataaaaataggggttttgacgttggcttctctgtgtacagtatacatatgcttggataagttaattggtttcatcagaatggaatgataacactatcttcttcaaagatagtgttataatgtttcaataaaataaaagtgaaaagaaaagcttttcatttaaagaacttaataagaaaagaaacatttcttttctttttctttt

SEQ ID NO: 1560745 - DNA, 4001 bp, Homo sapiens
cgcccaggctggagtgcagtggcacaatctcggctcactgcaacctctgcctcctggattcacgccattctcctgcctcagcctcccaagtagctgggactacaggcacccgccatcatgcctggctgattttttgtatttttagtagagacggggtttcaccgtgttagccaggatggtctcaatctcctgacctcatgatccgcctcccaaagtgctgggattacaggtgtgagccaccatgcccggcctattatttttattttttgagacaaggtctcgctctgtcgcccaggctggggtgcagtggtgcaaacatagctcactagagccttgaactcctggtttcaagtgatcctcttgtctcagcctcctgagtagctgggactacaggtacgcaccatcatgcccagctaattgttttacttttttgcagagatggggatcttgctattttgcccaggctggtctggaactcctggcctcaagcgatcctcccactttggcctcctgagcgccggattacaggtgtgagccaccgcgcctggcccagtttgtaaagattcttcatcagagggaagaggacttccagctccatctgggacctgatgagtcccaacctgtggctgagaattaaagggcatgatgcccatgaaacgctcaggctggaaggggcaagactcagatttactctataagagaatgccagggccggccgggcatggtggctcacgcctgtaatcccagcactttgggagcccgagatgggcggatggcctgagaccaggagttccagatcagtctggccaacacggtgaaaccccgtctctactaaaaatacaaaataattagccaggcgcggtggcgtgagcccgtaatcccagctacttgggaggctgaggcaagggaattgctcgaaccagggacgtgaaggttgcagtgagccgagatctcgccactgcagtccagcccgggcgacagagcaaggctctgtctcaaaaaaaaaaaaaaaaaaggagaatgccagggcttgcgggtccccttcattcccctgcaaggctaccctcatagtagctcctgatccacctcacctaggacctctctggcggtcccagtaaaagcttcaggtgtccctaaccacccagcaccccctgaccacagaaagacctcatcccaccccaaaactttctcaaacatctgtaccgccctcagatgccccaatcatgactcatgatcccctctaacaatctctaccccgttggaaagtctcgtggtcccttagctccttggacctgataatagccctgtctcactccacaatttccccgagcctggcgatagcttgggaccgcctcagatgaccccagggactagcttgtcgcatgtcacgacctcccagtgctccccaaccctgctggaccccctaccaacatccatttcacacaagatccccccctacgaccgcccaagacaccccgatgacaaccacgtgcgtacccgcgagactcccagacccgttcgatccaaacagcccccagtaaccccacgacctccctgcggcctcggccctccaccctcggggcccggccggcgctcaccagcgacgctggcaatactggtggtgctgtaggctttgcggtggcaatcggtgccatcggggatatcccagtactgacgaaaaaccttcggcgccatagcccgcaatctcgatcccgcaccacggaccccgccagctcgggaagcgcaagggcagccgcggctggctatcgcgagacttctcgggctgcgcgcgcaacctttcgggctagcgggccggcaacaagtgagcaactttattgataggcgcggacatggacatggatcgcgcgcacgcgccggggaccggcctggaggaagagagtagcacgtgcatccccaggccgattcctagagggtgaaactgaggacgactgcgatcagtgcagacagatttcgctagtcccagctcagggagtcctaggttagggactactagaggcggggactatctactaggggaggggccgggctcagactgggacgggcgggactccagttgataggagcaagacatgacgaaacaatgactggggggcggggcatggcggggatgtggccacacccagtgtcagaatctgcatagcgagtggtcatgccctgtggtcagtcaccaagctggagtctgagcagcgtgctactgttttgggccgtggacaggatcaggggcggggattatcgggaaagtgaccaatgacaatacgagaagctcagcgggacgtggcctctgttcaccccgcggctgtcccacgccctaggccggatgaagtacacaggcgcttgacttgggggcgtggctagaattggaggcataacctaaaagggacttgaccaatctgagactgtataagggatgaaggggcgaggccgtgcctggatctacccctgacaggccacaggttcggggggcgtggtcaggcttgctgtttcgcggagtccgggccaatcctggtgttagcttccaagtagggaggggacagtatcgaaggtgtgaccaatcttgtttccagagcctgagttgcgcgagccgccaaaggatgtggccagcctgggggcgtggctgtcaagatcttgtccaatcctagagtgagcccaaactcaggggcggagtttcatgatcccggaaccggtggtagtgtttgggtttgaggagagcacgacccagccctctggggtggggtctagcggggtcagcgaccaatcgcgccgaggtctagtggggcggggccctcccgggggcggggcctgtgccagttccgggccgcctgggggcgtggccgggcctgtacagcagcctgggccatgtcggcgccgccggccctgcagatccgggaggcaaacgcacacctggcagccgtgcaccggcgcgcagcggagctggaggcgcggctggacgcggcggagcgcacggtgcacgcccaagccgagcgcctggccctccacgaccagcagctgcgcgccgccctagacgaactgggtcgcgccaaggaccggtgaggcccggggccggccaggtggacttcaccgaggcggtaggcggaggcagagccgaggctggaaagcgaggaagggcagggggaaccgtgtgcacttgtatagacgctagactgagtatcggattgataaaaacaccaaaaaactcgaattagtaatcagtatgtaaagttgcgagaagtgacacaggtgtggacctctaacttcaaacaggcccactttcccacaggtgctgagcgacgcagggaccacagaccgcccagcgtaggcattgggagccatagcaggctcttcagcaggggaggaggggatcatatcagcattttaacttttaaaatttattattatttttttgagacggagtttcgctcttgtcgcctaggctggagtgcagtggcgtgatctcagctcactgcaacctccacctcccagattcaagcgattctcctgcctcagcctcccgtgtagctgggattacaggcgcccgccaccacgcccggtcgattttttgtatttctagtagagactggttttcgtcacgttgtgcaggctggtctctaactcctgacctcaggtgatccgcccgcctcagcctcctaaaagtgctgggattacaggggtgagccaccgcacccggcctaaatttattatttttgaggcagggcctcactcctatgcccaggctggagtgcacctcgacctccggagctcaggtgattctcccacctcagtctcccaagcagctgggactacaggcgtccaccaccacgcatggcttattttttgtatttttttgtagagacagttttgccctgttgcccagtttggtcttgaactcctgggctcaagcagtcctcccacctcacccttccaaagtgctgggattacaggctaagccaccatgcctatctattatttttgagagagggtct

SEQ ID NO: 1560746 - DNA, 4001 bp, Homo sapiens
ggaaatagaatgcattatattcctccaatgtgttctgggacagcactcatgggccagatctagcctgaagcctcttttttttttttttaatttttggtagaggtgggggtctcactatgttgcccaggctggtcacaaactcctgggctcaagccatcctcccgcttcagcctcccaaagtgtggggattacaggcatgagccacctggctcacaggcaatctgtttttgtagagcccccaggctaagaacactttccatttgtaaatggttgtctcagtaactgaaactttctggccagccaaacccaaaatacttgtcatctgtcccttttatagaaaaagtctgccaatctcagttctgggatacaagaaaaacaagaggaggttggccgcggtggctcatgcctgtaattccagcactttgggaggctgaggctggaggatcacttgagcccaggagtttgagaccagcctggtcaacatagctgcaccctgtctctacaaaaagtagaaataaaaaataaaaaaaccaagaaggggctggggaggacttttcacctcacactgatttttctactgtctgaattattacgtttttaattaccatgctcatttttgtgtgtgtgttaaaattgaggaataatgtgcataacatgtaatttaaatgtaaagtttgatttgttaagagacatgcattctgccgagcacggtagctcatgccgatagtcccatcactttgggaagccgaggtgggtggatcacttgagcccaggacttcgagaccagcctgggcaagatggcgagatcccatctctatagaaaatacagaaagctgggcgcatgcttgtaatcccagcttctcaggaggctggggtgggaggatggcttgagcccaggaggcggaggttgccaagaaatcactccagcccaggcaacagaaccataccgtcttaaaaaaaaaaaaagaaatgtatgtattcactcttagattacgtttaaaagtttctatttgtctgttaacctggggactgagtatgggcgccttttaagttctctttttcaattttctgtgctgagcccgataacaaaatttaacgtgttacttaaacatttgaaaactttacgccgggcatggtggctcacgcctgtaatcccagcactttgggaggccgaggtgggcggatcatccgaggttgggagttcgagaccaccctgaccaacatggagaaaccccgtctctactaaaaacacaaagttagccaggcgttgtggcacatgcctgtaatcccagctactcaggaggctgaggcaagagaatcgcttgaacccaggaggcggaggttgcggtgagccgagatggcgccattgcactccagcctgggcaacaagagcaaaactccgtctcaaaaaaaaaaaattgaaaatttaaagaatatggattcctgtgacaccatgcaggcgggggctgccagcagggaaccactgcatagaacatcttgtaaattccctccaggttccgggttgcggcctcagctttgccttggggagccgcggccttctttgggcctcagtttccccatcttagaaatccaagggtggctgagggccagagcacaggctatgactcagtttaacccactgtaaaacgtaaataactagagggaccgatttcctgggctgttacgagaaggaagaggagctgggaaagacctcaacaaactgcagcacttagcgttattacagaagctatgatggatccccgggctccgcctccggtcacaccgccgggaaaactgaggcccgcctgtgtccccggaaccccgcccccgagccccgagtgcccagactctgagaccccggcgcagagtgatactgacccgacagtcctcgacgcggcaagttccgtttgtagtcgatgggcccatagccccccggcggaggcatgtcctgcttcacctttgacgccgccatactcgcagtatcccacacttccggtcccgggcggaagtgacttactgccaccgccatgatgagtgtggcggaagcacttgagatggtccgcggcacggctaggaagtcccggacagtagtgtaactatccgaccgcgcgggaaagctctggcggcggaccctgggtaggaatgcgctgccgggctgcagctgaggggtctttactcctcttttgcccagacagggcgtgactcgccttggttcttgcattataggccctcgcgttcaccttgcctctggggtgttgcgcaggccagtcagaaactccgagctctcaaaggagccaggtgccccagttaaggccccttttcccgttttcgccccgtctagggactctacgcgaagcccagggctccacgtagtcacgggctgggtacatgatgttggggggcagctgctgctcgaagtcggactcaccccaatccctggaacggattctgctccctggtggtgatgggtatcccttgctagtggcctctcatcggaaactgaccattcaggatgattatgagtcacaaagcagggaggctagggtggccccggggcggggtcccggacccccaccctaaggcggagtgacgcccgcagtcacttcacaaggcaaaaattgttacggggcaataaaaggcacaacagcggccaatgtctggcagtgggcacatgggggtgcgggggtgtaggtgccaagcgccatggcttagacccgagattggagtccggccgccccccgacagcagccgcctcctgccccccgtgcgccctaggcgccaccatgtcgggagacaaacttctgagcgaactcggttataagctgggccgcacaattggagagggcagctactccaaggtgaaggtggccacatccaagaagtacaagggtaccgtggccatcaaggtggtggaccggcggcgagcgcccccggacttcgtcaacaagttcctgccgcgagagctgtccatcctgcggggcgtgcgacacccgcacatcgtgcacgtcttcgagttcatcgaggtgtgcaacgggaaactgtacatcgtgatggaagcggccgccaccgacctgctgcaagccgtgcagcgcaacgggcgcatccccggagttcaggcgcgcgacctctttgcgcagatcgccggcgccgtgcgctacctgcacgatcatcacctggtgcaccgcgacctcaagtgcgaaaacgtgctgctgagcccggacgagcgccgcgtcaagctcaccgacttcggcttcggccgccaggcccatggctacccagacctgagcaccacctactgcggctcagccgcctacgcgtcacccgaggtgctcctgggcatcccctacgaccccaagaagtacgatgtgtggagcatgggcgtcgtgctctacgtcatggtcaccgggtgcatgcccttcgacgactcggacatcgccggcctgccccggcgccagaaacgcggcgtgctctatcccgaaggcctcgagctgtccgagcgctgcaaggccctgatcgccgagctgctgcagttcagcccgtccgccaggccctccgcgggccaggtagcgcgcaactgctggctgcgcgccggggactccggctagaagccgggtggttccagccattcctgcagccaagggcactgggccagggcggcgcacgcgcaagaggcgcgcttcgagggaatatgcgaagctgccgcgtgctgctgcacatgcgctttttcccttccgcttccctccctttcttcccacgggggagtccgcagttgcccttgttcggaatccacgttccccgcgatcccgggagctggaggcgcatgcgcatccgcgattccctgcgaccaggccccgagagggcgagaccagaggggacggaagcattgcgcctgcgcggaactctcagcctctgcgcggagggcgtcccttcccaaccagccgtgggtgccaggttcccggttggaacctgcaataaactcgctgttcctcgcacctggctct

SEQ ID NO: 1560747 - DNA, 4001 bp, Homo sapiens
acaggagaatcgcttgaacccgggaggcggaggttgcagtgagccgagatcaggccattgcactctagcctggacaaaagcgaaactccgtctcaaaaaaacaaaaacaaacaaacaaaaaaaaccatagtacatccaaaacatcacttcgccatgtaatcaacaaaagattattggtagtttacacactctgttatactaagtttttgaaatccagtgtcttataccacctcaattcataccagcaccacttcaaatgctcagtggccagttgtggctggtggctgccatactgaataagtgttcagaaccttaacctagtgcctggctggtggaccagcagtactgacaagacctgggaactcttcaaaaatgcagaatcccatgccccaccccagacctacagaatcagaacctacagtttggccgggcgcagtggctcacccctgtaatcccagcactttgggaaggcagatcacttgcggtcaggagttcaagaccagcctggccaacatggtgaaaccttgtctctactaaaaatacaaaaattagccgggcgtggtggtgctcgcctgtaatcccagctacttgggaggcggaggcaggagaatcacttgaaccctagaggcggaggttgcagtgagccatgatcaaaccattgcactgtagcctggaagacagagcgagacgccatctcaaaaaaaaaaaaaaaaaaaagctggccgggcgcggtggctcacgcctgtaatcccagcactttgggagaccgagttgggaggatcacgaggttaggagatcgagaccatcctggctaacacggtgaaaccccgtctctattgaacatacaaaaaattagccgggcatgggggcgggcgcctgtagtcccagctactcgggaggctgaggcaggagaatggcgtgaacccggaaggcggggcttgcactgaaccgagatcgcgccactgcactccagcctgggcgacagagcgagactcagtctcaaaaacaaaaacaaaaaattagctgggcgcctgtaatcccagctactcgggaggctgaggcaggagaatcccttgaacccaggaggccgaggttgcagtgagccgggatcgcgccactgcacttcagcctgggtgagagtgagactccatcgcaaaaaaaaaagctacattttaacaatcccccgcccccatccctgcaggaactccggtgctaattaaagtgtgagtagggcagttccagggcagagggcagagattttcaatcagcaaggcacattgggatcatacggggattttcacaagacacagattccccagtcccacctccacccaagccaactcaattcagaatgggggagaggaaagatgaaaaggaggaggaggatctggacttttttttggtgctcaggtgttaaggcataagcagggttgagaacgtctcatttagaggggttaagagcgtattgggtaggtggagaggaacgcggggggcgatggtggagaggttataatgggtatggggatagataaggggatgccgtgggggtgcagacacactagaggggacccgagggcggcgatagggctttaggggtacaagatggagggatgtagggggacgggggtggacgatgcaagtttgcgcctggagcactcacgcaccgaggcccccgacgacgaaggacacgaccagcactggctccttgtcccaggcattcttgaggaaggcgccgactcctgaaggggtggcaagaagcgtcacccctgcaagtagctgcccccggtgacctctaaccctctcgtgccacccctgccctggaggagccccctcgtgacttctgcgttcccctccagcacggaccccatcgcttccacccctgccctgccgcacctcagtcccaggaccgcccagaggttcccagaactacccgagccccgtgcgccaccggcacctgcacttactcgcagccatctttgtctccgcggcggcgacagcggcgaggacgcggagcaccctgggagttgtggtccctatgcgcgagaacccgctcccagggctgcgcgtgcgccctggagcacaagtagaggcgaaagcaaggacgcggagcactctgggagttgtggtccctctgtgcgacggcccgctttcggagcctgcgcgtgcgcactcgcgcagaacaaagatggagccgtggaggtaaaggaagtggtgtcaggagcaagcgcaagcctgactttgcggacctgcgtggaatctccttagtctcagcctagaagtcgctccggagtgactagtcctcctgctgcgacccacctaaggcggaacaaaatagtccccattttatagtttatgtatgaaagcccattttacagacgaagaaactgagcccgggagaaggtgaatgactaacctgtccttcgaggtctcagctcaacatcggctcgtcctggaagcgctaggtctcatcccagatgggttaggagctttctgcgggctctcacagtgctctgttaccgccattatagctcagatcacttaagaaactgacctggtctgggccaggcgcggtggctcacgcctgtaatcccagcactttgggaggccgaggcgggcggatcacgaggtcaggagatctagaccatcctggctaacatggtgaaaccctgtctctacttaaaaatacaacacaaattagccgggcgtggtggtgggcgcccgtagtcccagctactggggaggctaaggcaggagaatggcgtgaacccgggaggcggagcttgcagtgagccgagatcacaccactgcactccagcctgggcgacagagcgagactccgtctcaaaaaaaaagaaactgacctggtcttggtctttcagtcggactggtagctgctgcttgagagcagtaacggagtctgagttccctctgtgcctgccaacatggcacagcgagggtctggcacgtaataggttctaatttttttttttttcttctgagattgagtctagctctgtcgcccaggctggagtgcaatggcgcgatctcggctcacagcaacctccgactcccgagttcaagcgattctcctgcctcagcctcctgaatagctgggattacaggcgcgcgcctccacagccggctaatttttcttttttaggagagacgggggtttctccatgttggtcaggctggtctcgaacttcccgacctcaggtgatccacccgccttggcctcccaaagtgctgggattacaggcgtgaacaaccgcgcccggcctagaggggctaatttttatctatctatctatctaacacagtatcacaccaagagcctggcacataataggtgctaatttttctctgtcaaccaatctatcaatcgatcaattaatcacagcaagggcctggcacataattggtgttaatttttatctatccatcaatcaatcacagcaagggcctggcacttaacaggtgctaatttttatctatctatctatctatctatctatctatctatccatccatccatctatctatctttcaatcacagcaagggcctggcacataataggtgcaaatttttatctatctgtcaatcaatgacagcaagagtctggcacataataggttcttatttttaaaacagacagatatctttctatctgtctatctatatttaaagacatggtctcactctatcacccaggctggagtgcagtggcacaatttatttatttattttttagacagggtctcgctctgttgcccaggctgctcttgaactcttgggctcaagcgatcctcctgcctccacctcctgactagtatttgtttctagagttaaataaatgaacaccacaggttatgactgaaccccctgctaatttttccacagtgccatagggctatgacacagtcacccacaggcccccacctcgatactctcttccgtaaatgaggatctgggtctggttttctgatgttgcctcatttcc

SEQ ID NO: 1560748 - DNA, 4001 bp, Homo sapiens
aaaaatacaaaaaattagtcaggcgtggtggcacatgcctgtaatcccagctacttgggaggctgaggcaggagaatcgcttgaacccgggagatggagattgcagtgagctgagattgtgccattgcactccagcctgggcaataagagcaaaactccgtctcaaaaaaaaaaaaaaaaaaaagttgaaaacaaagtttgatacttctaatatttggaattagtcacaacatataggcatttacataaatttcattattttaatgctatttttcttcctttcattataatcctcaatgactgccttacctctgcctaccctttgacttcatagattataccattatccctttccctcaatgggttccatccatactggcctccttccactcaggctctgtccagcctgacactcttagcccttcctgttccctctgctcagaatgttttttcttttttatttttttgagacagagtgttgttctgtcacccaggctggagtgcagtggtgcgatctcagctcactgcaatatccacctcctgtgttcaagcgattctcctgcctcaacctcccgagtagctgggactacccgcgcgcgccaccacgcccggctaatttttgtatttctagtagagagggggttttactgtgtttcactgtgttggccaggctggtctcaaactcctgacctcgtgatccgcctgcctcagcctccccaagtgctgggatcacaagcgtgagccaccgcgcccggtcagaatgttttttcaataattattctttgaatgggtccttcccatcattcaggggactcaactgtcaatttccaaagaaagatctttcccaatcatctgactttacgtagccaccctccagcttccacttattttgttttgtcttcaaagcattccagaacaatactacctgctgtgtttgtttccctactatgcttctccctagaatgtggcgtccatgaaagaatgtggataagaactttcctggttcacaaagttaaacccaaggctgaggtcatacatgacgggggcttgtaaatatcaactaatattttaatataaatgagtctgaaatcaggacacttctgggttcaagtccccgctgccactttttagcttctgagtgacttgaggcaaatgatttcgcctctctggacctcttttttcatctgtagcttggggataacactgactaacatggccacgctgagcactgcaaatctagcctgattgccagtcagaatgcacgcccggcctcgctgtttcaggagggctgtcctccggagttcagcaaggttaaaggcaaacctctgcctccacagcctggcaggggactggtggcaggatgtcagccctccgtttcaggggtctaaaggaacacagatttcgtttttggtggagaaaggacagagccagaggctgggcagcgagcggggcctgctcaccgcttggagatctcctggtagcgtagctgcagcttcccctgcaggtcatgctgtgggaagaggagaggagaggtcggcctgcaaggcaccccaggagagaggaaaggagagggcaagggaccagggatggtccggggatgcgcattttaagggaaggcaggggatgaacactcggggaaacggatgtgggtcctgcaggtgaagagcaaagccagagtccgggcccacagatccaaggctaagaaggtcggggactggggaaatcccaggcctgagtggttcccaggccaggagagggtcccgggctgaaggggtgactagctgggggttcccagggagattcggggagagcgaagggtcccggcttaggagggaggtgaggagcaggagcgggtcccggacacacggagcccgaagccccccatggtgcagccctgtccgccccgcgcaccccggacgcccagttccgcagccgctggatgagacgggtggcggacgccatcttccgtccgcgatactgaagggcgcagccggtgacgtctccaccgctggggctgctgggaaagacgcggcgtggtatcgcgagacgggagtgggcggtgctagaacgtcctataaaggctctccccgaagcacgtgactcctctccgccagaccgccgccgcgccgccatcatggacaccagccgtgtgcagcctatcaagctggccagggtgaggtgggggcccgaatttgggggcagggggagggattagaggagccaaacgggccgggtctgaacccagcttctttcctccaggtcaccaaggtcctgggcaggaccggttctcagggacagtgcacgcaggtaatcgggtgggggcatttggccgactgccggcgacctaaaccctgatgtgacctctaccctgccctaacccctgccagccggaatccgggagccgattctcatttcatcacggggttctgatggttccctttaacgatctgtattctggccccgacacgttctctgaattcatatctgcttcccactccgcggtgcctttccgcggcccgcccttacttcttcctccactccggtggggacccgtaggtgcgcgtggaattcatggacgacacgagccgatccatcatccgcaatgtaaaaggccccgtgcgcgagggcgacgtgctcacccttttggagtcagagcgagaagcccggaggttgcgctgagcttggctgctcgctggtgggtgcaaagaggacacccctttgatagacctttggttggtggtagggaggcttcgttaagcccagggtgagagggtttgggaggcagagtctacatacagagactgacaagagggaggcgggagtttgccaattgctgcggggcctgtcaacatctcatgtttgggtctgtttacagggtcttggatgtcgggttcgaccacttggccgatgggaatggtctgtcacagtctgctccttttttttgtccgccacacgtaactgagatgctcctttaaataaagcgtttgtgtttcaagttaactcaggttcttgtctgggttatacgactagggtttctccaggtttcttgagtggctcccaggcggtcaccgatcctccgcactctggaaatcctggccgtgcggtcttgccaaacgaagcttttcctttttgaggcggggggtcgtgtttgtcgattgcaccctctaccccaaacaaaacacaagcgtagtaggaatgttttattagcaaagaagtttcagagagtgggtggatcagggctctatcacttggtccccacctcaccttggtggggccagagtgagccccttcctgccacagtcaccccaactgaaattgcctttctcttcggccagtgttagcctctgagcaggggaccctggacccttctgtgcgccaaaggctgaggtgactgacgaggagatctccccacagctaggtgtagtgagccagacgaggcagcttactgaacctgggggttctctccattgtcaccgcattctccttcaccaggtgtggctgtctgggagccagggggtgactcgctctggagagaggggaaaagaggggggcctgctgcaatctccttgaggcaggaaacgtgggattcagccccagcctcacttagtggaggttcttttaccatggacccaggctgcctggtttgtatccaacctctgccccttctgacctggaagaggcgcttgaccttcctcccacatcccttccagtggggtgagtacaggtgttcctcagtttacaatgggttacattccggtgagtacatcataggttgaaagtattgcaagttgaaatgtgtttaatacacctaatctcccaaacatcacagcttagcatggtccatcttaagcttgttcagaacgccttagcctgtagttggggaaactcgtctaacacgaagcctgttttaataaagtattgaatgtcttatgtaatttattgaatactctgctgaagtgtggtttttactaagcacacattgcttttatgctatcatgaag

SEQ ID NO: 1560749 - DNA, 4001 bp, Homo sapiens
gtagagacggggtttcaccatgttggccaggctggtctcaaactcctgacctcaggtgatccaccggccttggcctcccaaagtgctgggattacaggcataagccaccgtgcccggcttaatttttgtattttgtttttgagatggagtcttgctctgtcgcccaggctggagtgcagtggtgtgatctcggctcactataacctctgcctcctgggttcaagcgattctcctgcctcagcctcctgagtagctgggactacaggtgtgcaccaccacgcccctggctaatttttgtatttttagtagagacagggtttcaccacattggccaggatggtctcaatcccctgacctcgtgatctgcccgcctcggcctcccaaagtgctgggattatgggtgtgagacaccatgcccggcctcaatttttatatttttagtagagatggtgtttcaccatgttggccaggctggtctcaaactcctgaccccaggtgatctgcccgccttagcctcccaaagtgctgggattacaggcatgagccaccacgaccggccacccttcacgtctttgtttccagccactgcctcttggaagcctgctttgacacccccagctctgcctgattccacaatctttcccactgtgctgagttctctggagacagtgcctgcatccctccagttccctgctgtatccgcggtgcctaatgtgggacgtggcccagagctggtgctcggtatgcctgtgatattactacattaaaagcaaaaacaaacacacgaaccaaaaaaccatcctgggcgtagtggctcacatcttcaatcccagcactttgggaggctgggcagaaggatcgtttgagcccaggagtttgagaccagcctgggcaacacagcaagacccccaactctacaaaaaataaaaaatcagtctggcatcctggggcgctcctgtagtcccagctactcgggaggctgaggcgggaggatcatttgagcccaggaggtcgaggatgcaatgagctgtgattgtgccactacactcagcctgggcaacagagcaagatcccgtctcaaagcaaaacaaagcactttgcaggacagtatttgcagctcgaatcttccttatttccttgtgcataccccacaattgcagtgacatcaggaagggggtacaatgaacgtgtccctgccctcccatgactccccacgtcccccaagacttggcccgaggccgggcgtggtgactgacttctgcgatcccagcacttggggaggccgaggcgggcggatcacttgaggtcaggagttcaagagcagcctggccaacaaggagaaaccccgtctctactaacaatacaaaaaagtagctgggcatggtggtacacatctgtaatcacagctactcgcgaggctgaggcaggagaatcgcttgaacccgggaggtggaggctgccagtgaatcgagaccaagccactgcactccagcctgaaagaaaaagcgagactccgtctcaaaagaaaaaaaaaaaagactcgacccagctctgcgcgtcgcattcctgcccgaacccccacttgtcgcctcacttttgctccctggcttttgctcaagccgtgcccttgggctggaacgcctccacactgaggtggggtcatgcacgtcctgtggactcctagtctagacccaaacccagatacaacacctgaggttagagcccagccctggggtgccagccctggggtgccaggtgttcaggcacccgcgccccacgccctctggctgcgcctgcgcactgggcctcaccgcgctccttgcgttcggggaagccgtagtctggcgggaaggttggcatctgcagggggtcgggctccaccgaggcatcgcccaggtagcgccggaccaggtgggcccccatggctgcagtcgctgcagatccctgcagcagccgagggtcacctagctcctacccggaaccactgacccctcagtcagacacagcttccgggtcatttaggcagctgcggagatcatagagatgaaggactccagaggatcgctccggtccgcctggcgtcacctcgcggacaggcggaggcgggacaggtgctgtgtctcttcgcaggatatggttggacccgagaggggacttccctgagcctggaaatccatctgggcggggcagaaggggacggtgtgggactgaggcctccctcgaccctatctggggctcttctggtagcccgaggctaaagcacatattaaaattatttttcatatcattttccaaaaagttttttctttgaaaacattcaaatttctcttaaaaaaggcacgatatctattatatcgttaatgtatgtaattttgcataaagtcactttaagaattttttgtttttggagacacagtacctgtcgcccagactggagtgtattggcgcgatctcggctcactgcagcctccacctcctgggctcaaattctcttgcctcagcctcctgagtagctgggattacaggcgcccgccaccacccccagctaatttttgtatttttagtagagacggggtttcgccagttggccaggctggtctcgaacccctgacctcaagtgattcccccgcctcagcctcccaaattgctgggattacgggcatgagccacagtgcctgtccaagaaagattttgataaatttaatttaaataaaagttattcataaatacagttattattatattattattttttgagatagggtctcattctgtcgcccaggctggagcacagtggcacaatcatagctcactgcaaccttgaactcttgggctccagggatcctcccgcctcagcctctcaaagtgttgggattatgggcgtaagccactgtgcctggtcaaaaacaattatttaaagctgaaatttcaaataaattatatatatatatgcaatctttatacaattttaaaatatattaatatctaatattaatatctaatatatatttttccccagtctgacaaagcatgtattaggcatctactgtatggtatgctgggtccagtggtcagacagaaaggcagacgtggttcctgtctttcaagcttacagtctaatggaacagaaaaacagtctaatggaaaaaaaaaaatatgggccagggcagtggctcacacctgtaatctcagagctttgggaagctgagatgggaggatcgcctgaactcaggagtttgagaccagcctgggcaatatagggagactctatctctacaaaaaaaaaaaaaaaaaaaaaagctgggtgtggtggtgcacgcttgtagtcccagctactcgggaggctgaggcaggaggataacttgagcccaggagttccaggctgcagtgagccgtgatcccatcactgcactccagcctaggcaacagagtgagaccctgtctataaaaattcccaggtgatgtgatgttgctggtctagtgaccagctttgggagaattactcaactagatctttatgtgttgacatggggaagtggctgctgatatattaagtgaaaaaagcaagctattgagaatagacaactggcaatagagacttttctttttctttcttttttttttttttttttgagacagagtttcactcttgttgcccaggctggagtgcagtggtgtgatctcggctcaccgcaacctccgccttctggtttcaagcgattctcctgccttagcctcctaagtagctgggattacaggtgggtgccatcacggccagctaatttttttttttttttttttgagacggagtcttgctccgttgcccaggctggagtgcagtggcgcaatctcggctcactgcaagctccgcctcccgggttcacgccattctcctgcctcagcctgccgagtagctgggactacaagcgcccgccaccacgcccggctactttttttgtatttttagtagagacggggtttcaccgtgttagccaggatag

SEQ ID NO: 1560750 - DNA, 4001 bp, Homo sapiens
aacctctgaggtgatgggattctgtgcctctgggtcagggtttttgttgttgttgttgttgttttgagacggagtttcgctcttgtcacccaggctggagtgcaacggcacaatcttggctcactgcaacctccacctcccaggttcaagctattctcctgcctcagcctcccgagtagctgggattacaggcgcctgctaccacgctcagctaattttgcattttttagtagagacagggtttctccatgttgatcaggctggtcttgaactcccgaactcaggggatccgcccacctcggcctcccaaagtgctgggattacaggcctgagccaccacgcccagctggtttgtttttgtttttgtttttgagacggagtttcactcttgttgcccaggatggagtgcaatggtgcaatcttagctcactgcaacctccgcctcccgggttcaagcgattctcttgccccagccccccagtagctgcgattacaggcatgcgccaccacacccagctgattttgtatttttagtagagacggggtttctccatgttggccaggctggtctcgaactccggacctcaggtgatccgcccaccttggccttccaaagtgctgggattacaggcgtgagccaccgcgcgtgggccaggcattcttaacaaggggcctggtgaggattcagaactgtgaatttgcttggaataaaaaaatatatatgtctttgttgtcaccagcatcttatggaaaattagcccttcattcaattcttagcgtaggctgggtgccgtggctcccagcactttgggaggctcaggtgggaggattgcttgaactcagaagttcgagaccagcctgggcaacagggcaagacccccatctctactaaaaatacaaaaactagccaggcatggtggcgcacacctgtggtcccagctacacaggacactgaagtgccagaatcgcttgagcctgggaggcacaggttgcagtgatgagccaagatggcaccactgcactccagtctgagcgacagaggcagaccctgtcttaataaataaataaaaaattcttagcatagacaacaaaatacggcagtattagcaggacctgtaacttttcaccaagcggaatcacagatgtttcctagctatggtgcaggggctgcagacgtttccgtatcatcaaagcctcatttccactcctcactccttccaaatcacagtcgcaattagacctgccgctagatcgcgttcataagggaagcacttagattactaagtcgccaatcaggtttcaagacaatcttttaataactgcctctccgtgtaactgatttccttgcaattctatggattttattccatgcatttaataactttatctgagcagaggtccgcaggcttcagctgatcccaaaaaagtccctggagcaggacaggctctgcgagaggcccttacctcccaggggtggggagggaggtggagggtccagcagggtggcgtggatgtcctgggtcctgttccttcccaggcccggccctgtgacctcgaagaccctcaatgggcctcagtttcccagcctgtcaggcaggccccgctctctccagggcatctcaagagcagcctcgcgggccgtgccctggtctcggggacgtgaatggggcccctccagcctccaccccgagcgccttcctgaggctggaggcttgcgtcatgacctaccgggcctcggtttccccgactgtactctggacgcaataacggcgaccgttcatcgcaagccgggcggggagcccgaggagcggccggctcggagaagcccggagaggaccgcggccacgacgccggcaccgacccccgacgccaccacgacacccgaggctcccacggccccagacccgcgcggccccacacccgccgccggtgccgcgctcacctgacagcaccgccatcttggcctcggccttcagacaacctctgaggtccgttctccttagcgctccgggttcccggggccgccgcccaaagcggctcggagcgcatgcggaaaccggaacctggagccgggaggttccgctgcgctttcggcctccgtggtcgtgttgcgccgtgcacccccagatcacccgaggcggaaaggtcatcggagtgcgcacgtgggggccgcgggtctgcggcggaccgacaaaaacagaggcgacactcattttcttgttattccaggagggcaaaagtcaccacgcgtccctgggtgggctcgaaccaccaacctttcggttaacagccgaacgcgctaaccgattgcgccacagagacgacactgcgctccggcgccctgggagaccttacaaaggatgtggggcctgctgacgcgaaacgactgcgcctgcgcagggaaggcgcagcgcgggacggagtcccggcgagagcgactctgccgcccagccgaaatagctcagttgggagagcgttagactgaagatctaaaggtccctggttcgatcccgggtttcggcagaagttttagcgcctcttgcgatcactgatgtctttcgttcaggattggtccagctgcctcgcagctatcccggaccccttaccgcaacatcaccgcattctgcagaggagtcgccgcgatgtggactcatcccaaagtaagggggctcagacctcacaaccccaaagcctcctcttcccacccctaagaggtcataatttcagctcaaacttcccccttccctgacacaccctcgattttccatcttgcttaaattgataagtttacaaccagtactaatgatataaaaactaacactaaacacccaaactagcaaaacagagtttgcagaacgctttctgcatgcatatcatttaattttcacaattccactggaggttttgtctgcctgttttatgattacaaaaacagaggcaaaggccggtgcggtggttcacgcctgtaatcccagcactttgggaggctgaggcaggcaaatcacctgaggtcaggagttcaaaaccaacctggccaatatggtgaaaccctgtatctaaatcccagctactcgggaggctgaggcaagagaatcacttgaatccgggaagcggaggttgcaatgagctgagatcgtgccaccgcactccagcctgggcgacagagtgagactccatctcaaaaaaaaaaaaaaaagaaaaaagaaaaagaaaaagtaaagaaaacagaggctcaaattaggtgaacacaggtgactagcaagactgggggccccttgaggaccacaacaagtgtttactgaattcgtgccatgggctggggacccactgctgagcaaagccaggcctggtctctgttcttgggcagctcaaaaggattggaggggcccagcatggtggctcacacctgcaatcccagcactttaggaagccgaggcaggaggatcacttgaagccaggagcttgagaccagtctgggcaacatagcaagaccccatctctacaatacataataataataaagacttgggggaaaagctgacaagaacctaagaggctggcaggtgcacaaaaccctcttccttctctagttctcatagctgcccgtgctgtagggttttggttttatttttatttatttattttttgagatggagtcttgctctgtcacccaggctggagtacagtggcaagatctcagctcactgcagcctccacctccctggatcaagtgattctcctgcctcagcctcctgagtagctgggattacatgcacacactacgatgcccggctagtttttgtattttgaatagagacagggtttgttggccaggctggtctcgaactcctgacctcaggtgatctgcccacctcggcctcccagagtgctgggattcaggagtgaggcaccacgcctggccatggttttggtcttaaatttatatcaatatttttagaataatttagagttgtgagtaccccatgcccagttcatgagtg

SEQ ID NO: 1560751 - DNA, 4001 bp, Homo sapiens
ggcctgggagctctctgcctctgtctctctgcctgtctctgtcttctcatctctgtctcttgcacgcagcacccctggatagtttttagtttttagcctctccgttttttggtttccacagacagccctcctggctggtccttgccctgttcctggagaaactgaggccgagttagcaattctctgaggcaaagcctggactggggttcttactaacccccaacccaccccagcaaccaggatgtctcccaaccagccctgatgggggaattccagggtgcacaggcagccttccaacctccccagcctggaacagcctcccctccgctcagccctcccaaatggctccttccagctggtgaggacagagcggggacacctcagtcaccccacaagcccagagacttcaaaggctgcccgaggtcacacagcgtgcccactcgaaccctagttgttcttggagaacttcaaagagatgccttcttcgggaaccccccccccaaagctgctcagaaagggaaactgaggctgggacagggacttacccaaggtcactcaggggatcacaggtaggacagacctcagaccccctcagcaccagctcccacattccctgtcggctgcagggggccggtgagaaagaccctaccaaggagcatgcctggcgtggggggtccctcactgcaccatgccctggagcggaagccggggactcatatactccccacacagtgcttcttaagacgggcctggccctcgctggaatcgcaccccccacgtgccgggactttacagtttgcccgccatactgtcccctctccagaaccggccttagccgcacctcacttcaggggaaactgaggccagaacctctccagcctaaagacacactgcgtaaggaggaaagcagcggtctagaaaacggaacttgcagacctcggggtccccgggagcctgggctggaaggagtccccggggggagccgccccctccccacacaccccctcggccattgcacaaggctcggccccggggcagtctgggagtgcggccaggggtgagaggctacgggagggggagggggagggggaggggacggggcaggtgccgggctggcgagggcgtccgcagcgccgcagtgcccgggccagacccggagcgccgggcctcccgctcctcccggcggcggctccagaatccagaatccagaatccagaatcgatgcagcgaaaataccgggacggtgctggggggcttgcaaaggaggggggacccagccgggccgccggagcacccttccccctcctgggcctccaacttctcctgccccctccccctccatgcacacgtgggccaataacgagggaaaggcgaccgagggccagggcggcccgcacaaccttggtggggggacacggggaaaacacatgagaggtccctttctctccagctggggagacccagggtccaatcacgaccccctagattcctctcagaggcaggcggggggcttcccgcagagcccttgctggaggggggccagcccccaccccgacctttccgagtgtcggggcgggggtgcggagtgcgtcggtgtgtgggggggggacgcaaatctgcagaccaagccccacatccgggagaggtcccgagagtcggggttgggggtgctgggcgggagtcccgcgtagggggtccgcggtaggtaagggtgtggggggggtaccccagcctgacccatccccccaccggaccccagccctcggcgcggggggcatcccgggcagggatggcgggagggacgcgcgcctttttcgtcccgcctcctcctgcttcaaaactccggggctgggatgcggggggcgcgggggcgccggcggggggccgggcgaggaccgtacctgggtgaggcagagcggggacgaatacatcccgggcgcggcgggaggcgcagggccggccggagcgggcgcgctgaacttactgagtcatttttccaaaccacccccccgccccccccaacccccccccccgccccgcggccggcgcgctctcctcgccgcctcctccctcggtctccctcctcctccctcctgctctccctctctcgcgccgcccgcctcgctctctgtccctctctccctccgtctctctcttcctctctcccccgtctctgtctctctgtctctctctctaccctctgacaccctccccctcccaccccgaacctcccacttctcaacacccaactttcaaagaaacgagggaaaaaagggcgcgagcgagaaaggagagcctcccccgacgtctcaggacccccccgctcctcccgtatttacgcaatgccccagggcactagaccaggaccccaggactgcagggcgaccccaattcggatcaagcggagaggggggacagggttgtttctggacattgaggggccaggggtggatttttaaggccccccctccccacccccccatcacccccgagctggccgggaagttggaggaaagagccaggggggagggaaggaatgaagaagtgacgtgcgcagaggccggccagcgcgcctctttccccttaaagatgtacgaccctgggtgcacggtgagctggtcccacagcaccctggctcccttctccccccagagccaggcaggggctgcgggtccccagctagaggggcttgtgtgcagctgtcccttccttggccagaagggcccaggctaacacgggaggctccagaatttgctctcttcacccagcacccaaggggcaggggaggggtggcctcgcctgtgtgtctctccagcaccccaggaggacggtgtccaggcgggatctccagctggccagataaacccttgcagcctccccctgggtatccaataatttccacctgcctcaggggtgtgcccttttcacagatctcaagactgaggtatggcaagtgtggcttggagccaggccatctggacctggagcccacattctgttctccttctagacgtaacagggcagagacctggcctgcctccgtctgagcccccagggcatctgatgacagggccccaaccctcccccggttcactccctggatcctcccaggctagctcagaggctgctgtgtctctcattcccatcccaagggttctcccctataaagtggcttaaagatgcccatcctgtgggattgctggggataaggacaatgaccttagcagagccttgaccttgggtcaaatgttcactaaagacacattcttagaaagcttggccatttcacctcatctctctgagcttcccaaggacaaatgataccctctcaccaagctggggcaggtgccccaggcccaggggcgcagaagataccagcacccattatcctcaggcattacaggagaggaaactgaggcccagagaacggaagccacttgcccagggtctgacaggtaaactaggagggagcagaattcctgcagcgtaggttccctaggccccccacaggctcccctctgcatgacggtgacattattcaaacagtgcttagtacatcacgaacggtccataaatgtgtgtgtctgtgtattttaaacccactgtgcagctgtggggagcatttgaattaaatggtgagaagtgtatctggaaatccacataccaatataacgtgaagcaatttattttattaaaacacgctagggacacatacagggtgaaatctaaaattcacagatatttaaaagttgcagttgacttcagacactcctcctagacttccagaccccgtgccttccaccctccctcccctgtacagaccaccctgcctgcagccttcattcagcagcttagaatcctttggaaggtgaagtttagagagcagagactgcccctcttggaacctcggtttcctcatctgtaaaatggctatagtaacaggatgcatcttgggaggtggggaaggttggagtctttacatagcatgtgggaaggctgtg

SEQ ID NO: 1560752 - DNA, 4001 bp, Homo sapiens
agaccagcctggccttgggctttttatatttagaaaattatatcaaacgcactgggggtggggtgggggtggagagcggcggggatttccctggaggtgacaaaacagctctctgtgcccacggcctctggtccattgggggcaagtgctggaggcgggactgcgggaccagtcccggtgcccctacgctctccccagcataggataataggggtctccttagccacctcccgggcccgtcctaacccctgtgctgctgtaaccacccacccctcgggacttccacggcctctcagggagggggaacccctgccgccccgcccctctcggggcaggtccccgcgcaagcgcaacccctggcgagcgacgtctgcgtgccgagtgatcgcgtcccggcgccacctcgcgcccgaacctccagccaggaccccctcgggccaagcggatgggggaccccgaaggctgggggaagtggaggggacgtaggggaaagataaagggacagagttttgaaaaggtggagggagcgctcttcctccgccgcccaggcagtccccagttacaggaaaaaaggaactgggggaggcgaggccgggagtggaaggcagacccttccctagggggaggctcagcgccagtcactcgcacacagcaagcggcacccaactgtcccctggaacgcggccactcgacagttctccactccctggcgaccccccccaaccgccacacacccacacggggacaccccacggtcacccagggacacgcggctccgcggacacgcagcccagccatagtttcacaacaccgtcccgcagggacgcgcgcacagtcgcccagttatccaaagacacaagtgtcccgcagccgcacaatgcgggcggcgctcacaacacaacacgcgccagcacgtggatgtgcagacacacgcggacacagaaagcggcggagccgacgcgccgggacccgcggccccaaggcaggtacactaccaccccgccgcgcacaccccagacgctcccccagatgccaatgccggcccgttacggagcgcaggggctcccacgcacccctcgaggtgcgcacgacaccgacgccagtcgaccggacaccggaaccccaagtgcagccaccgccgctccagggcctggggcgcgccgggccgagacccgggggtccctcccagctggggaccccgcgcgcgcggcagcggggccgggggtctgccgaggggcggggcgggggcggtgcgagggcaggcggggcggctgctcctgcgcggcgccgagcgcggccgcccgcccggctccaagttcaaggcgcccggcggcggccgcggcgcgctctccgcccctctccgcagcggccattttccgctagctggcgcgccgcgctcgcccgggccggggcaccccgcgggggccgccgcgacccccgccccacgcgccgtcccgccgtgcgccccctccctggcccgggctcccccacggactgcgcgctcgggggtcgtgcgcccagggccgcgccctcccgcctggggtctggcccggggagggggcgggggcccggcctggggttgcgggggccttctccggggagccccgccctcctcgccaactcgcggcgcccgcgaggggccccccacttggggtctcccgcggcgccccgcgcgccagctccgcccccagccggggtgcggggggggatcgtgggtaggggtcccgtggcgactggcgagtgggggtccccgcctcgagcccctcctccgggcggcccccgccccctgtccccccagatcttgcaactttcgcccggagcccacgcaccaccccaaaaagtccccgggcgaaaacgaaagtgggtgcggcgacgtaccatggcgctgctgcgaggaggcgaggccggcgccggagcgagcgcgctcggtccccggcgaggggggggccgcaggcggcgggaggaggcggcgagggagggcgcgcgggggagggagcgagcgcgccagggagggggcgcgccgcgcccgcccccccggcccgcaggaccctcccctcggcccgccctccccccggtcccgcgcaccgcccgcgcctcaggctgctccgcgccgcggccccggctgcggcggctccggctgcggctccatccccggcccggcccgcgcaaggggaggcccggggagcggcggaggcggtggcggcggcggctgcaggtcgcggggccccggctgggctcgctgcggagcgagcggatccaccttcgccgcggcgcgcgcgcacacacacgcgcacacacacactcacgcgcaggcgactcggggacaccggcgggccgggcctcctcgactcagccacggacacacacacaccgcacacggacacgcgcagagatccccacgcgcggcgcctacagcgtgtgacggacacacggcccgtgggtgtccgccgggcacacggggacccatgctcgaagccggtggggcatctgggacacacaccttctgcaggaggtcaacacagacgcacactcgcagcctgtggggctggcaccccgagatctcacagacgcacagtcccagaaagacacccagacctcagagggactcacgcgccgacccccgggacccctccccgagcagccctggccggtgactgcaggtgtccgggggacacgcggctacacacacgcacagcagggagacgggacagacggggacacagacagagactccgacaccgagggcgacagacctggggcgggggtcccctgggggtcccgcaggggctccaggcagggggcggcaggggagcgctcgcagcggcccccgtaggaagtggggggcagcgggcgccccctcccccggtcaggattaatggcgaggcctccgcagcggaggaggggccgggccgaggtgggtcagcgcccccgcccctgccgcgcgagccgctgcgggttgggaccggctgccgcagcgcccccccaagcgctctcccgcagtccccctcctctgacagccgcagagtaggcgccgccccctcgcccccaccggctctgcgtctggcgcagctgggggaggttgcagggggtgtggggggagtgttgctccgacctgacgggtgaaaggggttctgctatggtccttctgtctttccccagttccacccccctccacacacactgaggatccaggatttcagggacccctttggaggagtggttccctgctcccccagggaggacgccagggtgagggtgagagcaggtggcaccccgggaggagaatcagttcccggagcgccccttcggagcgatggctgagtctgggggttctggaagttgagtctggcactctgggagctgagcagttctaggcgacgttgatgccagcagctctgcccacatggtaggtgctcagtaagtgttgtctacgcgaaggatgtctcagccagccctgaggcatttaccctgtgccctcatcttcagacgctgaggctttcccatttcatttctgcagtcttcgccccatagttcagaaggaaccaatgaggcccagagaggggtcaacctggggtcaaccagcagggacactaatgctttctccaagggtgtggcaggcaccgaggttttgcaggcccccacccctcccgcaaacctgaggcaggaccggcaagggaagggttagtgggttagagaccccccccctccctcccccctcccacccgtctctaatcggcctctgctaatccgcagcttgaatcctcacccgctcccctgcctctgggaattaggtacctgggggtgaggaggggaggggagggatgggttgatagcagccaggaagtaatgaggggcgtagagacagtggagcactggtgtagcgcctctcacccattactttccctacgaaccctgcaactgcctggcattgcgtgaagtgcttgacatgaagctactcacccctcaccgcagccctctgaagtggctgctattaccatcga

SEQ ID NO: 1560753 - DNA, 4001 bp, Homo sapiens
agccatctctgtttcaatttgtaagaaaacaaaagcggaaagaaattataaaaagggaaagggtaagggaaaaaaggaacagaggaggagaactaaaccaccctgacccaaaatgcagggtaaaactggaaaagcgaagagaagcagaactacttggaacacaaaaggaaaaggagattttacagagttttttttttttttggtttgtttgtttgcttgtttaagacctcttccacagcaacgctgctccctgccatgcctgtgccccgagaaagcctctctgctccccagtgccagggctgtgggcatccatcctgaggccttgccactttagctgaaataaggagaagggaaagagctcaaggaatctcgtccttgttttcactctctatgaaatcaaattactttcatactgacagccaaatcccagccaaaacagctcccgcctgagtatttaggccacagaatctgcccactactgtcttctctcctcttttctgttcattcagtctcatatcccagggtttcacatgccccttctctccaccggactcctgcccatcccgcttgtaccaaacccagtttttcctgggactggaggtgaagctgcagtaaaactagcacctgcccctcaatacttcttctgactcattttaataagagcaattactggtttgctgttgttgttcatctcaaactctcaccatcatggataattctgggggcatcatgtccccaatcctaagacctgcagcatctttctgatcagataagtcctccaaagatggagatgcacaaagtcgataccatggccagggggcagaggaggaagaatagaacaggtcgggggagacagaagacaggaaaaaggaaaagggcccatagaaccgtgttgcaggccccgcaggacgggcatacaccagttaggcccatggcgagttatcgcttggaaattagaggaacaataaacagaacaaatgccagcaaggaaaataaaatgagagggaaaaatggttgagaacgacctacccggagtgtggacaaagtaagccagataaagatccagttctttgattgtgactccaatgtgatgtggctggacgcacaggccggggttcgagcactgaggcgacttgtagagccgctccccatcagtactttccagggggatccccttaaacaaaatcaccatgaccaggtccagccgccacaccttgtcagcctggcgcaggcagtcaatccgccggatcttgcccttctggtcggggttggagagcacgcagcaggggggcttcttgcccgtgatggtcagcacgaagtcctcgcggaactcgggccggatgtccttgcgcagcttggccagcagccgggatgcccacttctgcttgatctcgggcttctcgcccagcagctcgtccttcaccgcccgctcctcgtccttcgacatccgcttttcatgcttcttgaagtacttgcgcttccgcgcctgcaggttgaaccaggtgtaggagaaagcgcggacgtgaggcagcagtgcctcgatgaacgggtggaactcatcctgcaggcggcaagccgggagcatgcggggcgagggaggacgggaggaggggaagacgggatgagggggaaagagagaaggagaaaagcagcgttagaagggggggcacaaggaaaaccgccttctcctcctcctccctccccccaacaattttctcttgcgattgttctacgaaagtgtggtttgaagccaccaccagcttcgccagccacttgctcccatctcagcctcagcagccagacagaggcaccgggagcctctacacacacctattctctctctctctccctcactcactcacacacacgcgcacagacaacgttgccgtccacacacacacgctgctggtatccccgccaggctctgtcgcgcccatgacatctccatgttctatcgcagccgtgaactcctgtcagctcgccccggcacagtgtccgtctgcacagacgcccgtggacgcacacgcgggggcgtgcggggccgcctctggtccccgacaccggtcgatttttggccgcccccaagaagacagaaaatgacatccacgagcaagcgagtgaggaaacagatcaggcttccctctccccaggctgttttcattttcttttctcctgatccagttggaacatccaccccaacattttttaatcagacctaaatcctaaatatgtgatttcagctttgttatcgacaccaatactaatgttaatcacagtaataatgaacaaaacacttcttgttagcacaaataaggtgcttgtctcggccacattagggttaaaagctacatgggtcttcttgcgaccccttccccagcctcccacaaccccttcaccctttttcccactcagtcaggtgacagaaggatgggctctctcggttttgtttggtttttttttttttttttggttgtttgcttgtttgaagtttaaataataattgatttctgtttacaaaaataaaactggaaaaaattaaataattaccattgatctgaagcacccggcaaagcccaacgcccgattctgagattctggactcaaaagagttgtgagttgggggcgggtggggggaggggggaggaggaggagcaggggaggaaggtaaatgttttaaagggggttattattggtgttctggggaataggggccgggcttgggtggattctcaaacccttccccctcctccccccccccatgctccattgcacagaagggggaaattaatattttttttgaaaaggagcaaaaagaaagaaaggtcagggatagcaagcagagagagggagcgagccggctgccacacacgccaggtaaacaaaagccaacaaaatttttttttcaatttcttcccctgtgcatcctcttccagtttaaaaaaaaaaaaaaagaaaaaaatgcaaaatttaaaaatcaaaaccagcctcccaccatctccccacaaccaacaacgcaccccaccccacccccgtgcaaaacaaaaacaaaaacaaaacccaggagggaaaaagcggcagctgaagaaaaaggctttcggctttggcagcggcacaggggtgtaaacttcgagctgcctgatcggaggaaaagggggagctcgcagattcccggggaagaggacgagttctgaccggctgcagaccgttgctggcagacgcgtgcaaaagagagagagggagcgagggagggaggaaaggaagaagggggggagggagagatcgaggatcgagggaggacgtggatgggatggggcgtgtgtgtgagtgtgcgcgtgtgtgtgcgcactggttgggtttttggggtgttttttttttttgctccttttctctctctcaaactccctctctctctctcctttcaggctcaatccccatccatttgcttgtgccaagccagtaaaaaggggtggggggagaaagagacagagagagagagagagagagagagagaaagagagagaaggatccacctatttggcaaagagacatccacgagcagccaatggctgcgtccaaggggaggagggaaccgggcgagcagggagggtggggagagcccccggcagttggagaccaaaaacaatttgcccaatcgacaagttcacgtctaatgaacaagcaaagtccagcagttatgaatttttcattccaggctcccactcgggtccatttggcagcagccacccagcaaatctgggggtggggtggggcattgggggggactgggattgtggaagactcgaaatttttttttaagcctgaaaaataaataaataaaggcctgactcccggcgggctggcgggcgggagccccagaaggccttggggaagcagctgcgccttctctctgtgttttggtttcagtctttctctcgggcctgcacactctctttttctgtttctatttctttctttctttttttttttcttcctatggagca

SEQ ID NO: 1560754 - DNA, 4001 bp, Homo sapiens
agtaaaactagcacctgcccctcaatacttcttctgactcattttaataagagcaattactggtttgctgttgttgttcatctcaaactctcaccatcatggataattctgggggcatcatgtccccaatcctaagacctgcagcatctttctgatcagataagtcctccaaagatggagatgcacaaagtcgataccatggccagggggcagaggaggaagaatagaacaggtcgggggagacagaagacaggaaaaaggaaaagggcccatagaaccgtgttgcaggccccgcaggacgggcatacaccagttaggcccatggcgagttatcgcttggaaattagaggaacaataaacagaacaaatgccagcaaggaaaataaaatgagagggaaaaatggttgagaacgacctacccggagtgtggacaaagtaagccagataaagatccagttctttgattgtgactccaatgtgatgtggctggacgcacaggccggggttcgagcactgaggcgacttgtagagccgctccccatcagtactttccagggggatccccttaaacaaaatcaccatgaccaggtccagccgccacaccttgtcagcctggcgcaggcagtcaatccgccggatcttgcccttctggtcggggttggagagcacgcagcaggggggcttcttgcccgtgatggtcagcacgaagtcctcgcggaactcgggccggatgtccttgcgcagcttggccagcagccgggatgcccacttctgcttgatctcgggcttctcgcccagcagctcgtccttcaccgcccgctcctcgtccttcgacatccgcttttcatgcttcttgaagtacttgcgcttccgcgcctgcaggttgaaccaggtgtaggagaaagcgcggacgtgaggcagcagtgcctcgatgaacgggtggaactcatcctgcaggcggcaagccgggagcatgcggggcgagggaggacgggaggaggggaagacgggatgagggggaaagagagaaggagaaaagcagcgttagaagggggggcacaaggaaaaccgccttctcctcctcctccctccccccaacaattttctcttgcgattgttctacgaaagtgtggtttgaagccaccaccagcttcgccagccacttgctcccatctcagcctcagcagccagacagaggcaccgggagcctctacacacacctattctctctctctctccctcactcactcacacacacgcgcacagacaacgttgccgtccacacacacacgctgctggtatccccgccaggctctgtcgcgcccatgacatctccatgttctatcgcagccgtgaactcctgtcagctcgccccggcacagtgtccgtctgcacagacgcccgtggacgcacacgcgggggcgtgcggggccgcctctggtccccgacaccggtcgatttttggccgcccccaagaagacagaaaatgacatccacgagcaagcgagtgaggaaacagatcaggcttccctctccccaggctgttttcattttcttttctcctgatccagttggaacatccaccccaacattttttaatcagacctaaatcctaaatatgtgatttcagctttgttatcgacaccaatactaatgttaatcacagtaataatgaacaaaacacttcttgttagcacaaataaggtgcttgtctcggccacattagggttaaaagctacatgggtcttcttgcgaccccttccccagcctcccacaaccccttcaccctttttcccactcagtcaggtgacagaaggatgggctctctcggttttgtttggtttttttttttttttttggttgtttgcttgtttgaagtttaaataataattgatttctgtttacaaaaataaaactggaaaaaattaaataattaccattgatctgaagcacccggcaaagcccaacgcccgattctgagattctggactcaaaagagttgtgagttgggggcgggtggggggaggggggaggaggaggagcaggggaggaaggtaaatgttttaaagggggttattattggtgttctggggaataggggccgggcttgggtggattctcaaacccttccccctcctccccccccccatgctccattgcacagaagggggaaattaatattttttttgaaaaggagcaaaaagaaagaaaggtcagggatagcaagcagagagagggagcgagccggctgccacacacgccaggtaaacaaaagccaacaaaatttttttttcaatttcttcccctgtgcatcctcttccagtttaaaaaaaaaaaaaaagaaaaaaatgcaaaatttaaaaatcaaaaccagcctcccaccatctccccacaaccaacaacgcaccccaccccacccccgtgcaaaacaaaaacaaaaacaaaacccaggagggaaaaagcggcagctgaagaaaaaggctttcggctttggcagcggcacaggggtgtaaacttcgagctgcctgatcggaggaaaagggggagctcgcagattcccggggaagaggacgagttctgaccggctgcagaccgttgctggcagacgcgtgcaaaagagagagagggagcgagggagggaggaaaggaagaagggggggagggagagatcgaggatcgagggaggacgtggatgggatggggcgtgtgtgtgagtgtgcgcgtgtgtgtgcgcactggttgggtttttggggtgttttttttttttgctccttttctctctctcaaactccctctctctctctcctttcaggctcaatccccatccatttgcttgtgccaagccagtaaaaaggggtggggggagaaagagacagagagagagagagagagagagagagaaagagagagaaggatccacctatttggcaaagagacatccacgagcagccaatggctgcgtccaaggggaggagggaaccgggcgagcagggagggtggggagagcccccggcagttggagaccaaaaacaatttgcccaatcgacaagttcacgtctaatgaacaagcaaagtccagcagttatgaatttttcattccaggctcccactcgggtccatttggcagcagccacccagcaaatctgggggtggggtggggcattgggggggactgggattgtggaagactcgaaatttttttttaagcctgaaaaataaataaataaaggcctgactcccggcgggctggcgggcgggagccccagaaggccttggggaagcagctgcgccttctctctgtgttttggtttcagtctttctctcgggcctgcacactctctttttctgtttctatttctttctttctttttttttttcttcctatggagcacacaggggcgagtggaagttttcctccccggccacatacacacgggcctgcggtgctatgaatagaaataagaagaaagagagctcagaaagtgtccatgccagcagtacttccagggcagggatctggtgcccagggtactgccaccttgtgatgcccccaggtctggctgctgaaggagcactctcagacaagggggaggccagcaccccacacgtccctcccttctcccccagcccccagcaagctcagcctcctccttcggcccacacccagccacgcacactccattagcggtgacgagggatgccaacgcaacacagctcggctcgagaaactgcaacagtttattaaaatagcctcctgtcacagcactccgcctgacaagctctacacgcagccacaaacaacagccagacccggggagaagtgacaaaggcaaaaagatggacactacctctgagcagaggcaaggaatctgaccaacgcccctcaccactgcacaggcatttaattctccagatctgccctctccagttgacctgagattagttttcttacctgtctcccaaatcaatttagactaaagagcccaaaccctagcagtgca

SEQ ID NO: 1560755 - DNA, 4001 bp, Homo sapiens
gtgctgtgaaatctgaggggctggtgtctcacccaagccatgggggagcaggctcagatgtctggcgtgcttggcatgggaggccgggctggcagcctggtgggcaaggggctgcttgagcgtggggtcttggttccactaggccccaaacatcggccacacagcccagccaagtgtagcaccaaagaggcccagctcagacaccgctgggtaggcagttgttgtgaggggcgcccaacatggagtggccgtggaactggaggtgcagatgtgggggttccccacactgccatggtgctcagggtgcctgctcacacctgcatgcacactgcaacatgtatgcatgccggtgcgccctcgccaacacgtacttgggcctgctttctacaggaaaacccgctccctgggccacacacacggccatgccacgcaggcctgcccatggccggcccacaggggctacacacagactctagattgattcacacttgcatacactctcacctgtgcatacaggagtgtggtgtagccacagctgacacacaccccgacaaacccctcgccccttgacaccactgcacactcccggtaggacccagacaaagtaggagccatacccatgtggactgccactgtaagctgtggacacacttggcacatggctgacaaggatcaggctgggcagaggggacaattagggcctggcctagagaacccccacatgcaggcctggctggcagcagggctaagcagcccctagatgtcccctcttcggagactgttaccagctgtggcttggccctgcaggcaacgctgtcagggccactgtgggactctgggcagcttctgtgccctcttagagcctcaggccacagcccagggagagttgggtggcccgacaggcatcctcgaagcttttgccgcagccgtgcgccgcgcagggaacttcgctgcaggcgggacgcgctctagcaacgcgccaaggtcggcgctgttgtgcccgaggctgacccgacggtgtggccgcagcactgtcggctgtgtccacggctgcctcccgcccctcccgcctccaggcgacgggacgggattccccaggcctgccgggtccactccgcagcagcccgggtcgctggggccagaaagtttgcgccgaggaaagtttgggggtgggggggcagaggctgcgacgtccggggtcggagaggcgcggccaccgctggcagcgcgcccgcccccctctcccctcccctgcccctccgaaatttgggagccccgccattttcttagccccgctcccatgtgaggcctaaacaaagactttggggagacgcccgggccgctcggcccaccccaggcaccccggccgcacgcaagggccgccgccacgcacgccggccactgccaccctcgggaaccgctgcgccctccccaggaagcgtcgcgggacccagtgtcccctctgcgccctcgggaccaccctcttgccactctgtcaaccccgcaaacactgccagcgaccacgctgcccgggtgcgcgctacagtagcccacaggtcagccggagtcccgctgcccatcgcaccccagtcgagcgcgcacacacacacacacacacacacacacacgtacacgcactcccgcctgcgctccacgggcagcgccacgacgcagctggccacccccggaacccccaaaaggagtccgcccggtggccagggtcgcacgcgcacggtgacgcccgcacgcgtgcctgggctccccgcggcacagcctgcacccctcggcggcccgcgggctctcggcccccccttcccggccgccgcgcgtcccctccgcccgcgccgccggccggcctcccgcgcccgctcccctcccccggtcgcgcgggggcggcggccggtacctgggtgaggcagtacggggagtacatagctgggcgcccgggcgggagcgcggcggccggccgcggcgaggggaggcccggcaggcggcggccgcgctcgggctcgggctccggctcggctcctccggcctccgccgcgctgcgcccgcccggcccgcggccccgcgctcggcccggcgccgctccgcgctcgccgctcgcaagctcggccccgccggctccggggccgccgctgccgccgccgccgccgcgctcgccgctgcctctcgcgtccgccgccgccgccgctgccgccgcgcgtctactccatgccgccgccgctcggccggtcaccctcgcccgccgccgccgccgccgcagccgccgcgctgtgaaagtgaaagtttagacaaagtttggaagcggcgcactccggggagagggagcgggcgggcggcgcgggcgggaggaggggcgcggggaggggcgggcagggcgggggagcggcggccggcgcacacacacaagcacacacatgcacacacacacacgaacacacgcacacgcgcgcgcgggggcgcacaccgacgcggccgccctgacacgtgctggcccgcgttccagcgcagacacacgctgacacgcagcgggactcggaccccgccacacatgtcacgtccagaacgcctggccacacgttccgccttcgaacacaaagcacactcggacaccagtgcacacaaggcacagacacacaacccctacacacgggcacacacacacagcagtctgggaaaacacccacgacccacgctctgacatgcaccgtcccaccatggtatccaggcacacaacaaggaaccgcgtatagacatacaccaaagcaggcgtcacgtagacacacactgatatacacgaagacacaccagtgcatgacacatagagatgcacactgatgcacacacactgacgcatgttcctgcagaacacagacacatgcaagatcacacagccacacgctgacaccttccagacacacaattcctacacgcagacacatacacaacacacacacatcgcagtgccagaacacactggcagttgtggcagtacaccccgatgtacagaatgacactgatgattgagaggccgaggccagtggattgcttgagctcaggagttcaagaccagcctggacaacatggcaaaacccctctctaccaaaaatacaaaaattagctgggtgtggtggtggatgcctgtggtcccagctacttaggaggctgaagtggggggatcccttgagcccggggaggtcaagggtgcagtgagccatgatagtgccattgcactccaacctgggtgacagagcaagaccctgtctgaaaaaaaataactaaataaataagatgacactaatgaagggaagatacacaatgtcacataaacacacaccaaacacctggaagtgaatgcaaaggaccccaatacaaagagatacacagcgtcacagatacaaagcaacactggctgtcacaacacaacacacagacacacacacacacacacacactgggttgcccagatgtacccacaggccttggacacactgaccaactgatgcccaggcggctgacaacccccctgggagaatcatctagccatgcacacagggatcacacacatacacccatgtcccttacgtgccccccccccaacacacttgtaatgtggccctgatcatcgacataggcaaatatagcaggagacccacagctcagctgtcagggacagaattgggcatcagggcctccgtacatgtacacacacacacacacactttggtgaggttccagcccctcttgcgggccctgactcctcattttcagaacataaaggcctggggggagaggtagtgctggggaccctggagcaaggggagaggaagccctctggtaaccctcagggtgggtggggaggcagtgcctacagcccccaggcagctcctgctgagacaaaacacccgcctgctgccaggtgcaaccagcaccttcttgctctcttgggccaaaaagctgtggcaattctcagctatgcattgtctgttaaagggggt

SEQ ID NO: 1560756 - DNA, 4001 bp, Homo sapiens
gccaacatggtgaaactgctgttgctactaaaaatacaaaaattagccaggtgtgggggcacgtgcctgtaatcccaaatttgggaggctgaggcagtagaactgcttaaacccaggagtcagaggtttcagcgagcagagatagtgccactatactccagcctgggtgacagaacaagactctgtctcaaaaaaaaaaaaagagtttgagaacatagggggacaaaaaaatttaaaaatttgccaggcatggtggcatgtgcctgtggtcccagctactcaggaggctgaggtgcaaggatcacttgagccaggaggttgtggctatagtaagccatgatcatgccactgcactccagcctgggcgacagagtgagacttcgtttcaaaaaaaaaagtcagaacagagaccaattgaatagaaagtaaaaaaaaattaatgaaaccaaaattaattaatgaaatttaatgaaaattaacgagactataaagctggttgagatcaatattcagtgcctcctggatcaggccctgcttgcatcactgggcatacagcagtaaacacaacagacaaaaaacccagtacaatccctcatctgggcctttgcaactgcagttccttctccttgaaatgctcttatcttgtttatctattgcctcattttcctgctttatttttctccaaagtacttaactacctctgactttatttccttttcttactttctatgtttctttctttctgcgtgtctttctttgtttcttcctgtctttccatttctttccttccttgtggtcttatcaatctgtttatttagctccactaaaatgtatgctccacaagggcttaagtttttgtttgttttcttcactgcctttatcactagcacctaaacggagcctggaacgtggtaatgtgtaaagaatatttgtttaacagatgaatccttggtctcatggagctaacattcttttttttaattttcctatttttttactttaattaggaattcaacatagaagagcttacattctctctctttgaatttaagatttgaagaacactgctcagaagacaggatcttagagtcagggaccaagtattaatttcggaaatcaaactctagggctcaaatcgggaactaagaatcaaagatcatatttggaggttagaagtcaggagaagccacagttctaacagaagtctcaggactggagtcaggtttgggtatcagtggatacaatgtggattccaggagctgagaatcatagttcaagaaaagaaggtaagaaatgattgggttaggatcatagctagatagaagattggttttgttaaaagttaggactcgggggttagaggtcaggaagttcagcatcggaagtcagatttaggagtatgaggttaggaagcctcagggatcagagattaatgaggaatgtgacgccgggtcctagggctccgtttggcagcctaaggttcactcacgtgtccccatcctcagtgacgtagccgaagacgaggggagcccacgacagccccgggcccaactccgcgcccaacccaggtcctccgggggccgctgcgtccggacccagggagcccaggccgctgtcgcaccattcatctgcgtcggcagcttttcccaagcacgcgaccccagccatggcccccgccgcctcaggggccccccgcagtcgcccgcctgtagctgggctttgccgggagttctggagcttccgccctgcgggaaattccccaccacgccccctgattcacccaatgataatatgctgaatcgctcacaccccgccctcgtactgcatcctgaccaatcagagtattcgggaggactacaactctctagccgttcccacattttccgggcgccctttaccaacatggctgctgacgccacgccttctgggactcgtagtccggtcctcgcgcgctttcttacctaactggggcgctctgggtgttgtacgaaagcgcgtctgcggccgcaatgtctgctgagagttgtagttctgtgccctatcacggccactcccatttctggtgccgtcacgggacagagcagtcggtgacaggacagagcagtcggtgacgggacacagtggttggtgacgggacagagcggtcggtgacagcctcaagggcttcagcaccgcgcccatggcagagccagaccgtgagtcggggatccgggtaggagggtcgggccgcgccggggcctggctgaatgctgcaggccccggggcccaagggtggccgcggtggggcgggaagtagggagcgcttcggggagtgggattctgagggctgttgcttagcgatctgtatcgctaggctggtgggtttctgggtcgcagtgtgttcagggttcgtttaccacatccacttgccaagttgccaatgatcgcgtgtttctcgcaccttggttgctaaggtccctcgctgcaaagaacataagttgccccggtcccgcttgctatgggtacctgattgttagaggcaaccagaggatgctgagggacccctgctgacccctcctatggcttccccttgttccgcgcctctcctaaacctaccgcctccactgcaccactgcacctccctcctaaacctgcctcccagccaaagcgtctcttcccttctcttttcctttctaaacttccctctgccttgtaaatctaaccctccccgcacacacactcacacactgtcgtgtccttcctaactcctcctgagtgttccttcatgccctgaatcccctaggtaggaggaggaggatcgcttgagcccaggaatttgaggctgcagtgagctatgatcgcactattgcactccaacctgggtgacatgagcgagaccctttctctaaaaagtaaaaaagaaagaaagtaagtcagggccagaaacaatggctcatgcttgtaatcccagtactttgggaggccaaggtggttggatcgcttgagcccaggagttcaagaccagcctgggcaaaagcccctactttctccctgtccccctaaatcttcctctccagcctctctgcccctcactaatcacctctcccggcatcactttgcatgtagataagatcttttctccgtcccctccctccctctgctccatttttaccaccatcccatcccagtgtaactaggttggtgggtgttcttgccccctcactgaccatttgaacccctttattccccccttaatcgttctccccactgtaaccacctctgctcccctcccccagcctctcaccctctggagacccaggcagggaaggtgcaggaggctcaggtgagatgggggaaagggtggaggggaggagagagacggacttgttccacatcccacactggggggaggtggcaaaggggaaacagtcaccccagggccctcggctcattgccccaatccctcacaccacccagtgcagctttctggggaaaggcagattctggggattgtcagagaagagtttccagcctcaagtccaggcctgtcctcccaaactttccttcttccttgccactgcctgccatcccttctgaaccacatttgtcctgggactggaagagacaggtatcccatttggtcttggaacgcacagatctcgtggacaagtgatgggaaaaaatgatctcacagcgtgatgacgaaagtaactcagggggccagatgcagtggcttatgcctgtaattccaataactcaggagactgaggcgcgaggatcgcttgagcccaggagtttgaggctgcagtgagctatgattgcatcactgcactccagccggggtgaaagagcaagaccctttctctaaaaagtaaaaaagaaagaaagtaactcagggccagacacagtggctcatgcttgtaatcccagtactttgggaggctgaggtaggaggatcgcttgagcccaggagttccagaccagtcttggcaacatagggaggcccccacctctacaaaata

SEQ ID NO: 1560757 - DNA, 4001 bp, Homo sapiens
aatatcaaattaaatgtaaatggtctaaacactaattaaaaggcagagactgtctgggcacagtggttcatccctgtaacccagcactttgggaggccaaggtgggaagaatgcttgagctcaagagtttgagaccacagctgcacacagtggctcacacctgtaatcccagcactctgagaggccacagcgggtggatcacctgaggtcaggagtttgagaccagcctggccaacatggtgaaactgctgttgctactaaaaatacaaaaattagccaggtgtgggggcacgtgcctgtaatcccaaatttgggaggctgaggcagtagaactgcttaaacccaggagtcagaggtttcagcgagcagagatagtgccactatactccagcctgggtgacagaacaagactctgtctcaaaaaaaaaaaaagagtttgagaacatagggggacaaaaaaatttaaaaatttgccaggcatggtggcatgtgcctgtggtcccagctactcaggaggctgaggtgcaaggatcacttgagccaggaggttgtggctatagtaagccatgatcatgccactgcactccagcctgggcgacagagtgagacttcgtttcaaaaaaaaaagtcagaacagagaccaattgaatagaaagtaaaaaaaaattaatgaaaccaaaattaattaatgaaatttaatgaaaattaacgagactataaagctggttgagatcaatattcagtgcctcctggatcaggccctgcttgcatcactgggcatacagcagtaaacacaacagacaaaaaacccagtacaatccctcatctgggcctttgcaactgcagttccttctccttgaaatgctcttatcttgtttatctattgcctcattttcctgctttatttttctccaaagtacttaactacctctgactttatttccttttcttactttctatgtttctttctttctgcgtgtctttctttgtttcttcctgtctttccatttctttccttccttgtggtcttatcaatctgtttatttagctccactaaaatgtatgctccacaagggcttaagtttttgtttgttttcttcactgcctttatcactagcacctaaacggagcctggaacgtggtaatgtgtaaagaatatttgtttaacagatgaatccttggtctcatggagctaacattcttttttttaattttcctatttttttactttaattaggaattcaacatagaagagcttacattctctctctttgaatttaagatttgaagaacactgctcagaagacaggatcttagagtcagggaccaagtattaatttcggaaatcaaactctagggctcaaatcgggaactaagaatcaaagatcatatttggaggttagaagtcaggagaagccacagttctaacagaagtctcaggactggagtcaggtttgggtatcagtggatacaatgtggattccaggagctgagaatcatagttcaagaaaagaaggtaagaaatgattgggttaggatcatagctagatagaagattggttttgttaaaagttaggactcgggggttagaggtcaggaagttcagcatcggaagtcagatttaggagtatgaggttaggaagcctcagggatcagagattaatgaggaatgtgacgccgggtcctagggctccgtttggcagcctaaggttcactcacgtgtccccatcctcagtgacgtagccgaagacgaggggagcccacgacagccccgggcccaactccgcgcccaacccaggtcctccgggggccgctgcgtccggacccagggagcccaggccgctgtcgcaccattcatctgcgtcggcagcttttcccaagcacgcgaccccagccatggcccccgccgcctcaggggccccccgcagtcgcccgcctgtagctgggctttgccgggagttctggagcttccgccctgcgggaaattccccaccacgccccctgattcacccaatgataatatgctgaatcgctcacaccccgccctcgtactgcatcctgaccaatcagagtattcgggaggactacaactctctagccgttcccacattttccgggcgccctttaccaacatggctgctgacgccacgccttctgggactcgtagtccggtcctcgcgcgctttcttacctaactggggcgctctgggtgttgtacgaaagcgcgtctgcggccgcaatgtctgctgagagttgtagttctgtgccctatcacggccactcccatttctggtgccgtcacgggacagagcagtcggtgacaggacagagcagtcggtgacgggacacagtggttggtgacgggacagagcggtcggtgacagcctcaagggcttcagcaccgcgcccatggcagagccagaccgtgagtcggggatccgggtaggagggtcgggccgcgccggggcctggctgaatgctgcaggccccggggcccaagggtggccgcggtggggcgggaagtagggagcgcttcggggagtgggattctgagggctgttgcttagcgatctgtatcgctaggctggtgggtttctgggtcgcagtgtgttcagggttcgtttaccacatccacttgccaagttgccaatgatcgcgtgtttctcgcaccttggttgctaaggtccctcgctgcaaagaacataagttgccccggtcccgcttgctatgggtacctgattgttagaggcaaccagaggatgctgagggacccctgctgacccctcctatggcttccccttgttccgcgcctctcctaaacctaccgcctccactgcaccactgcacctccctcctaaacctgcctcccagccaaagcgtctcttcccttctcttttcctttctaaacttccctctgccttgtaaatctaaccctccccgcacacacactcacacactgtcgtgtccttcctaactcctcctgagtgttccttcatgccctgaatcccctaggtaggaggaggaggatcgcttgagcccaggaatttgaggctgcagtgagctatgatcgcactattgcactccaacctgggtgacatgagcgagaccctttctctaaaaagtaaaaaagaaagaaagtaagtcagggccagaaacaatggctcatgcttgtaatcccagtactttgggaggccaaggtggttggatcgcttgagcccaggagttcaagaccagcctgggcaaaagcccctactttctccctgtccccctaaatcttcctctccagcctctctgcccctcactaatcacctctcccggcatcactttgcatgtagataagatcttttctccgtcccctccctccctctgctccatttttaccaccatcccatcccagtgtaactaggttggtgggtgttcttgccccctcactgaccatttgaacccctttattccccccttaatcgttctccccactgtaaccacctctgctcccctcccccagcctctcaccctctggagacccaggcagggaaggtgcaggaggctcaggtgagatgggggaaagggtggaggggaggagagagacggacttgttccacatcccacactggggggaggtggcaaaggggaaacagtcaccccagggccctcggctcattgccccaatccctcacaccacccagtgcagctttctggggaaaggcagattctggggattgtcagagaagagtttccagcctcaagtccaggcctgtcctcccaaactttccttcttccttgccactgcctgccatcccttctgaaccacatttgtcctgggactggaagagacaggtatcccatttggtcttggaacgcacagatctcgtggacaagtgatgggaaaaaatgatctcacagcgtgatgacgaaagtaactcagggggccagatgcagtggcttatgcctgtaattccaataactcaggagactgaggcgcgaggatcgcttgagcccag

SEQ ID NO: 1560758 - DNA, 4001 bp, Homo sapiens
ccggcaagccgctgagtccctacgggacagcacggggcctccggagagctgtggctccctggcctcacctgcaccccgccagcgtcgggctgctgctgctggcggcgcctctgctcttccagaagcttcttcacggtttgcgttgggcagtggctgcgctcacccctgctcactgtgcgggagaggagagggggaagtcatcaagggtccttaagtcacctaaatgccgcgggggtggcgcgcggggagtgggtttgggcaccctcctcgccctcccgcgcggaaaaactggcacatagatgccgcctgactcctccaaagccattagaagatttggggtggggcatccgcctccgccgtttccttccttttgctccgcactttccctctgacccaactttccaccaccgtcgcggaaagtgaggaagggggaggagggcacccctctgcagcaaccaccccacttccgtaaaaaaattccacccccagatatccaagttttgaagtcagcgggttggtggggggccggcgccaggcgtcactccctagactcacatccaggttcccaacatttttttccctagaacctgacccggaaatcaggagtccccagcgcccctcctcgagaagtcaaaggcctcaccccgggccgggagcggtggctcacgcctgtaatcccaacactttgagaggccaaggggggcggatcacctgaggtcaggtggccaacatggtgaaaccccgtctctactaaaaatataaaaattagccgggcgtggtggcaggcggctgtatatcccaggtgaggcaggggaaacacttgaacccgggaggcggaggttgaggttgcagtaagcggagatcgcgctactgcactccagcctgggcgacagagagagactccattaaaaaaaaaaaaaaaaaaaaaaaaaggcccatccatacagtctctttttcaggccccaggaatctggaccctcagttccttcctctctaggacctgggagccccagttcccaaactccttcccacgactcagaaagacagaaccctcacccttccgagcctgggttccggcggaggaagggttaagtggggattgcgcggggcgggggcgggaggaggtggctcggaaacagccccgacgcggcgcgctgacgccacggcgctcacgcaagggaatcttccatcctccccttccccccaagtcctgtgccccaggtgtcctgctccgaggcggggcgcgcggccgatcgtggcgctcgtggaatccccgcgcaaggggaattcctgctcagccccgcacgggtggccatccggaaatcccagggcggggcagaggcagggtcaccgccagcgtagaccctgaggccaggctccggacccttccccaccgagacccacgccgattttaagcaaccacgccccccccccccccccccgcactcagcctagtccctgcttctaggggtaggagtctcggttgccagcaacccctagcacctccaaggacccagagatccagcctcccaagcctcccagcccttgcaccctcggggccctgcgatcctggatccccaggcccctgcacccccaggacccagaagtctgggatcccagccgcccctctgtcacgatccacgatcccctcctcctccaaacacctagggccctcactctcgggataaaggactgacgcttcagctccgtccctcagggcctcgggagtctttcgatcctcagtccctcactctcttagggggccgaacgcgtcctgcccgcgcccattacctcggggattccgtggcgtggattgcgggcccccagggccgcggcctcggcgctgcgccagcctcgctgtttcccccgcggagccgccgccgggtccccgatcttgggtccggtacccgcgagtttttaaactaggggttatggcaccgcccagtcctgggcagggcccgcccacaggcctgggagtccccgggtcgcgctccggcgaacgcagtccctgaatgggcgcggcggacttgggaggcggactactcagtccccccgggaaggagggagctggggtccagatctttgctctgaaggagcctagggcaccgggctccaagaggagggagaaaccggggggcctggatttcttttcttttctttttcttttttttcttttcttttttttttttttttttttttgttgttgtttttgagaaggagtctctgtcgcccaggctggagtgcaatggtgcgatctctgcaaactccgcctcctgaattaaagcgattctcctgcctcagcctcccgagtagctgacactacaggtgctggacaccatgcctggctaatttttgtatttttaggagagatggggtttcaccgtgttggccaggctggtctcgaactcctggcctcaggtgacccgcctgccttggcctcccaaagtgctgggattacaggcttgagccatggtgcctggctggggcctggatttctgggtctgtgtctaagggggtgctggaggctttgtctcctgggtcctgcccatgggggtaggggtaggagtggggatggagatggggtgggggcagggagaatattactgggtccagagggaggcaggactgggggtctagactcccagaggaagggtctgtgggtaagggtatagggtgtggctcaatttctccctctcccctacatcaccctttttagaggtctggtttcatttactcattcatcatttaaaataatttattgcagcagaggaggcattttgctgtgtattgtgaactaagcaggcaggaattcccagccctggagctggcattccagtgggaggccactctcagtttcacttggtgacctttcacagcactgaccatgttggccctatttctcccctgcttgcttgcttttctattttattttattattacatttttattgttagagagagggtctcattctgtcgcccaggctggagtgcagtggcaaagtggtgagatctcggctcactgcaacctccacttgcctcagtctcccaagtagctgggattacaggagcctgacaccatgcccgggtaatttttgtatttttgtagagacggggtttcaccatattggcttgaactcctgatctcaggtgatccccccaccttggcctcccaaagtgctgggattacaggcatgagccactgcggtggcctctcccctgctttcaagatgccatgctctcaggggtcccctccctctttctccatttccctggcaaagttcctcctcttcccccattcagtgtgtgttgtgataggggcagaatcctgtctgcactcacttccttggtgatctcacccagtcttgtggctttaagtaccatccataagccatcaacccccaaatttacatctccagaccagccttatcccctgaactcctaaatgcagtgaggttattcagcatctccacagggagattgtcaggcatttccaaccctgtatgcccaaacctcgtcactttccccgcaaacccacttccctacctttcatctctgccagcagacactcccatcttctcagcgtttcatgccagaaggcttggctgtctaggatccctctcaaacacacccacattcatttaatcagcaaattttcttggccctacctccaaaatatttccagatctccctagcctgcacacccttgccacctgtcattcccacttggaccaggccagcagcctccctggtctctctgaccctccccctgagttcgttcaccaaaggcagtaacggagacaccccctcaacacacacaggaagcagatggccttgacaccagcagggtgacatccgctattgctacttctctgctcccccacagttcctctggacttctctggaccacagtcctctgccagacccctgccagaccccagtccaccatgatccatctgggtcacatcctcttcctgcttttgctcccaggtgaagccagtggtt

SEQ ID NO: 1560759 - DNA, 4001 bp, Homo sapiens
ctgtctggctcattccctcctttcctggtcccaggtcaggcctcatcatgtcccacctattgcattgccaagttcctccctcaccttctggcctcccctccatgtctacaggggggtctttctggcacccagagctgacactgtccctcccctgcccacaatttttctcccaactccccatcatgttcaagagaaagtccagcatgacattagaggccacagcccccacctgcctctccctcttcattttccatcccccgccccccacattctatatcctgaccctaaattaccgatcttcatccccacaagactcctgacttttctgcacgttcatctttgggcccctctgcctggatattacctttccctggcccttaagaagctcctaaatgttctctctccagaaaagtcgtctccatccctccacaatatggtcagtctttttccggcattctccctgcactgggactgctgtctggcctgtattaactgcttctggtctgtaagtgcctcctccccaccaccccacagactgagcccctgctgggcagggcctgggtctgacccgtgccagtgtccccagcatggggaaatgtgcaaagagaactgactgagtgcaaggaagggctgagttctggcaagggggacaaaatcagagagggagagagaaggaaagagagccagctaaagggagaaagacacagggaggaagaaaagtgctggagaaggggagacatagacacgggttggagcctgtgtccacacgggccgggcactcgtactgggcaggagcgccctgcaggctggtcggcctggtgggccctcaccttcccttggtgcccagctcctaccatggagctggcagacagttggcttatgtcttggcagaattaatctcaaaataaccagattccagccaaattttgttgaatgaatgaagaaacaagaggaggggctggggaagggctggaagggcgggcagatgtgggaccagactttcccgaggctccagatgaggcctttggaatacaacgctcaaaactcatcttgccgctcttgccttctgctcacaaggtttcatagccaggacggggaccgccacagtgagcacccaggctcagggcacctggggagccagaaagagtttaagcacttgcccctgccctctgtcctcagggaccccaactggaccctcccaaagctccccagggcagtgggcaggatagtcacctgtacagagcaagaggatagctgagacccagcccaggtagaaggaccaggagaagaaggtctggatctgggggtgtggaggctggtcccaccgctcgctggtgtacaccgccatggccaccaccatggagatggctggggacaaggacaagagagatggctcagctcctcggcaggaattcgctggctcgcgatgccccagtccagtccagagtccttacctgcagcaaaggctgcggtggttgagacaagcgggccgtggcctggggggaacagtgaggggaagcaggacaggaccaggaagctcacggacaccagggcccacagaacagccataatgctgaaggtctgcgtcacgtggatgtagcctgatcgggagaagaccactgagcacccatccccgctggcaacccctctgtaggacacccattccccttacctgatatgatgtccccatgccctgttggccagaggcccgagtgagctgagtgggtgggacccacagcctcaaaccagaaatcggtgctcaaagcaatcaggcagaacatcaggcccagggagccccccagcagggccagggaccggcagagctccatggggataagctcagggcttctgggtcctggaggaggaagaggctgctgatcagactcttgaatctcagagagaaggaggctgtgcacccagactcctgggtccttagagcccaagaaagagagaacagcaagcagttggggcagtgaggggtcctgcgctttgtcacatgaggctggtttggtttcacacagttcccggtagcttttcacataccctcccttcctggattgcacaggcaacgtcctccctcccctccctggggtccagttccccgcttagtgtgtgatgggggagggcactgagggtgtcagatcatcagtggtttgggcggtggtttagtacttgcctctgtcacagattctacaactcccacccatggaaccttcaacaccaagtcggggcttcctggaagaggtgagagagagaggcttgggggccctgaggtgggaggaagccaatcaggctagggtgtacattaagggggagggcagatgtggctggaggggacagctggggatgtgtcatgctttcctgtgggttatgcagtcttccattctgggagaggaagtccccaagtctagggtctctactgaaggaggggacttgggagttagaactcctggggcttaaggaggaaggagctgggggcctgaactccaggtcctgagggaggaagaggcgggcaggagctcagaatcctgggccccagtttggagcatatgccaagggcaggcaaacagcagagaatcacaattctgaaaggtttgcagagagtcagacatacccacatcctcatctgattaatgagttcagtggcatccctgcttgggtgggggctccagcctggtggcctttatcaccaggatcggggggcctagggggtgttgggggacataaggattttggtttagggttctccagccccccaaacgctagcctcttccatccacaccatcaggtcctggcaacacctcatctacgagcaggtataaggtgacggtaccacagcccaggtagaaggcccaggaaaacttgacctctgtgaaacggtgatatggttagggtttgtgtccctacccaaatcgcaccttgaattgtgtccccataatcctcacgtgtctaggtagagaccaggtggaggtaattgaatcatggggccggcttcccccatgctgttcttgtgatagtgagtgagttttcacaagatatggtgtttttttaaggggctcttcctgccttcgcttggccttcttcctgccactctgtgaagacagtggcttgcttccccttcaccttccaccatgattgtaagtttcctgaggcctccccagccatgctgaactgtgaatcaaataaacctctttcctttataaattacccagtctcaggcatttgttgttgttgttgttgttgtttgagacagagtctcactcttgtcactcaggctggagggcagtggcaaaatctcggctcactgcaatctccacctcccaggttcaagcagttctcctgcttcagcctcccaagtagctgggattacaggtgcccgccaccacacccagctaatttttgtatttttagtagatttcaggtttagtagattttcgggttttcaccatgttggacaggctggtctttaactcctgacctcaggtgatctgcccaccttggcctcccaaagtgttgggattacaggtgtgagccaccacgcccggccaggcagttatttatagcagtgtgagaatagactaatacatagggagtagtctggaagaggacctctgtcttggagatgaactggtccagcagtcccaggacagctggcaaatgtggagaatgggaaatgacctggaagactggttcctctcctttattggagagactcagatcggcagcccccatccttcactcagatctgcaccactctgagaacacatttatgagcacaggctcccagaggtggcagaggccatgagcaggccaggtctccggaaaacctgccatggtgtgcagtgagtagcaggtcagagcacacagcctatctatctgtgaccctgaccccctcccaaacccaaagccatccttaaccccaaacccaactccatccccaaactcagtatcaagcccagttccaaccacaaattcaacccatccctatccccaaagttaac

SEQ ID NO: 1560760 - DNA, 4001 bp, Homo sapiens
cacgctcagggtgctggatacctagtcatggagtgaatgagggagggagagagcaagcaagtgggtcttcccattgctgacctttgctctccgttccccaggctactccctagctctgtcttccccaacgccagagccagccaacaacccagggctcaccatccctgccccatgtaccctgtaccctgctgagccagaggagggagctgagaagagaccagagcagagccagggtgtcggcagagggaaagggggaaggagagggaggccttcactgcctggcgcaggatggaggcacggggcaggcctggcctggaagccttggaccccaacaggcaaagctgaggcagccagcctgagccccatggccagggacgcacccctcctagatagggaacagggtgtggatgaagagggcaggtgcaagatgctaggcagggagcaaggagagcaggtgggaagtgaggcggcaggagtggggacagggcccccaagaaggccagggtgagcaccggagctgtaggcagtgaaggagccacaggccgctggggcgggcaggggccgggcatcagtgggctcgctgggcttcaggaggacgccagccgcggagggtagagctgggccactcctggccatggctggtgccgtggtgggtaaggtgggcgcctgaggggcgctggcaggttccttggggacagtggaggttgcaggcagccccttctgggcttcgtgaatggggcagagccgctgccgcagggggctgggaggtgagggctgggactggggctgccgctgctgctgcaggacggagggcaggaggccccggcgccagccactgccacccacttggtggctgtggtaggccagctgccagtgtgattggggggaaggccgacagggcccatgggctcggagggccgctgagtcctggcgccactgatgacagcatcctggaaggaaggaagtgggggtgactgggcctgtgtccccgacccccgggggcaccggcacaagccagaccaagtcttcaggtagaacctgggggccagagtattcttgggagccccagaaacccctcaaaaagtaagattatgtgcgggggaggtatgggcaggggagggacccagggtctgtgctgtcccatggcgggggagcagggaaggtgcaggcttggacttcagctgggggcagagagaggacgcctgaggttggggcttcaatggaggctggtgcctgccacagcagattcctggatccctggggggtgccgccagtgcaggggtcagggaaactgagaagatccattgggagctggccctggctggcccagggaggccggagtgatgggtggtggcgtggagaggggtaggccagggatttgggtggggggtggaccttgtccccagctcgggccagggtggcaggaagggtggtgacctgggaagctccagccctcgccctagccctgaggaggctgaatcagccccagtgggagggcactgccccctccccaccctgaacaagatcacctgtggtcaccaccagaaactgggcccagcctcatccagacatgttcagtgggggggctccctctcctacccctcactcccagcacactgctcccctccaggctggaggccatccacacaggcctcagggtttggaaacggggcagggcaggccaggcggcccctgcttccaactccagcccaggctcctatctttgggcccgcaggccctgtggtccgggtcctgggtcccaggccctgctgctacacagatgcctctgggtggagtgcaagtggcttttctctcctggggatgacagctccccttctgttcctccattcactctggcttcctcacaggcctctgtcggccatcacccgcccccaaactgaacccgtaccttttcggtgccccaactctgggtcccagaagtagtgcccgttggggctctgggcatccttggcgaagtggactttgtaatgtttgtgcatggcagccgggcagctgggtgctgggggcctgctcctgaggcaggagggagcacacaggcttggcgtagcctctggggcacgaacagcagagagctgaggtcagggtccctgccctgcccgacagcttggacaggggaaaggccaagtcccagatgctgggttcctaggtcacttgggagaagggggtagaggtggccttcagggtacagtgaggggcaggataaggagggatggccagaggagggaacggagaaccgctggggttggctaggggttaatttgaggctgggtgttgggaagctcctgggagtttccaagaggctaggacactggggagtgctgagcagacatgggctggggaaatagggggtccggtgtggtggctgagtgaccaaggggtcattaaggtgtgggcgctgtgggaggctggcacgctttggaaggacatggagctagtgaggtgagctggagagcagatgagaagcagggtgagtgaaaatcagagctgggtacctgtgggcattgaatgatacggtggagggggaattgtgagggagcaatgaaatcgcggtggtccaatttggggagaggctcagcaaactcgggcaagatgggtgtaccgcgtttccaatgtgaagagccgaaagcaggacagggaaggatgctgtgtgggggacagggatagggaaaggctgaggggcagaggaaactggggtgctgagagttggtagcctgcccaccactccccacccccagtcccagtcccactcgtacctgacggtggcctcacggccccagctgcctgccccacgagcagctgccacaccagcccggactgtcagcgcaggcccatccagatggaggcctcagcccagtgcccgcctgaccggtttgcctgcctgtccccgccccttccccagcgcctgcctgtcccagtgctctctgctctcgaggactgggactccgactggactcagtcttgtgtccccatccctggtaaggaacggagatgcatcccgcagcactgcctcaatctccttaaggcagccacaggcccaggcacttctgctggtgtgggggggacagggagctgggatgccagctcctccgtggcccaggtatgtgaccttgggcaggtgacttcactctccgagccatggcttcctcattgctgagtgggcacctgcctctcgtggctgtcgcgagggaggcactgggtgggagtcccctcagctcagggcctggcgcacctgacccggggctgtgctgacccatttacctggcgctgttctaaatggatgtccataggacaagggcaacagcacacacatcaaggcttgctacaccatagccccgtcttcctctccaccacccagggggccaggtgtgatgcccgcttcacagatgaggacactgaggcccagagaagtgaagtcctcggccccagggcacacagaggcagggcggggatttggaagcagtcagtggttgctactcccaggctcgccaaggctctgtctcctgccctcggggccagcactcagtgactgcctccccacagatgccctctgaggggtgagggccggggtaaggctgggcaggagatgccctgaaggcccctcggctctctggggccccggctccctgtggctgctggcgtaacggggtcaacagttgcttccctgacagacggggtgctccgatggggatgggggaggcagccccagaacagtgcccaggacaagataaagggaacccacccagccctgagttctgcccaggtgaccaaacactgctccctacggccagagccagggcccttcctgcgacctgggaccccgtctcctcccccacccttcaagccggttgctctgggaaggttcctccctggcccaccagggaggcggggctggcatctgagcgtgggcatctgcagtgggcctccgtgccaaccccccacacccccggcccgatcatgaagcgtggcccaatgtaaatgag

SEQ ID NO: 1560761 - DNA, 4001 bp, Homo sapiens
ctgtattgttcaagggtccactgtaaatctgtttaacacaagtgttttcttcttttaaatcttgtatctaggtgtttttcccccctaagtgaacacaagtagattagggattagtaagttaagcctcaccaagtccaacccttccccaaattcccaaactcttccctcctttgacttctatttcaccattgcctttgagccccatccttgtaactgagagacttccgagttcaggagtcaactgtatttctttctagtgatatgtttgtctaataaagtagttacctttagactcaaacagtccatatttccctaaacactgttgtatgagctttgcttgtgttctttaaggtatgatttttaagtggtttggtaataatgcaccagaaatatttaatcatgaccctctcagtctttaggtgtttctgatttcatactgtgacataggatcattcaaggaaaattccataagctttttgcctagtgatggcttcttagcttcctaaaaaaaaaaaaaaaaatgcaacgttgagtgtgtgttaaaagctcttattacttttcccaaagggcaaaatactttttttacaccaaccttttgtacactcatctgaccacactgcaatgctttttaagttggttgctggaatttgctgttgactgaactataaggtgccaactgaactatgaggtgatctccaacacctgcaaaaaagctgacactacagcattgcacgtcccaagtcggcgttgcatcagattagctgatcaccgcacagttgggcacttcaagcacctgtgaccagactttctcaagcactgagacacaggggaatcacctggggagttatcaaaaaccccagtgtcccgaaatacagacactgattagagactttggaggttgggcccaggaaccagtatattgttccaatcccccctgtaaattcagcactcaaagttaagaatcaatttgtaaactaaaaataacatgttaagacccaccgccccaccccccccatcccccccacccccccgcccacaaccaactgagcggaccccctcctggccaagatacttgaaaaacagaatcattgactatggcaggaagggaggtcaaacctcctcctatctccttcctttcggagcctaggcacaactgacgggcattaacattaaaatagagctcaggaccgggtgcaggagctcacgcctgtaatcccagcactttgggaggtcaaggtgggcacattacttgaggtcaggagttcgagaccagcctagacaacatggcgaaaccccatctctactaaaaatacaaaaattagctacgtatgctggcgtgtgcctgtcattcctgctacttgggagtctgaggtgggagagtcacttgaacccaggagacagaggttgcagtgcgctgagatcacaccactgcacgccagccttggcgacagagcgagactccgtctcaaaataaataaataaataaaaatattcttttcatctctaacactttatacatcacatagaagaatagcatccataaggctatgatgacgagttagttaggtttaaacactccacccacagtgcacatacacttcaaaacatcatgctgcacacactacatgcaattttatctgtcaacttaaataagtttatcaaaaaaaaaaaaagcatgacccaaatttactcatgtgaacttgaaaaaggtaacagagcttggcctgcccttaggaactttagtcattttattccccaatcatattatttccagctcctaaccaaagagaaagctaaagaaccaatgtaacataataaaaaaagaccttaaaatccaaacaaacaaatcggccagaaaggtaactcaccaaccctgccaccaggtctccttggctggtcgaaagcaaacaagctaggcagcgggaagaaaaaggcggtgcctgcccggtgattagccagctgactcctctcttgattggccaaggtgggttcttgatgaccttcgcgatggaggggaaatactgctgcacctgcgtgtttctgcccagatgccccaattgtctttcttcacccaggactaaacagggtctgctgattaggagacggtccacaccccgtttatgatgttggagctcatggggcatctgaccaagaacctccaaaacaattgacttaggcagtgccgggggaaagaagttttccaccaataatctcaatttcggataaccatctatacagtaagctccatgaggggaatacgctgtctagtctacataaccacctggcaaggatcctttcaaatctgagggaggccataaatatttgtggaacaaatgcaaccaaaggcatgtttaacaggtgatagaatttgcggaggcacgtcctagatcctccacccggggggcccgtcttggctgcctattggaatcacctggagacctctagtgaagactgatagctcagtcctatgcgcaggtatctgctttagtcaggagggagtatgctctgggtatgactgatagagctcctcatattgaacagattacagaagaataggggcatcttcataggtgcaaaaggggaaatataaaagagtctatatctattcatggttttagatgtatctttgtaagttaggaaataaaagaatttccttcacccagtaaagggttccaaaaaagcaagagcaaacaaaaatctcataatggacgggaaagtgatgaaagaataccttttacaataagatacaagataaacaaggcctccgtcaccactcttatttcaacatagtgcacctgttcactgggacaagaaaacggatctgaaagaaagaggcgaaattatcatattggagataatttgaatatccatgcaaactctctccccttaaatctattgataaattgttaggattcaaagcagctttggtgaatataaatcaacatacaaatctgattgtgtttctctaaaaaaaaactaattggaatttaaaattttaaaggatgccacatgcagttccaagaaaaatataaactagaaataattcttataagagattgtaaatcttattgaatgatatacaatgttattgccatatacaaaatccttaaaaatgaaggataacattacattcttgtacaggaattattattatgaagatgttaatatgctcccaaatagacctttatattcagtaaaacaataaaatcccaatagaaattttcatatcaaaatataattctgaaatgtatgtggaaaatagaagggactagtacaagccaagagacgcctgaagcacataggtgggtgggaggtgggaatgatgattgagttggacctaccctataaagatttaatttaaaaactatggtaattaagacttattggttggccgggggcggtggctcatgcctgtaatcccagcactttgggaggctgaagcgggcagatcagaaggtcagaagatcgagaccatcctggctaacacggtgaaacccccgtctctaccaaaaatataaaaaaatttagccaggtgtggtggcgggcgcctgtagtcccagctactcgggaggctgaggcaggagaattacttgagcccgggaggaggagcttgcagtgagccgagatcaggccaccgcactccagcctgggcgacagagcgactccgtctcaaaaaaaaaaaaaaaaaaaaaaaaaagacttattggcacacggatgaacaaataatagtgaaaaaaacatagaacccagaaaccaatgtaggcaaatacgaaaagctggtttataacagatttctgggcagtggcgtaggtgaactattcattaaatggagctggtgccatttgtatttaaatgaaaaaaaaaaaatggatcccttctccctaccttagagaaaaataattacaagtgacttaatacttctgtgtgaaattcaaaactctatcatattttaaaaggcaatattagatatcttcatgagttggagtagggaatgatttttg

SEQ ID NO: 1560762 - DNA, 4001 bp, Homo sapiens
accgtgaggcaagacctagaaatgaaccgcagctataacaaactcgcattgattaatctcaaaaacataataagtgaaaagaatcaagtcacagaatgatacactataattcgaaaatgaggaaaacaaaacatatctcttaggggaacatgtatcaccaggaaaaataaaaagaaaatcgaagggaatgaagttcacttcacaactggaaatttattttggtgggaacccctgaggatgcaacgggcatgctcttatgggtacatgagtctgcaaaggtccccatcatgtctgcttcccaatctaggttctggaccacagagacttgtgttatggttacagtaattccttaaagttctcattatgtttctctgcactccttgatgtgtatatttcaaaaccaggatcatcaccatcgtaacactgaactcaggattcttataaggaggaactaaaatggtgattgtaaaaggatagctcctaggacactgaggtttggcgtgaacccagaagatgactgtaacgattgtagggaagctggaatagcaggaaaaccatgcccaatgatgaaatctcgaccttgcgtctaaaaaacttagcgcctgttctgcctacgcagaaagacagtagccgatatccattaagttcttcttgcaggccaggcacagtggctcatgcctgtaatcccagcactttgggaggccgaggcgggcagatcacttgaggtcaagggttcgagaccagcctggccaacatggtgaaaccctgtctctactgaaaatacaaaaattagccgaggccaggcacagtggctcatgcctgtaatcccggcactttgggaggccgaggcgggcagatcacttgaggtcaagggttcgagaccagcctggccaacatggtgaaaccctgtctctactgaaaatacaaaaattagccgaggccaggcacagtggctcatgcctgtaattccggcactttgggaggccgaggcggtcagaacacttgaggtcaagggttcgagaccagcctggccaacatggtgaaaccctgtctctactgaaaatacaaaaattagccgaggccaggcacagtggctcatgcctgtaatcccagcacttcgggaggccgaggcgggcagatcacttgaggtcaagggttcgagaccagcctggccaacatggcgaaagcccgtctctactgaaaatacaaaaattagccgggcatggtggtgtgcatctgtaatcccagctactcagcaggctgaggcaggagaatctcttgaacccgggaggtggaggttacagtgggccgagatgacgccactgcactccagcctgggtgaccgagtgagaccgtatctaataataattaataatttcttcttgcacgacaggtttagttacggcagaaagatgttgtgccacacgaacattcttcaaggagtttagcatgtaggaaggaattagacatttaaattataaacagagtcaccccaactctccaaatgaaccattttggagagactggaggagcatccctgcagccgtgagccctgggaattctcaataggaacctccagcttgaaatatcccccgctctatacgacaccaggagcaaaggtctagaacagcccctcaaggggcggtgggcgtttcgcttcacatattttctggatctgttcatcaaaagccctctgagccaatggcaagggagcaattcgttggccaatcaaatggcaccacggatcttttcttcccgcttccagccgccaatcattaaggaccaggaaggcgtggagcggtgagtcagcgcttcgtgctgggctgttcgtctcttctatgtgctgatttcctgggttactttgggtcttccttttctttctcccttttaccctgtctcctttcttgaggctgatcgatcacagccaggcctctccattctatttacccagcgttttccttctctccagttagtggggtagatgaacgccctgtgtttataaggtgcctcccaggagcctgagacctgtgagaagaatggggggtggaggtgggggagactcgtcacgaagggagaccttggagcttcgagggtgggaatgttcttattagattcttcatctctgttgacacaaacatgtaggagaagctggagaacatagacagggatgaggtaaggggggggacttcccatgaaaggtgggacccaagccctctctgctcttgtgagcttgctctctgacctagggcagaaacgtctttgatactgtaattccagaatgtgatttaaaaagaaaatcacacttctagttgactcatactaattatgtatattagctgcagagagatgtgttggtacatgtatacgtatcattaaatcagggtaatgagcatatccatctcctcatacctgtatcatttctttgtgttaggaacattcagaatcctctccttaggtgggaggagggagagggtcaggaaaagatagctatggggtcctattcttaatacctgggagatgaaaaactgtacaccaaacccctgtgacacgagtttacctgtataaccagtgtatatgtacccctgaacctaacataaaagttagaaaaaccctcgaaaataataagatattaagtatattcaacctatagtgctactgaacaccagcacctattcctacctacaggtgtaacttggtatccattagccaacctcttttcatcccccttctccaattatgccatttgtttagactatgaaacgtatatagaaagaatatttatctttctatatcaataaaagttggtttttactgttaagggttgaattgtgtcccaaccctaaaaacacacacacacacacaaagtcctaacccctttatagggtgacaaaataaggttgttgcagatgtaattagttaaggcgaggtcatactggagtgagtggcccccctaacttaatgacgggtgtccttatgaaaacggccacatgcggctgggtgtggtggctcatgcctgtaacaccagcactttgggaggttgaggtgggtggatcatctgagctcaggagtttaagacaagcctggaaaacatggcaaaaccctgtctctactaaaaatacaaaaatcagctgggtatggtggcaggtgcctgtaatcccagctactcaggaggctgaggcaggagaattgcctgaacccaggaggtggagattgcagtgtgccgagattgcaccattgcactccagcctgggtgacagaatgagactcggtctcaagctggatgcagtggctcacacctataatcccagcactttgggaggccgaggcgggtggatcacccgaggttgggggttcgagaccagcctgaccaacatggtgaaatacaaaaaattagccaactgtggtggcgcatgcctgtaatcccagctactcaggaggctgaggcaggaggattgcttgaacctgggaggcagaggttgcagtgagccaagattgcgccattgcattccagcctgggcaacaagagtgaaactccatcttagaaaaaatggccacatgaaggtagagacaagcagaatggcatgtgacaaagtcagagtgaaattacatagctgcaaaccaaagagtgacacaggttgccagcaaaccacagaagccagtaagaggcaaggaagggctcccctgggtttcagagagagcagcaccctgccaacactttgattttggacatctaggctccagaaccatgagacagtaggtttctgttttaagttacctagtttgtggtacgttgtcatgccagcccaaggaagctagtacgctattaaaagaaaaaaatgatgtgattttacacttagagaacagcttcaagaatatatccttaggatcaccaaatgttaaaagtttaccttatatggtgtccctctactcttatataagtatttttcctgatctgttcaagatttgtacacattgtacaaatttacatctaataatttacc

SEQ ID NO: 1560763 - DNA, 4001 bp, Homo sapiens
cccaggagttcaagaccagcccgggcaacataaggacacctcatcttggccgggcacagtggcttatgcccgtaatcccagcactttgggaggctgaggtgggtggatcacgaggtcagaagttcaagaccagcctggccaagatagtgaaaccccgtctctacaaaaaatacaaatacaaaaaattagccaggcatggtggcaggtacctgtaatctcagctactcgggatgctgaggcagaaaattgcttgaacctgggagacggaggttgcagtgagcggagattgcgccactgcactccagcctgggcaacagagcgagactcagtcttaaaaaaaaaaaaaaaaaaggatacctcatctctttcttaatttatttttgagatggggtttcactctgttacccagcctggagtacagtggtgcaatctcaactcactgcaatctccacctctcaggttcaagcgattctcctgcctcagcctcccatgtagctgggactataagcgtgtgccaccacgcctggctaatttttgtatttttagtagagacagggttttgctatgttggccagactgatctcgaattcctgacctcaggtgacccacccgccttggcctcccaaagtgctgggattataggtgtgagccactgcacctggctacctcatctcttaaaatatatatacacacacacatatacacacacatatatatacacatatatacacatatatatacgtgtgtgtatatatatataaattccagatctcccaggctcagggattttatatatatgtattttaaatatttattttaataatatatgtattaaatatttaatatataatatttattatttatatatatttatataatataccatatttatataatatagtatatttatataataaatatatactatatttatatataatatataccatatttaatatatatttaataatataattatatacatattttaaatatatatttaaaatatatgttttaaatatatatatttaaaatatatgttttaaatatatattttaaatatatatttaaaatatatattttaaaatatatttatttaaaatatatatttaaaacatatattttaaatatatatattttaaaaaaatatattttaaatatttgaggcaaggtctcgttctgtcacctaggctggggtgcagtggcaggatcatagctcaccgcagcctcgaccttctggtctcaagtgatcctcccacctcagcctcctgagaagctgggatcacagacgtataccaccacacctggctaattttttttatttttggtagagacagagcctcactatgttgtccagactggtcttgaactcctcacctcaagtgatctgccctcttcagcctcccaaagtgctgagattacaggtatgagtcactggacccggctggcattctagccttgcctgtcccgccacctccttacccctcaccaggtcctctctctgtcctctctcccacaggtccttcctgtttatccgctcaaaggtgctgagagccaacctccaggcctcctctggcccgaagtgggtgatgagcagctgggccatttccaggggaccggccttctccatgcttccccaggggatcttgccttctcccagctctgtcgcggtccccaggtataacttgaacttcttcagttccacagcctcgagttcttccaagtaggtggacaggcgacagaggccgtccctgcctgcggttcgtagcatgggggtgccgtgagccccaaaggagaggacctggaggctgagatgctcctatgcacgggacacagggcgaccccagcacaccttccattgcatcattcacaggcagcgggcggagaggctgagccagtggttggaggagagagcaagggaggaaagaccttttgctgaaataatgctttctcactcttcagttccctcctgccctgccccactcaccaatggctgttctgggtggagaagaggaagttcggggggagattaagaaatccgaggagccacttggctgatgaaaaagattttcacttctgctgtctcttcctggatctcttgacaaaacagtcactctctttccgctttcctcttgttttcctcatttcactagtgtgtgtggtagagtgtattatcaaaactgcgactgcgcctcttccagggagaatttttttttttttgagacagagtcttactctgtggccctggctctgcgatcttggctcaccgcaacctctgcctcccaggttcaagcgattctcccacctcagcttcccttgagtagctgggattacaggcgccggacaccacacccagctaatttttgtggttttagaagagacagggtttcaccatgttggtcaggctggtctcgaactcctgacctcaggtgatccacccgcctcagccttccaaagtgctaggattacaggtgtgagccaccgtccctggcttttttttttttttttttctttgagtcagagtctcactctgccacccaggctagagttcactggcgtgatctcagctcactgcaacctccgcctcccaggttccagcgattctcccacctcagcctctcaagtagctgggaccacagacatgcgccaccatgcccagctaagtttttgtagttttggtagagacaaggtcttcttatgttgcccaggctggccttgaactcctgagctcaaacgatccgcccacctcagccttccaaagtgctgggattacaggcatgagccactgagcccagcctcagggagaattattaaggacctcacgtaggtctgctattttttttctgttctctcagtcacaagagtggcatgagagggactttgcggtaggcaggatgatggtccccaaagatattcatgtcctaatggccagaacctgtgacatttcaccctacatagcaaaagagacttagcatatgtgaccaaatgaaggcacttcagatggggacattatcctggttatctgggcaggacccatggaatcacaagagtcttttttttgagacagagtcttgctctgttgcccaggctggagtgcagtggcacgaactcggatcactgcaagctccgcctcccaggttcacaccattctcctgcctcagccttccgtatagctgggactacaggtgcccgccaacacgcctggctaattctcttttttttgtatttttagtagagatggggtttcaccatgttagccaggatggtcttgatctcctgacttcgtgatccacctgcctcagcctcccaaagtgctgggattacaggcgtgagccaccgcacccagccacaagagtctttataagaagaagacaggagggttagtgtaagaggaagatgtgactgggtgcaatggctcatgcctgtaatcctagcacttggggaggccaaggcaggtagatcacctgaggccaggagtttcacaccagactggtcaacacagtgaggccccatctctacaaaatatgtgttagcagaatttatgaattctgatggaagagcaagtttataattccctctgtctcctgcatcatgccaactttgtttcatgctcctaatcaattaagacccctcagacacacacacacacacacacacacacacacacacacacacacacacacaaaagccttcatagccaggcgcagtggctcacacctgtaatcccagcactttgggagactgaggcgggcagatcacctgaggtcaggagtttgagaccagcctggccaacatggtgaaaccccgtctctactaaaaatacaaaaattagccgggcttggtggcacgcacctgtaatcccagctacttgggaggctgaggcaggagaatcacttgaacccgggaagcagaggttgcagtgagccgagactgcgccactgcactccagcctgggcaacagagcgagactctgtctcaaaaaaagaaaaaaaaaattagct

SEQ ID NO: 1560764 - DNA, 4001 bp, Homo sapiens
ttcttataaatatagtgaagagtcagtacaaatgtatagacagcattaagataaatgcctggtttatagccaggcatggtggctcacgcctgtaatcccagaattttgggaggctgaggcaggcaaatcacctgaggtcagaagtttgagaccagcctggccaacatggcaaaaccccgtctctactacaaatacaaaaattagccgggcatggtggcaggtgcctgtagtcccagctactcgggaggctgaggcaggagaatcccttgaacccaggaggcggagagtgcagtaagccaagatcacaccattgtactccagcttgggtgacaagaaggaaactccatctcaaaaaaaaaaaaaaaaaaaaagagtcaatgtctggtttataacaggcaccaggaaacatgattattttcaacagctctcataggcagtcagttcttttataaagtgatgtgtgcattctgaaaactcaccacagcagattacatggtgcactaagaccagacggcttacaggagatagaatcagtgattatatatatatatatatatatataaaattttaaccagaagcttaaacagcatggttttatacttgctgattaattacaaaacactttattaccacaataaacactgcacgatcctacaacaccacaatcagccctgtaacacctcagcaggtcttgcaatgccacagaagatgtggcatgaaactttaccctgagtaaaacatgaactttgcttgtgaatatgggaagtgtcgcagcttgtgagtttttgtgaagtgaaagaacaatgatctgaaatcagacagaaagtgtagaatgggcaaggctcgtactgaggaagcgggtagatgtttgaggtacatgcctgtgtgcattgtgtacaatcctacatggctctgctcggctgagtgcagggtcggtgggttgcgggggcagggcgggggttgttgtggtttcttagtgtttctcttgggcaaaaccatgcataagctaacatgaaatctgtgctgcactcaaattgttcccagtacgacaatcacactgggacaaatttgcatgtttaaaagaagcctgggctgggcgcggtggctcacgcctgtaatcccagtgctttgggaggtcgaggcgagcagatcacgaggtcaggagattgagaccatcctggctaacacagtgaaaccccgtctctactaaaaatacaaaaaaattagccgggtgtggtggcgggcgcctgtagtcccagctacttgggaggctgaggcaggagaatcgcttcaacctgggaggcagaggttacagtgacctcagatcgcaccactgcactccagcctgggcgacagagtggagactcaggctcaaaaaaaaaaaaaaaagaaagaaagaaagaaagaaaaaggcttataacataactgaatgtgcctcttccgattccctttcttgcctttgctactccttcccaggctagagcactaaatctttatagcctttatgcctttaaacatcatactgtcatagattatcaaggaggatttgtagggggagatcggcagtgtggaatgaccccacaaaaacccagcggctacctccttgcctcaggagtaccaagcagccctcccgccttccttcttgaggactctcacctttcatctcggctctaactttctcacacagtgaggtcagattcattgtctggaagatgccgaggaccactttccatgcctgaccttttgggaagtgttcatccaaaagaaaggacagattcaaagggtcggcagctctcaagtttgcccaggggatacgcgggaagtgcccctggggggccgaccagaagtccatcagctgctggggttccaagcaaagcttgaattcctccagctgatactgatccagggccatcaggtaaggcagaagcccttggttggtaccaccgttggggcaggtgattacagaaaagttcatcttgcccaacacatgcagtttctcacttcagcaaaggactcctatatccacaggacacttgtgacctgcagaaaaggagagagttgaaatcataagccataaatatcacctcctctcactgtcttgcctacacatttgagtattttcgcttcacagtacttcctgctacttgtgttagtacacttttttgttgttgttttgttttttgagatggagtctcgctctgtcccccaagctgaagtgcaatggtgcgatctcggctcactgcaagctccgcctcccgggttcacgccattctcctgcctcagcctcttgagtagctgggactacaggtgcccgccaccacgcccagctagttttttttgtatttttagtacagatggggtttcaccgtgttagccaggatggtctcgatctcctgaccttgtgatccgcccgcctcggcctcccaaagtgttgggattacaggcgtgagccaccgggcccggcctcaactgggtattttctctagcaaccttacctagactcgagatcactggctttcatcccatcccagaaggaacaatgccatcagcacctgatttatctgccttactaacagtgacagctgtcctagaaaagttacaggtgcatgatggtacttaccaactcacattcagagggttcacctgaaatgtgaataagaagaacattgaagttaattagtcacagtaaagatcaaagacatttgagagatgggaacgggggaaactaatcagggagaaggggtaacaaagagagaaaatagaagtttccgcccatcacgattttggccaccaggcagctaatggtgattgagacagatctgccactattcccccatagaacctggtccggcatgtatgctgggtcatgtcaaaataccaggtagtattgaaggcaacagatagacagcagaacaaaagacttttttttttgtgatggagtttcgctctcgttgcccaggctggagtgcaatggctggatctcggctcactggagtctttgcctcccaggttcaagtgattctcttgcctcagcgtccgagtagctgggactacaggtgcatactggccttggcctcccaaaatgctgggattacaggcatgagccaccatgcctggcccaaaacactatgcttgaagctactggtgtgtgacccccgaatgtctcccaaagagaaatctccagaagagatgtatgttaggacctaccctggcagcccaaattcattggactactccagaaattgttggagaaaagatggggaaagacacacagaggaaaacttgaaacatcatgaagaaaagccctttcaggtataagcagggaggataaagactaggggaaaagcttatttgagaatcaaatgacattaagctatcattgaacacccagtagaagctgagcaagggggctgggcgcggtggctcacacctgtaatcctagttttaggaggccaaggtgggcagatcacatgaggtcaggagcttgagaccagcctggccaacatggtgaaaccccgtctctaccaaaaatacaaaaattaggtgggcatggtggtgggtgcctgtaatcccagctactcaggaggctgaggcaggagaatagcttgaacctgggaggcagaggttacagtgagccgagatagcaccactgcactctagcctgagcgacaagagcaagactgtctcgaaacaataaaaaaaaaattactccatgctgcacttttgttgtatgtctcttgtttaaatttttaaaccgagaagaactgaggtatcacatcagccaccaacaaactcctccaagattatagggttaggttcccgtgagcctctcgtcacattttcatccactagtcaatacataaccttgttttatatgtgtctctgtttaaggaaacctaatttaatacatatcgttgattcattaacattgagcccaccgccagcaacactatagctcatgcctgaaagaagctcagctaacgcatgcattttcttcagaa

SEQ ID NO: 1560765 - DNA, 4001 bp, Homo sapiens
tctcgaactcccgacctcaggtgatcctcccgcctcggcctcccaaagcgctgcgattacaggcgtgagccactgagacaggcagaaccacttaatttctaacagaagaaaagatttaggccgggcgcggtggcacctgcctataatcccagaattttgggagtctgaggcaggaagatcgcttgagcccaggagttagagaccagcttcggcaacatattaagaccctacatctagtgagtctctgcaaacagtggtaataataatattattagccagaacagatgtggtggcaccctcccacggtcccagctacttcaaaggctgaggcgtgaggactgcttgaacctgagaggtcaagggttcagtgagccgagatcctgccacagcgctccagcctgggaaacagagtaagaccctcaaaaaagagaagaaaaaaaaaaaaaaaaaaaaaaaaaaggctgggcgcggtggctcacgcctgtaatcccggcaccttgggaggccgaggcggactgagaccagcctggccaacatggtgaaaccccgtctctactaaaaatacaaaaaaattagctgggcatagtggcaggtgcctgtagtctcagctactcgggaggctgaggcaggagaatggcctgaacccgggaggcggagcttgcagtgagccgagatcgcgccaccgcactccagcctgggcgacagagcgagactccgtctcagaaaaaaaatatatgaaataaaaggagaaattttaccaactgtggaatggagaaataaagaaatgaagttgcagagctgccggagagctactcacctcccaacacctggccctactcgccggcggagatgagggctgcaggttgagaaagctctaataaggcttctctctcggccgcagccctgtgattggccctcggggcgtaatcgttgctgagcacttcctgtatccaccggaattactgagaggtcttttgggggcggggggtgttggggggcggtccttcacctgagcttccggatctccacctgtggtcctccatcttgactgcctgttaaacttacctatgtggagcctcatttcaaagcacgaacgcctagagattctgcttgattggttacactgggactgcccagaccctggagttctttcgagagtcccagataactgtgattgcggccgaggctgagaatcaccgcttagaagcctcagctgtgattggctaccttctcccatcaccccaggtatattattaataaaaatccaaccgtatttcaagtgaaatatcaatgacacgtcaactatgagacgcatgaaaagcaccaagttcatcagtttcacattcacagtattattattattttatttttaatggagtcttgctctgttccccaggctggagtgcaacggcacgatctcggctccccgcagcctccgcctgccggcttcaagtgattcccctgcctcagcctcccgagtagctgagattacaagcatgcgccacaacgcctggttaatttttgtatttttttcaatagagacggggttttgccatgctggccaggctggtctcaaactcccgacctcaggtgatctgccagcctcagcctcctaaagtgctgggattacaggcgtgagccacctactaaaaatacaaaaaattagccgggcgtggtggcgggcgcctgtagtcccagctactcgggaggctgaggcaggagaatggcgtgaacccgggaggcggagcttgcagtgagcagagatcgcgccactgcactccagcctgggcgacagagcgagactccgtctcagaaaaaaaatatatgaaataaaaggagaaattttaccaactgtggaatggagaaataaagaaatgaagttgcagagctgccggagagctactcacctcccaacacctggccctactcgccggcggagatgagggctgcaggttgagaaagctctattaaggcttctttctcggccgcagccctgtgattggccctcggggcgtaatcgttgctgagcacttcctgtatccaccggaattactgagaggtcttttgggggcggggggtgttggggggcggtccttcacctgagcttcccgatctccacctgtggtcctccatcttgactgcctgttaaacttacctatgtggagcctcatttcaaagcacgaacgcctagagattctgcttgattggttacactgggactgcccagaccctggagttctttcgagagtcccagataattgtgattgcggccgaggctgagaatcaccgcttagaagcctcagctgtgattggctaccttctcccatcaccccaggtatattattaataaaaatccaaccgtatttcaagtgaaatatcaatgacacgtcaactatgagacgcatgaaaagcaccaagttcatcagtttcacattcacagtattattattattttatttttaatggagtcttgctctgttccccaggctggagtgcaacggcacgatctcggctccccgcagcctccgcctgccggcttcaagtgattcccctgcctcagcctcccgagtagctgagattacaagcatgcgccacaacgcctggttaatttttgtatttttttcaatagagacggggttttgccatgctggccaggctggtctcaaactcctgacctcaggtgatctgccagcctcagcctcctaaagtgctgggattacaggcgtgagccaccgtgcctggctggcagtattaattttgtaaacatatagccgggcacagtggctcacgcctgtaatcccagcactttgggaggccgaggcaggtggatcacgaggtcaggagatcgagaccatcctggctaacacggtgaaaccccgtctctactaaaaatacaaaaaattagccgggcgtggtggcgggcacctgtagtcccagctactcgggaggctgaggcaggagaatggcgtgaacccgggaggcggagcttgcagtgagccgagatcgcgccactgcactccagcctgggcgacagagcaaggctccatctcaaaaaaaaaaaaaaaaaaaaaaacaccatataaataagactaaaaagttgggttttggccgggcgcggtggctcacgcctgtaattccagcactttgggaggccaaggcgggtggatcacgaggtcaggacttcaagaccagcctggccaagatgatgaaaccccgtctcaactaaaaatacaaaaaattagtcgggcgtggtggcgggtgcctgtaatcccagctacttgggaggctgaagcagagaattgcttgaacccaggaggcggaggttgcagtgagccgagaccgcaccactgcactccaccctgggcgacagagtgagactccgtctcaaaaaaaaaaagaaaaaagttgggttttatagctttttttcatgtttctttgtttgttttgctttttttttttctgagactgagtctggcactgtcgcccgggctggagtgcagtggcgcaatcttggctcactgcaacctccgcctccagagttcaagcgattctcctgcctcagcctcctgaatagctgggattacaggcgcgtgccactgtacccggctaattttcttatttttagtagagatggggtttcaccatgttggacagggtggtcttgaactcccaacctcaggtaatctgctcacctcggcctcccaaagtgctaggattacaggcatgagccactgcgcctagccttttttttgtatttttagtagagatggggtttcactatgttggccaggctggtctcaaactcttgacctcgtgatccgcccgcctcggcctcccaaagtgcttgggttgcaggcacgaaccaccgcgcccagcctttttcatgttttagaaccaacatatgtatatgtacatctatatttcttttcgttttttctttttgagacagggtctcactctgtcgcctaggctggtgtgcagtggcacaatcatagcttact

SEQ ID NO: 1560766 - DNA, 4001 bp, Homo sapiens
ctgggggtggtggctgacgcttgcaatccccgcactttgggaagctcaggtgggtgatcactccagtccagaagttccagaccagcctggcaacttaagaccctgtctctattttaaaaacaacagggccgggtgcggtggctcacgcctgtaatcacagcactttgggagtccaaggtgggaggatcacctgaggtctggagcttgagaccagcctggccaacatagtgaaaccctatatcgactaaaaatacgaaaattagccaggttggtgacaggcggctgtagtcccagctacttagaaggctgaggcacgagaattgcttgaacctgggaggtggaagttgcagtgagctgagatagcgccactgtactccagcctgggaaacagagctagactttgtctcaaaaaaaaaaaaaaaaaaatagcagtagcaacaaaaactttacagaaagggtataacacctctttatatgatagctgtgaatagcgtgagaatggcaactggcataggtatttgcataagactcaggtccggaagctggactagaatgatgctaagaggctccctcacctcagtgaataaaaaacaataccttcttgttaagaggactcattagacacaaaaccttagcactgcccaggactccacacacagcaaccacagcatctgacctgttccaatatatttttttttttggagctctctatagctctatcctaaatcccccaagagaacagaaataaaagcacacacaactatcctcttatgagccaaccttaactagagtctctctagatctaagcatctgctactctttccccagtcagaaccactgaattttattttattttattttttgagacagtttctctcttgctgcgcaggctggagagcaatggtatgatctaggctccccgcaacctccgcttcccgggttcaagtgattctcctgcctcagcctcctgagtagctaggattacaagtatgcgctaccacgcccacctaattttatatttttagtagagatggggtttctacatgttggtcaggctggtctcgaactcccgacctcaggtgatcctcccgcctcggcctcccaaagcgctgcgattacaggcgtgagccactgagacaggcagaaccacttaatttctaacagaagaaaagatttaggccgggcgcggtggcacctgcctataatcccagaattttgggagtctgaggcaggaagatcgcttgagcccaggagttagagaccagcttcggcaacatattaagaccctacatctagtgagtctctgcaaacagtggtaataataatattattagccagaacagatgtggtggcaccctcccacggtcccagctacttcaaaggctgaggcgtgaggactgcttgaacctgagaggtcaagggttcagtgagccgagatcctgccacagcgctccagcctgggaaacagagtaagaccctcaaaaaagagaagaaaaaaaaaaaaaaaaaaaaaaaaaaggctgggcgcggtggctcacgcctgtaatcccggcaccttgggaggccgaggcggactgagaccagcctggccaacatggtgaaaccccgtctctactaaaaatacaaaaaaattagctgggcatagtggcaggtgcctgtagtctcagctactcgggaggctgaggcaggagaatggcctgaacccgggaggcggagcttgcagtgagccgagatcgcgccaccgcactccagcctgggcgacagagcgagactccgtctcagaaaaaaaatatatgaaataaaaggagaaattttaccaactgtggaatggagaaataaagaaatgaagttgcagagctgccggagagctactcacctcccaacacctggccctactcgccggcggagatgagggctgcaggttgagaaagctctaataaggcttctctctcggccgcagccctgtgattggccctcggggcgtaatcgttgctgagcacttcctgtatccaccggaattactgagaggtcttttgggggcggggggtgttggggggcggtccttcacctgagcttccggatctccacctgtggtcctccatcttgactgcctgttaaacttacctatgtggagcctcatttcaaagcacgaacgcctagagattctgcttgattggttacactgggactgcccagaccctggagttctttcgagagtcccagataactgtgattgcggccgaggctgagaatcaccgcttagaagcctcagctgtgattggctaccttctcccatcaccccaggtatattattaataaaaatccaaccgtatttcaagtgaaatatcaatgacacgtcaactatgagacgcatgaaaagcaccaagttcatcagtttcacattcacagtattattattattttatttttaatggagtcttgctctgttccccaggctggagtgcaacggcacgatctcggctccccgcagcctccgcctgccggcttcaagtgattcccctgcctcagcctcccgagtagctgagattacaagcatgcgccacaacgcctggttaatttttgtatttttttcaatagagacggggttttgccatgctggccaggctggtctcaaactcccgacctcaggtgatctgccagcctcagcctcctaaagtgctgggattacaggcgtgagccacctactaaaaatacaaaaaattagccgggcgtggtggcgggcgcctgtagtcccagctactcgggaggctgaggcaggagaatggcgtgaacccgggaggcggagcttgcagtgagcagagatcgcgccactgcactccagcctgggcgacagagcgagactccgtctcagaaaaaaaatatatgaaataaaaggagaaattttaccaactgtggaatggagaaataaagaaatgaagttgcagagctgccggagagctactcacctcccaacacctggccctactcgccggcggagatgagggctgcaggttgagaaagctctattaaggcttctttctcggccgcagccctgtgattggccctcggggcgtaatcgttgctgagcacttcctgtatccaccggaattactgagaggtcttttgggggcggggggtgttggggggcggtccttcacctgagcttcccgatctccacctgtggtcctccatcttgactgcctgttaaacttacctatgtggagcctcatttcaaagcacgaacgcctagagattctgcttgattggttacactgggactgcccagaccctggagttctttcgagagtcccagataattgtgattgcggccgaggctgagaatcaccgcttagaagcctcagctgtgattggctaccttctcccatcaccccaggtatattattaataaaaatccaaccgtatttcaagtgaaatatcaatgacacgtcaactatgagacgcatgaaaagcaccaagttcatcagtttcacattcacagtattattattattttatttttaatggagtcttgctctgttccccaggctggagtgcaacggcacgatctcggctccccgcagcctccgcctgccggcttcaagtgattcccctgcctcagcctcccgagtagctgagattacaagcatgcgccacaacgcctggttaatttttgtatttttttcaatagagacggggttttgccatgctggccaggctggtctcaaactcctgacctcaggtgatctgccagcctcagcctcctaaagtgctgggattacaggcgtgagccaccgtgcctggctggcagtattaattttgtaaacatatagccgggcacagtggctcacgcctgtaatcccagcactttgggaggccgaggcaggtggatcacgaggtcaggagatcgagaccatcctggctaacacggtgaaaccccgtctctactaaaaatacaaaaaattagccgggcgtggtggcgggcacctgtagtcccagctact

SEQ ID NO: 1560767 - DNA, 4001 bp, Homo sapiens
ctagcttccttgggctggcatgacaacgtaccacaaactaggtaacttaaaacagaaacctactgtctcatggttctggagcctagatgtccaaaatcaaagtgttggcagggtgctgctctctctgaaacccaggggagcccttccttgcctcttactggcttctgtggtttgctggcaacctgtgtcactctttggtttgcagctatgtaatttcactctgactttgtcacatgccattctgcttgtctctaccttcatgtggccattttttctaagatggagtttcactcttgttgcccaggctggaatgcaatggcgcaatcttggctcactgcaacctctgcctcccaggttcaagcaatcctcctgcctcagcctcctgagtagctgggattacaggcatgcgccaccacagttggctaattttttgtatttcaccatgttggtcaggctggtctcgaacccccaacctcgggtgatccacccgcctcggcctcccaaagtgctgggattataggtgtgagccactgcatccagcttgagaccgagtctcattctgtcacccaggctggagtgcaatggtgcaatctcggcacactgcaatctccacctcctgggttcaggcaattctcctgcctcagcctcctgagtagctgggattacaggcacctgccaccatacccagctgatttttgtatttttagtagagacagggttttgccatgttttccaggcttgtcttaaactcctgagctcagatgatccacccacctcaacctcccaaagtgctggtgttacaggcatgagccaccacacccagccgcatgtggccgttttcataaggacacccgtcattaagttaggggggccactcactccagtatgacctcgccttaactaattacatctgcaacaaccttattttgtcaccctataaaggggttaggactttgtgtgtgtgtgtgtgtttttagggttgggacacaattcaacccttaacagtaaaaaccaacttttattgatatagaaagataaatattctttctatatacgtttcatagtctaaacaaatggcataattggagaagggggatgaaaagaggttggctaatggataccaagttacacctgtaggtaggaataggtgctggtgttcagtagcactataggttgaatatacttaatatcttattattttcgagggtttttctaacttttatgttaggttcaggggtacatatacactggttatacaggtaaactcgtgtcacaggggtttggtgtacagtttttcatctcccaggtattaagaataggaccccatagctatcttttcctgaccctctccctcctcccacctaaggagaggattctgaatgttcctaacacaaagaaatgatacaggtatgaggagatggatatgctcattaccctgatttaatgatacgtatacatgtaccaacacatctctctgcagctaatatacataattagtatgagtcaactagaagtgtgattttctttttaaatcacattctggaattacagtatcaaagacgtttctgccctaggtcagagagcaagctcacaagagcagagagggcttgggtcccacctttcatgggaagtccccccccttacctcatccctgtctatgttctccagcttctcctacatgtttgtgtcaacagagatgaagaatctaataagaacattcccaccctcgaagctccaaggtctcccttcgtgacgagtctcccccacctccaccccccattcttctcacaggtctcaggctcctgggaggcaccttataaacacagggcgttcatctaccccactaactggagagaaggaaaacgctgggtaaatagaatggagaggcctggctgtgatcgatcagcctcaagaaaggagacagggtaaaagggagaaagaaaaggaagacccaaagtaacccaggaaatcagcacatagaagagacgaacagcccagcacgaagcgctgactcaccgctccacgccttcctggtccttaatgattggcggctggaagcgggaagaaaagatccgtggtgccatttgattggccaacgaattgctcccttgccattggctcagagggcttttgatgaacagatccagaaaatatgtgaagcgaaacgcccaccgccccttgaggggctgttctagacctttgctcctggtgtcgtatagagcgggggatatttcaagctggaggttcctattgagaattcccagggctcacggctgcagggatgctcctccagtctctccaaaatggttcatttggagagttggggtgactctgtttataatttaaatgtctaattccttcctacatgctaaactccttgaagaatgttcgtgtggcacaacatctttctgccgtaactaaacctgtcgtgcaagaagaaattattaattattattagatacggtctcactcggtcacccaggctggagtgcagtggcgtcatctcggcccactgtaacctccacctcccgggttcaagagattctcctgcctcagcctgctgagtagctgggattacagatgcacaccaccatgcccggctaatttttgtattttcagtagagacgggctttcgccatgttggccaggctggtctcgaacccttgacctcaagtgatctgcccgcctcggcctcccgaagtgctgggattacaggcatgagccactgtgcctggcctcggctaatttttgtattttcagtagagacagggtttcaccatgttggccaggctggtctcgaacccttgacctcaagtgttctgaccgcctcggcctcccaaagtgccggaattacaggcatgagccactgtgcctggcctcggctaatttttgtattttcagtagagacagggtttcaccatgttggccaggctggtctcgaacccttgacctcaagtgatctgcccgcctcggcctcccaaagtgccgggattacaggcatgagccactgtgcctggcctcggctaatttttgtattttcagtagagacagggtttcaccatgttggccaggctggtctcgaacccttgacctcaagtgatctgcccgcctcggcctcccaaagtgctgggattacaggcatgagccactgtgcctggcctgcaagaagaacttaatggatatcggctactgtctttctgcgtaggcagaacaggcgctaagttttttagacgcaaggtcgagatttcatcattgggcatggttttcctgctattccagcttccctacaatcgttacagtcatcttctgggttcacgccaaacctcagtgtcctaggagctatccttttacaatcaccattttagttcctccttataagaatcctgagttcagtgttacgatggtgatgatcctggttttgaaatatacacatcaaggagtgcagagaaacataatgagaactttaaggaattactgtaaccataacacaagtctctgtggtccagaacctagattgggaagcagacatgatggggacctttgcagactcatgtacccataagagcatgcccgttgcatcctcaggggttcccaccaaaataaatttccagttgtgaagtgaacttcattcccttcgattttctttttatttttcctggtgatacatgttcccctaagagatatgttttgttttcctcattttcgaattatagtgtatcattctgtgacttgattcttttcacttattatgtttttgagattaatcaatgcgagtttgttatagctgcggttcatttctaggtcttgcctcacggtatttaaatgtatgactaggtcaccatttaatgatccattctgtcagtgataggtggttgggtggtttctcagtttttgccaatatgaacaatgctgttttgaaccttcttgcacacatcagtgagcccacaggacttttggattacctgagtggaatgactgagtccctgaggcacaggtgactt

SEQ ID NO: 1560768 - DNA, 4001 bp, Homo sapiens
taaagtcttgtcatgtcacctccctggaactggaagcatcccaccaaagtaaaaatcagcctgtagggtttctgttaacacggatttttggctctgcttgcttagacagggcacctgctttatactcccttgacctgcagggacaaagttgtccccagtatttagcccccgtctttccttctgcctaccattctttccatgggaaagttttaagatgggcttgctgagattacttcaagtaattaggagagtcagaagataaattataaaatttcaagtaattaggagagtcagaagaaaatatttaaaggagggtagaggtgggagacaagagcctagaaatgtcatggtagctaaaatctattcaataagctgtggtgttttttgtttgtttttttttttaaatgactgagtcttgctgttgcccaggctggagtgcagtggtgcagtcacagctcactgcagcctcgaactcctgggctgaagcaagcttcccacctcagccttcctagtagctgcgaccacaggcttgcatcactgcaccaggcctttaaaaaaaaaaaaaaagtagagacaaggtgtcactatgttgcccaggctggtttcaaactcctgggctcaagtaatcctcttacccctggcctcccaaagtgttgggattacaggcatgagctactgcgcccagccaaatttgaatattttcttcttctttttttctttttgatagagtctcactctgtcacccaggctggagtgtagtggcatgatctctacttgctgcaaacctctgcttcctgggttcaatcgattctcctgcctcagcctcccaagtagctgggattacaggcgtgcaccaccaggcctggctaatttttgtgtttttagtagagacagggtttcaccatgttggccaggatggtctctatctcttgacctcatgatccaccagcctcggcctcccaaagtgctgagattataggcgtgagccaccacacccgaccaagtttgaatatttctaaccctgttctgatttagtaatttaatatgctttacaagatgaggtggctgagcgcagtggctcacgtctgtaatcccagcactttgggaggccaaagtgggcggatcatgaggtcaggagatcgagaccatcctggctaacacggtgaaaccccatctctactaaaaatgcaaaaaattagccgggcgtggtggcgggcgcctgtagtcccagctactagggaggctgaggcaggagaatggtgtgaacccgggagtcggagcttgcagtgagtcaagatcgtgccactgcactccagcctgggtgacagaatgagactctgtcttaaaaaaacaaacaaaaaaaaacatgaggtgatatatgtgggtacacgttttcccctgggacacaggaaacatgttatcatgaatatcctctatacaggaagggcctctgaaaagagtggcgaggtagcagtccctggacaattgtcattgaaaagagtggagaggtggcagtcctcggacaactgtcattgagaagagcggagaggtggccatgcctgggcaactgtcattgagaagagtggagaggtggccgtccctggacaactgtcattgaaaagagtggagaggtggcagtccctggacaactgtcattgaaaagagtggagaggtggcagtccctggacaactgtcattgaaaagagtggggaggtggcagtccctggacaactgtcatgggttgaccacctccctggagaagtaataggctttttcctgcattctttcactttctttctaccccggggagtgttctgctgcaacggattgctaataacattgcagcagacagcagcgagggcaggggattcgatccgtgtgtcatggtaccaaggctgagggtcggtttcctcataggtaactctaagaggctgtcgacgcacgtggtgatgctgagagcagagcagcagctccaagttcaagtcctcctgcaaccttcatgataacatcgccatggaaagtaactgaacatcgaaggctgggctctcctctggaagctggaaatcagagtacctgcctcttcaagggttactgtgaggtttcagtgaagcaacaagtgagccggtcggaagggctggcacagagcatgcatgggaaccctgaacaccacctgctctaaagctacctgccagaccgagacgtcctgagcagaagagtatgtcacggtacacaagcgctcaggcttacgacgctactgccgaggcgggcagatcacctgaggtcagggggtcgagaccagcctggctaacatggtgaaaccccatttctactaaaaatacaaaaaattagccaggcatggtggcgcgcacctgtaaccccagctactcgggaggctgaggcagaagaatcacttgaacctgggaggcagaggttgcagtgagccaagattgtggcattgcactccagcttgggcaacaagagcaaaactctgtctccaaaaaaaaaaaaaaaaaagaaaaagaaaaaaaaagatttagtaggatctcaattgtgtggattctaaaacaattaaattcatagcagcagagagaagaatggtggttgccagagactgggggataaaatggggaaaaaggaaatattgatgaaaaggtacaaacaagtttcagtcagagaaatgagttttagggatcccctgcacagcatggcaactagagttaataatgatgtatttaacctgccatggaatttaagaaaagatgtattaatatatgctccaaaattgctaaaagtagattttaaacatcctcaccacaaaaagtaactaaggcaatggacatgttagcttttttctgccatgtatacatatatctaaacatcgcattgtacctcgcaaatatatacaattattgtcaattaaaaataaaagtggatttaggattgcttcaatttgtgaatctgcaggtgaggctaaagtgtgtgtatatatatatacacatatatatatatatacacacacacacatatatatatatatatatatatatatatatacacacacacacacatattttgagacgaaggcttgcattgtcgcccgggctggagtacagtggcacaatctcaactcactgcaacctccacctcccgggttcaagcaattctcctgtctcagcctccagagtagctgggatttcaggcacctgtcaccatgcccggctaattttctgtatttttagtagagacagggtttcactaggttggccagactggtctcgaactcctgaccttgtggcccacccgcctcggcctcccaaagtgctgggattacaggcgtgagccaccacatctggcctcatatatatttttagaaaaagtgtctcactctgtccctcaggctggagtgtggtgactatcatagctcaccatatagccttgaactcctgggctcaagtgatcttcctgcctcagactccccaagtagctgggactacaggtgcacaccccacacctggtttcttatatttttataattttagaatgtctgaaattcaggactgagataagataaatctaatccaatctttggaattcctacttaatttcattaaaagaggcaaggttttcattaacctacctaccctccaggaaaagatgttttctgtgtgtgtgtatgctaccatggttgttttgattattttgattatgataaaaccatttataagagtagatagtacttcctgctccctaccttcaacattcagagaataaaaaaatatatagcttcaatggatgtataaatagtatcaacagaaacactttacaaaccaggactagatatccttcaaattaatttttttttttgagatagagtgttgctctgtcacccaggctggactgcagtggtgcaatctcagctcactgcaactgctgccttctggggtcaagtgatcctcctgcctcaacctcccaagtagctgaaattacaggtgccagccacc

SEQ ID NO: 1560769 - DNA, 4001 bp, Homo sapiens
gtgatctgcccacctcagcctcccaaagtgctgggattacaggtatgagccaccaggcctggccaagtattttttttcccaagtacatttttttctttttttcttttttttgagatggagtctccctctgttgcccaggctggagtgcagtggcacaatctcgactcactgcaacctccacctcccaggttcaagtgattctagtgcctcagcctctcaagaagctgggattacaggcgcaccgcatcacgccgggctagtttttgtatttttagtagagacagggtttcttgtttttttctgagatggagtcttgctctgtcacccaggctggagtgcagtggcgcgatctgggctcactgcaagctccgcctcccaggttcacgccattctcctgcctcagcctcccaagtagctgggactacaggcgcccgccactatgcccagctaattttttttgtatttttagtagagatggggtttcaccgtgttagccaggatggtctcgatcttctgacctcgtgatccgcccgcctcggcctcccatagtgctgggattacaggcgtgagccaccgcgcccggccgagacagggtttctctatgttggccaggctggcctcgaactcctgacctcagctgatccacccgcctcggcctcccaaagtgctgggatcacaggcgtgagccaccgcatctggccatttacatttttttttttttttgatgcagcatttcactctggttgcccaggctggagtgcagtggcgcaatctcagctcaccgcaacctccgcctcccgggttcaagtgattctcctgcctcagcctcccgagtagctgggattacaggcatgtgccaccacgcccagctaattttgtatttttagtagagatggggtttctccatgttggtcaggctggtctcaaactcccggcctcaggtgatctgaaagtgctgggattacaggcgtgagccaccgcgcccagcctacttttttttttttttaaacagggtcttcatctcatccaggctggagtgcagtggctcaatcacacctcattgcagcccccacctcctggctcaggtgatcctcccacctcaccccacaagtagcttggacacagcacaaggtctggccttctttgttttttgagacggagtcgcactctgtctcccaggctggagtgcagtggcgcgatctcagctcattgcaacctccccctcctaggtttaagctattctcctgcctcaaccttccaagtaactgggattacaggcatgcaccaccacacctggctaatttttgtgtttttagtagagacagggtttcaccattttgggcaggctggtctcaaacttctggcctcaagtgatccacccgcctcggcctcccaaagtgttgggataacaggcatgaaccactgtgcctggccttatatttttttgtaatgacagagttttaccatgttgcccaggctagtctcaatctcctgaactcctctaaactatatttgaatagaagtccttaagacattaggccaggcgtggtggctcacacctggaatcccagcactttgggaggccgaggcagacagattacctaaagtcaggagttcaagaccagcctggccaacatggtgagaccccgtctctactaaaaatacaaaaattagctgggcatggtggcacgtgcctgtagtcccagctactcaggaggctgaggcaggagaatggcgggtgaacccaggaggcggagtttgcagcgaaccaagatcacgccactgcactccagcctgggcgacagagggagactccgtctcaaaaaaaaaaaaatcaaagatccttccagcatcctcgcaccaaccattaaggcttgggaagggctatggtggaaactcaaccaatagcttcttctcccttaaacgagaagacaaagaaatcgatgcaagaaccagcactcacctccctcaggtcaggtcttgcttccagcctgtgtttcctgcaaaggaaacggataaaaaggggaggtctctggcccttggtacgctaggtggagagacagctttcccgcccagggtggaaccgccccactgagattaacattgggtggctcccaaccactgacctcaggctcaccttgacatcacctgggccccatcctcagggatttggctgtaattgggcttcagtgggctttggagaattacggcttgctgaatctccccaggtgagattaatgtgcaattcccttcctagaccacccgggccaggtgtgataggcgacagaacaggaaatacacattttgggttttgcagggtacctggctcccagctttaaaaactcttgtagagaaaaaaaattaaacaaaaataaataaaaattaaaaaaaaagaggacaaaaactcccgtgacttcctaagttacaaatacaataagtctactttgtggccaactgtggtgcctcctgcctataaatcccagcaggctgagaggcctaggccagtggatccctaggggccaggagtttgataccagcctaggcaacatagcaagatgccatctcttcaaaaatatttaataattagccatgcataggctgggcgtggtagctcatgcctgtagtcccagcaatttgggaagccgaggcgggtggatcacctgaggtcaggagttggagaccagactggccaacgtggtgaaactctgtctctactaaacatacaaaaaattagccaggtgtggtggcaggtgcctgtaatcccagctactcgggaggctgagacaggacaatcacttgaactagggaggtggagggtgagtgaggcacgatcacgccattgcactccagcctgggtgacaagagcaagactgtctcaaaaacaaaaacaaaaaaattagccatacatgatgggctgcacctgtaatcccagctattcaggaggctgaggtgggaggatcacctgagctcaggagtttgaggctgcagtgagctgtgactggccatctcactccagcctaggccacagagtgagacccagtctcaaaaaaataaatagataactgatatttaatttttttttttggatggagtcttgctctgtggcccaggctggagtgcagtggtgcaatctccattcttgcaacctctgccttccaggttcaagcaattctgatgcctcagcttcccaagtagctgggactgcaggcacatgccaccatgcccaactaattttttgtatttttagtagagacagggtttcaccatattggtcaggctggtctcaaactcctgatgtcaggtgattacaggcatgagccaccgcacctggcctaaaattgtttttaaataaaacagtgtatgttgtggaaagcattcagcacagaattttggtagtttaaactgttaatttaatggaagcaaatggtcccacaaatgaagatgtatatatcagttgcagcatgccatctatagaaataggcactatggaggcctggcatggtggctcacacctgtaatccctgcactttggaaggctgaggcaggtggatcatctgaggtcagcagttcgagaccaacctgggcaacatggcaaaaaacccctggctactaaaaataaagaattagccaggcatggtggtgtgcacctgtaatcccagctactcaggaggctgaggcgtaagaattgattgaacctgggagttggaggttgccgtgagccgagattgcaccactgcgctccagcctgggcgacagagactccatctttaaaaaaaaaaaaaaaagatggccaggcgcagtggttcatgaatgtaatcccagcactttgggaggctgaggcgggaggactgcctgagtccaggagttcaagaccagcctgggcaatatggcgagactccctctctgaagaaaaagaaaataaaaacaataaaaataaattatattctagctgacaaaaagagagagagagtatattttgttaaaacatttggcctttagtc

SEQ ID NO: 1560770 - DNA, 4001 bp, Homo sapiens
tgttggggtgccagtggctaaggagacgtaaggcacccactctcctgtgtttatgtttaaaactgtggagctgacgttttctccattcttaccaatgagactgactacttgtaatatcagctattgggagaggcgggttcacagctcctatcatgtttctggattggtgtattttcctttaatacagtagtccccccttctctgcagggtctatgttccaagatccccggtggatatctgaaactgtggatagtactgaacaatgtggatactgatttttttaaatacatatctaggccgggtgtggtggctcacacctgtaattccagcactttgggaggccgaggcaggcaaatcacctaaggtcaggagtttgaaaccagcctggccaacatggtgaaaccccgtttctactaaaaatacaaaaattagctgggtgtggtggtgcgcacctgtaatcccagctactggggaggctgaggcatgagaattgcttgaacctgggaggtggaggttgcagtgagctgagatcacaccactgcactccagcctgtgtgacagaatgaagactccatctcaaaatagaaaaaaaatacataccgatctatgataaaagtttaaattataaattaggtacagtaagagattaacaataataatgaaatagaacaattataatactatactatcataaacggtatgtaaatgtggtctctctctgtctcagaatatctcagtgtactgtactcatctatttttggccatgatcaacccaaacttcagaaagcaaaaccttggataaggggatgactgtagtccagctctgctttattcatattgaagatgaggttttggattacaatatcctccagtgggattcaccctttgttgctgcgaaatggccttttaaagtgtttaaccttcttgctttaaatatagcactcctgacatcaccatagctataccagctgtcttctgctgtttccatagcatatgcttttccactattttacttcctacttctctatgacttcatttaacgttcacctcatataagcagtattcagttaagtttttaaaaaataggcccatatgggctgggcacagtggctcacacctgcaatcccagcactttggggggccaaggcaggcggattacctgaggtcagtagttcgagaccagcctggccaacatggtgaaaccccgtctctactaaaaataaaaaaaaattacccaggcatggtggtgggtgcctgtaatcccagctactcaggaggctgaggcaggagaatcacctgtacctgggaggcggggtttgcagtgagccgagattgtgccattgcacttcagcctgggcaagaagagcgaaaccccatctcagaaaaataaaattaaaaaaatgcccgtatgacagtctttgcctttgggttagatccattatcttcctccactgtttgctttcttgctcagaaggccaataagtgataggggtggtgactagagtagtttagctgcccagcagccaagcccacccccactttatccaccagatcaacactcaccatttatctctctgcggactacaacacacattttatcacagttcataatggcaaagatgttcgaagtcacatcccaagcgcgtcgtccagggaaacgctctatcaagagatgaaccacctctgcccagctggctgtctcgacctggtcccaggtgatgggcatggtgccagtactgagctcagtcagtaagagctgcttgaaccgttgtagctcctcatggctcacgtttctcatgtacagcatgaccccattttcacatggggagccggggtagcaagagaatgtccagggcggaatatgagaactgtgagtggaggaggatgaaaagggaatgggggtgtcagagggtggattcacgtcactcatctttagtcaaggcagagaacacctcagtgtccacgataaagacaaccgattggaagagagaaacacgagacctgcagagacataaaacaataaaacaagaagatgaaaacactacccaagaaaacagattcgtgtaatgcttacttggcaggtattctgcgtgccgggtactccctttacctcctttcctcaaagattctctgccctatggaaaaactgaagatgcatggaatgtttgggattagtccattagactaatggattgtttgtagtttctattctccatgacttcttttggggaagaggcaagcaaaatatcaaagccttcacaaaaggtttagcgaaaagaaaaattagaagcaggtaaaataattcagtgaagctaaaatctagaaaatatatggttggttagaaggctccattagattaaaagtgatctcaaattcaacaaagtttttattcttaaaaaaatggatcatgtattagagagatgcaaatcaaaaccacaacgagatgtcatctcacaccagtcagaatggtgattattaaaaagtcaagcaataacagatgctgtattcttaaaaaatggatcatgtattagagagatgcaaatcaaaaccacaacgagatgtcatctcacaccagtcagaatggtgattattaaaaagtcaagcaataacagatgctggtgaagtcgcagagaaaaaggaacacttatactctgtgtgtgggagtgtaaattagttcaactactctggatgacagtggggcaactcctcaaagacctaaaaagagaactaccattcaactcagcaatcccattactggatatatatccaaaggaatataaatcattctattataaagacacattcctgtgtatgttcattgcagcactactcacaatagcaaagtcatggaatcaacctaaatgcccatcagtgatagaccggataaaaaaatgtggtacataaacaccatggaatactatgcagccataaaaaagaatgagatcatgacctttgcaggaacatagatggagccagagaccattattccttagcaaactaacacaggaacaggaaaccaaataccacatgtgctcatttataagtggtagctaaacgatgagaacacatggacacatagagggaacaccacacactggagtctgctagaggctggagggtgggaggagggagaagatcaggaaaaataactaatgggtactgggattaatacctgggtgatgagataacctgtacaacaaacccacccccataacacgtttgcctatataacaaacctgcacatgtacccctgtatctaaaagaaatgtaaaaaagaaataaaataaaaaggatcatgggtgtatttttgtcccccctgccccaacttccaataatagtttatttatttattatttatttatttacttagagacagagtctcactctgtttcccaggctggagtgcagtggtgtgatctcggctcactgcaacctccacttccctggttcaagcaattcccttgcctcagccccctgagtagctgggattacaggcacctgccaccatgcctggctaatttttttgtatttttagtatagatggggtttcactatgttggccaggctggtctcaaactcctgacctcaagtgatccacccacctcagcctcccaaagtgctgggattacaggtgtgagccactgcacctggccaatagcttcttctttaacacttctccctcttataacttatgtgacacccaaacatctggataaacttgtttaattgactcagtcctcccttgggtccagagtagctgggcttggtcccaggacaaaggtgatatgctcctgggtggctgactcttgctagtgctccttccgtccagtgggtggcgctgcatggaggagcctaacacagtcacacattttctacctctacttattccatgaccattgctgaccacgttccagccacagtgagctgcagctttaagaaatttgcaggactggctgggtgcggtggctcacgcctgtaatcccagcactttgggaggccaa

SEQ ID NO: 1560771 - DNA, 4001 bp, Homo sapiens
agtcatgtcatgtcttagagatttttataacatttaggacctcagtgtcccaagtgagaaactctcagttcagacactgactcggtcattttttcatctgccaacatagaacattaatcagcagaaaagtcaaagacacgaaccacacagataaagaaaactggcacacacctgtaatcacagcactttgggaagcccaggcaggaggatcatctgaggtcaggagtttgagaccagcctgaccaacatggtgataccccgtctctactaaaaatacaaaaattagctgggcgtggtggtgcatgcctgtaatcccagctactcgggaagctgaggaaggagaatcgcttgaacctgggaggcagaagttgcagtgaaccgagatcatgtcactgccctccaacctgggcaacagagcaagactccgtctcaaaaaaataaaacaaaaacaaaaaaaaaaacaaaaaactaacacagcaagcaactccaaaccaaataaaataccctcaagcatgtggggatacgaaataaggtctcaaattagaattaccaacacaaagaagaaacatgaacaaaacagaagtaaacgtaacagaagttgatggaactcaaaagtaaagggagaagataacaatcatcagaaacaaatgctaattactagatacctaatagggaatatatttagtttttcctaagtatcccccgagaggagggtgtagaccccatcaatgagtccagcagaactggttcggagtcagatctgtcacttttggaaaagtcatgtaacacatgggaacactgttttgtccagttttctcacttgtaaacctttcctgggttgtgataagaatgaaaagacattatgcagaaagaatgcttccaggacgtgaggacaacctggctgtgatgtctgtcaccccattggtcgccccagggctaattcggctgatgtggccagctgggtgggtgtccacttcctccctcactgctccatatgcgtccgtcctgaaagtctcccctgggtcaaagacgatgacaacctttgcccatagaggaaggtccttccatcgcgggcagaagagaagctgtgctcccctactagaacctccaaacaagctcgcaagaatgcttcctgtagtacccgggacatacgctgtctgattgtcttaagattctacctactccttggtacatgtctggtcaaaaaggacaggcagttaggcatggtggctcactcctgtaatcacagcactttgggatgcctaggcaggtggatcacttgagcctgggagttcaagaccagcctgagcaacatggcaagaccctttctctaaaaaaaaaaaaaaaaaaaaaaaaaagataggcaactaccatactagaattccatctcagtagacctggcaatgcagacactaactggccactcatctcctataacaacgactccacttggggtggaaaaatgggaagacactccataggtgaacagttggtatcaggacgccatctgtccccagttcatcgctggcccacatatgaacagccctggcctgcaactcttcctaccttcaactctcaccttgacccacacacattctcatctgatggagggggtggccactcatttaacaatgctatcaccttgttcccaggcttcccccatgggtcctcgccccatcatccagcacttacttctcatctcttcctgagcctttgtccagagatctttcctattgatctgtagaaacaggttcagtgttacctcccatgcctgctttcctgggtaatgtttgtccagcagctttgctacatcttctttggaggccttcttcagctcagcccaggggattggcttgagttcaaatttctccaaaggttgtttgaggagctccttaaatttccaaaactcttcctttctgagctccttcagataccacaacaagccaaaatccgaaaaaaaagattctgccatatcgccccaggattgtgaactgaggtgtctccagagggaaaagaaagatcctcaaaaataaagaataaatgatacctggagaagaatgacatgattacagagttaagcttcagcagctgaaagcagctcaaaattattgatatcatcatgcgtagcttgcaccaaacatcatctagggaagaagcttcatctttttccaaacaaatgcatgtgaatggtagagttgactgccacttatgtgtcttgtttttgtctgacataaatgatgcttccaggaacaagtgtttttgtgtagtttggtgtatataagcacacatttctctagatttataaattataggtcaaacagcaaacacaggtcaccatgtttgctacataacactcaacggttttcccttgtgtatataattactgacattcctaccagcattctatgagtttgtttgctctgtagaccttcccatccttagtatagtctaatccaattttgataatgaaaaaatgaacggatattaaaattacagatgatcacattcaggaagatgaaaataaaggaagaggacataaaagcaaatttaaatttttttttatcgtttagtggtatatgccttcttttttttttttttttttgagacagagtctcgctctgatgcccaggctggagtgcagtagcgcaatctcggctcactgcaagctctgcctcccgggttcacgtcattctcctgcctcagcctcctgagtagctgggactacaggtgcctgccaccacacccggctaatttttttgtatttttagtagagatggggttttactgtgttcgccaggatggtctcgatctcctgacctcgtgatccacccgcctcggcctcccaaagtgctgggattacaggcatgagccaccgtgcccggccggtatatgccttcttattacagtatataaggaaaaagttagatttactataggttagcatctgcagacaactcagacagaaacagagcagtgaacgttcccagtattataaacccttcagataatcattgcaattcaacaaaagacaggaaatgaagtagaaatatatggtagacaaaataagacaggtggcaaaaataataccaaatatatatagatatgtattttgagatagagtttcactcttgttgcccagactagaatgcaatggtatgacctcagctcactgcaacctctgcctcccaggttcaaatgattctcctgcctcgtcctcccaagtagctgggattacaggcacctgccaccatgcccggctaattttttttttttgtatttttagtagagatggggtttcaccatgttggccaggctggtctcgaactcctgacctcaggtgatccacctgcctcagcctcccaaagtgctgggattataggcttgagccactgcgcccagcctaaatataatcttaacacatatgaatgaaataaaattgctcactaatatatagactcacattggataaatacaaatcctgctatatgctgtttataagagaatcctagaaaatacacagagaagtaaaacagaagaagaaaaagcctggcaaattcttacccaaaaaagtattaatagtataaaatatcagcattgaaaaacactcaagctagaaagcactaaatggactaagaatttttgaacaccaagattcagttccccaagatctagaactcatgagcatatgtgcacctgggaataccactttacacataaggagatgatgacaaacgcaatatcattgtatctgagctaatatacctttcagataattacaaaccattagcaaaggttacataccatctatggtcacatgcaaaagaataaacttggacccttaataccataaacaaaaattaatgcaaaatggattgaagaagatctaaatggaaggcccaaagtataaaactcctaggagaaaatgtagggcagaagcttccagacacagatttggtctggattatttcttgaatatgacatgacacagacaaaagaaaaaa

SEQ ID NO: 1560772 - DNA, 4001 bp, Homo sapiens
agaccagcctaggcaacatagtgagactcccatctgtattataaaatttaaaacccaatttttaaaatgtaagcccccaggtattaataattttttaaataaaaataaaaagaaagtgcctgacatgaatccaagttattttgtgccccgggtgggctgtgacatttgcagcgctgagtgcaaaatgaaaattcgaggcttcttactcgaaaaatattaggggcagggcacggtggctcacgcctgtaatcccagcactttgggaggctgagacagttggatcacttgaggtcaggagttcgagaccagcctggccaacatggtgaaaccccccatctctactaaaaacacaaagtttagacaggcatgtggttcacgcctgtaatcccagctacttgggaggctgaggcaggagaattgcttgaacccgggaggcggagcttgcagtgagccgagatcacaccactgcactccagcctggggcaacagagcaagactctgtctcaaactacgacggcaacaacaacaccccccccccaaaaaaaaaaaccccaaaaaacaaaaaatatgaaattcaagagggagtccggctagcattagaccaagctcccgtcccttctgaggcgggggtgtgagccccacaaagccagccgtgctggttacagagagtttgaatctcttctagcctgaggtcgcctgagagaggctccaaaggcacagtcatgtggaatgacattttggggaccccatcccacctgcccacgtgtcagtccccgatttagccaggacagccacgaggcgggaggagggttcactggagctttagttaattttctgtccctactgattttttttttgagacacagcctcactctgtcgcccaggctggagtgaagtggcatgatcgcactcactgcaacctccatctcccggattcaagcgattctcccacctcagcctccccagtagctgggattacaggtatgcaccaccgtgcccagctaatttttgtatttttagtagagacggggtttcaccgtgttggccaggctggtctcaaattcctgacctcaggtgatccacccgcctcggcctcccaaagtgccaggattccaggcctgagccaccgtgtctggtctattttttttttatgctgagtataattggaaggtggcgggaatcatttccatttaaaaaatgaaacactgggctcagtgtccagccccccttcccactggggacaccgagacccccagggcagaaaatcctccctgcactctgacctcgggcggcgtgtaggtgacctcaggcgccaggcatccctccattcattcccgggcctccccctctgcgcgcacagggggctttgccccgcagggccgcccaccaggtcccccggcgctcaccctccgatgcccacgatgagcttcatgccggtgcggaggggcggcggggacgacttccaaggcagcccgggtagggtgcgaccacgcagtgcgctccggagtgcgtcccggcttcattgagaaaacctggcgcctttataggtctcggcagcctggaggccgccccgggggaggcggcccctggggatggggcggaggcgccggcacctgttcccgccgccgaatggaaatagctccaggctgccttttgcctaaattagtcacgagctggccgggcagggggctgcctcttccctcctcccacctccctgccctctctccactccctcctcccctctcctccccttcttaccccctcctccctcctctccacccccaccctcttccctcctcctggccagagagctcagatcagcagccccacacttttccctccctaaaaatatcccgctctctgtgtcctatggcctgaccctgacattaagactggttctcgtggcgtcaaggaagcgaactcacccacccccgcccgcacagcagccctagaggccgggaccctgcggggagcttcgttttccaacgaggtcagggccaaggtgggcttaagatccttagcagtgaatcacaagatagccttgcccaggtgaccgggggcccagccacaggatctcagcgtgacaccagggaccattcatcccgtgcctgccttgtgggtggagtcatttgactgggggccggcggggcggggagggggtaatggggaggaatgacactctgctgcttctctcttctactggtaaagggaaaaagtattctcttattaaatgttttaattttttttttttaatttcagatggagccgggtgcagtggctcacgcctgtaatcccagcactttgggaggccgaggcgggcggatcacgaggtcaggagttcgagaccagcctggccagcatggtgaaaccccgtctctactaaaaatacaaaaaaaattagctgggcatggtggcacacgcctgtagtcccagctacttgggaggctgaggcaggagaatcgtttgaacctggcaggtagaggttgcagtgagctgagattgtgccactgcactccaacctgggcgacagagcgagactccgtctcaaaaaaataaaataaaataaaataaaaataaataaatttgaaacagagttttgctctgtcacccaggctggagtgcagtggtaccatcttggcttactgtaacctctgccttccaggttcaagcaattctccttcgtcaacctccccaatagctgggattacaggcgagcaccaacacgcccagataatttttgtatttttagtagagacggggtttcaccatgttggccaggctggtcttgaactcctgacctcaggtgatctgcccgcctcaggcctcccaaagtgctgggattacaggtgtgagccaccatgcccagcctacatttttgaattttttgagacagggtctcgctctgtggcccaggctggagtgtggtgatgtgatcacagctcactgcagcctcaacttctcacactggggcgatctttctgcttcagcctcccgagcagctgagactacaggttcgcaccaccacacctaactttaaaattttttgtagagatggggtcttgccatgttgcccaggttggtcttgaactcctggcctcacgtgatgattcctccaactcggcctcccaaagtgctgggattacaggcatgtgacgcctctccccaccagaaaataatttttctgatgcttcttaaaacagtaaggctgactttgttgaggcgggtgagggactactaccatggggttttgtagtatgggagggagattgaattcaatcttctccctttccaccaatacaaggaaaagtgggaaattatagcccaggagcaggggggtgatcagaggatgggaagtgactaggaaggtggggtgataggatggccaagtttgtatgtctgtatgcagtaagagatcaatacaccaaagagagagagaatttttaagagatgaggtcttgttacattgcctaggcgggtctctaactcctggcctcaagtgatccttcctccttggcctcccaaagtactgggattacaggcttaagccaccacgcccgaccaatgatgtactttatgagtcctgttaacagaattgtgaccctggacttcaagagcttttgcaaaatggactggaaatcttggggtattcatgaggaaagctcagaaaaagcagtcagccacaggatctgtggcagtgcagcggggtggctatgtctgtggccagagctcctccaggtgctcaagcaggcacccaggaaagcccggctcctgggcttcacctctggcccagtttcggtggcaagaatttcctggcagcctcttggtggggcacgtggcccagggcctcaggtgacagtgacatgcccagataaaggccctggcagggcacctctgggaggcctccctgtgccagcccaccccggcaggaaggagagggagaagccacaggggctacaaatgcctgccagtccccaagcagtcccaggtcccagggtattgat

SEQ ID NO: 1560773 - DNA, 4001 bp, Homo sapiens
aggcaggaggatcgcttaagcccaggagtttgagaccagcctgggcaacatagtgacaccttgtctctatctattttttcttttttttttttgagacagagtctcactctgtcgcccaggctagagtgcagtggcgtgatctcggctcactgcaagctctgcctcccgggttcacgcaattctcctgcctcagcctcctgagtagctgggactacaggtgcctgccatcatgcccggctaaggggtttcaccgtgttagccaggatggtcttgatctcctgatctcatgatccgcccgccttggcctcccaaagtgctgggattacaggcatgagccactgtgtctggcctatttttaaatacttaaaaaaaaaaagaaagaaaacagaagcaggtaaaatgagaccacaaaaaagcaaacgggacaaattcagatggtgggatgatcaactgaactagaattagtttcttcaatgaatcgattacaccaagaaataaccaaagtggagtggaagggggaacagttctaaattaagagagatgtaaaagacgatagcaattacttaactatatcctgattccaacaaacccacagttacactggacttgactctgcaccacgtaatggatagtagtctagaattacggttgttcttttaaagtgtgatgatggtattgtggtcatatcagcaatgtttctggtttttacacacgcaccctgttagataaaatttatagaaggtcattggtttggattgagctcctgcactaggttcaacagaccaaaccaaaatggagacactcatgctaaagttccatgcttccaagccaaaactaagttgatatctgatcttctgagatatcaggagagagataatagccaaatccccaaacaacccagttttagcccacctgataaaggaagtcccctctactttaacctttaacttagaaatttaatcaagttaatcaatttaatcaactagctttttgttttccgtttctgattttctcagccctttgtctctgaaaacaacctctgctcagctcatcggaacactcacgctattttccataattagatgttgtttgattgtagattcacgaataaatgccaattaagatcttctcactaaatgtgttgcaattttgtcttttgacaatccttaagtgtcatgatgcctacgatttgttttaatctctttaagtttaaaaaaatacagcaagtatggcaaaaataatcattggtgatttgggtgacaggaattcctgtattcttctctcacttttatataagtttgaacattttcgtaagaaaacattaacatcaaactgcctcaaggaccgttcaagccccaagttcacagaattagcagcacaatcagaatgggaatccatgactgcctgaccccgaagctccacacaagaaaacgtgaatccctgcaccaaccccgaaagggaaggggctgtcaaaaaggtgaagagaaggtggcgatggatgactgcacaatctagtatcgcccgccgtcccaccacagtctgagaaactgaggccaggaaaggagttctccctcctcaactcccactccttagacccccagcaatcccagtccactccttcccttgggaccaccagcaaatagccatcatctacagcagaactgtaactctcaggagaactggccgatgctagctaccacttgactgagtttatagtgagagagagagacaaagagagagagaactgcccgatggacggttggccacctccagcagagtgtagttcagcttcaaacttggggcgcccggacagctgtattaataatgattgacagggaatcgggaatccaaaatcttgccccagtctccctcaagaccccaggcctctagcccgcaggaaagcgatcccagcaacactcttcctgcaccgcctcgaactcacctcactaacgactcccagtccctcggtcgcttcttcaactgtgccccgacaccggaaaggagcactattttccccctccgctccgcccacttccgcccagcagaaggcaccggaagtagagctgcccctagttgcggaagtgcctcgcctggcttgctcaagtcctctcttctctttctctctccggaaacgtgagtagctaatcgaaagttccggatattgaaactggtgggaatatggggaacgcttactatgtacgaggcatttcccagggagatcgttttttcctgcttggttcccaggttttgagtctctccaagcccaaatttaaggactaatcacttcccctagagatcgggaagcccactttcccaaatatatcatccacttttcttgctgcatcttaaaacaattgagaagagacaactacgctcccattttacagacagagccattgggaaattgaaaatcaaagccgttcaagtcgctctcaggaaacagggatttactgcggcactgcccagctgtcccagggactaaggcatatcgttcccgctagtttctagatacctagagacctagatattaatttttctagctcggacagacgaactcccaggggagagccagagcgggtaggggtcgggagggaggaggagggtcgaatctaatcccccaggtatcccatggtattcgacaccttggcttcctcatggagctctggcctttaagtcctttatcccaaggtccctttaaatactttgtcccttacctgagtcccgcccagggcaggtaatggcaagttccgcccacctgccagaaacggggatcaggcctggttaccgggagtggggcgcccctcctccttatcccctcccctcttccctgtcccctttcacagctggctgtagctggccaaggagttctcgattaaagaggaaggggcagtgctcacatttctgggcaggtaagtgaatgtccctggaggaagagcctggcttggggacccaggcatcctggctccccgcccctccgagacccagaagtttggggctcctaggcccaggagtccagggcccctgcccacttaggtccctagacccaataatataactaatcccctgcctctgcctctctcgtaatctttgttgtctgtgggtggatgtgacaatgagcacagaaagaggcacaagtggaaattaccaggaagggaagactccagatcaccagtggacatgtttataagcatctgtgtcaggtgctgtagacacagtggggaaagaaagataagctgcctgctccttgctttcttctctggcggacactgccttcactgaaatcctggctctcacacttgcacactgtgtgaccttcggcaagctatattacctctctgtgcctcagtttcctgttctctatactggggataataataggactcctggtcgggcgcagtggctcacacctgtaatcccagcactttgggaggccgaggcgggtggatcacttgaggtcaggagtttgagaccagcctggccaacatggtgaaaccccatctctactaaaaatacaaaaaattagccaggcgtggtggtgcgcacctgtaatctcaactacccgggaggctgagtcaggagaatcgcttgaacccaggaggcagaggtcacagtgagctgagatagcgccactgcactccagcctgggtgacagagcgagactctgtctaaaaaaaaaaaaaaaaaaaaactcctgtgaaaagttttgttttgttttgtttttgacatggaatctcgctctgtcacccaggctggagtgcagtggcacagtctcggctcactgcaacctctgtctcccctttcaagtgattattctggctcagcctcccaagtagttgggattacaggcgcccacaaccacgcctggctaatttttgtatgactcctgtgaaaagtaaaatgagttgaggccgggcacagtggctcacgcctgtaatcccagcaccagcactttgggaggctgaggcaggcagatcacttgaggtcaggaattcaagaccagc

SEQ ID NO: 1560774 - DNA, 4001 bp, Homo sapiens
gaacctgagcatgggcctacatagtatatgccccttcctcacaggacaagccgactggacaccatcacccacaccaggacctgtgggtgttcgtgaactcacactgtgggtcccataacatgggctatgggccaccctgagctgtaggcaatgtgagccacatgtgtgtgcgtgcacgggcttgtgtgtctgtatgtggatttgggcatgcatctattgtgtctcagttgcagctacatgtgagtctatctgtacatgcatgtcagcgtgggtgtgcccgtgtgtgtatgagctgcacacccatacgggaatgcacagatgtgtgtgctgtctgtatgcaggttgtgtctgttgtgcgtctgtgtatgtgaaccgtgtaaatgggtgtacagctgtgtgttggtgtgacctgtgtgtgcaccgctgtgtctgtgtatgggttggctgtgtctgtccatctgcatgtgtgagctgggtgtaagcatgtccttgagtcttcatctatgtgctgtctgagtgtgtgcaggcagcgtgtgtgccacacctgtgtgatcatatttgtgtgtgtatgtatgtcaatgtgtgagctgtgtgcgtgcagctgggtgtgtctttcctgagccaggtgtgcaagtctgcgagtgtgctgtgtgtgtgcaggtttgcatctctgttacgtgacctagagctatgtgtgccagcgagtgtgtcacaggccatgtgtgtgcgccgctggtccggcggaggcggcggctcctgcctggtcctgccccgtccgggccccggggctgggctggggaggccgttcactcccgaaacccccaccccgcccagcgccaagccccacactggcgtctgggacccctggccaggggccttggcccgcgcccctcccccgcccaccaggcctcccgtagcggtgaggggggtgcccccgcagccccctccccggcccagccgcgggtcccgctttgtctggcaaagaaagcgcgaggccggccggagggagggggtgtctagacggcgcggccattgtcccgagcgggggaggggagggaggagaggaggaggggcgggggcccctggccggctggggaggggctctggccgcggggagggggcgctggagccgaaggggagcacgtgggccctcgccccttcccctccccgcgcaggggcggggtcccagggcctccgggtccccgcggccagaggagagaggcgggctgcgggcgggggagggggcgcgcgcgccgccgaggctccggctcggaatccggctccgggtcttgctgcgcgccggcctgggaagttttctccgagttcagagctcccagaacttcgcgccccctccccaccccccgcctggcccagcccgcccggggtgtcgggggcggggtgggggggcttttgtgcgagaggtccccggcctagaagtacctgggcccccaatcataacctacccaggactccaggcgtgagttggatggggacgagtcccgaactctgtacgcacccccccacctcgagtccctgatccccgcacctcgagctcccagtctcggactcctgggtcccttcatcttcagctctaatcgctcaagggtccctgttccttgggcctctggggtcctccccattctgaatctctgggtcctccaggactggcatgaagcccggggctcctgcgccccttccccgaccctggttcctgcctcccatgaacccccgccagccccggccttgggggttcttgcactccccctctgccgccctcgtcccatccgccaggtcccggcccctcacctgcagcccccggccccgctagcagcagcagcaggggcagcgcccgcacgggtggcggtggcggtggcggcgacatcgggcgacggcggcggcggcggccacgggcccccggccccatggcggccggccgcgaccctcccctcctccctccttccctgggctccgggcgcgtcccgggccagcctccgcgccgccaacttcgccgaagtgaggcggccgggccgccccgcccccagccctcgaaggctcgccccgccccggggccggcccagcgcgcccccgccccccgcccggcctcccggggtccctgcccaccctccacccgcacagcctgggacgcgcggaccctcggaaacccaggccgagcatgcagtgagacgcgggcagaacccggagtggcgggcacacccaacctcgtgaacgcccacgcaccccatccccatcccccagtacacacccagagccggacacctctggagccgggacaaaaaacacagcctcccagaaactctggaaactgaggccagtcacgtcctgagaggctcatggacccacagccacggacgcacaaatgcaagcccatgcaccaagcttccccaggactctgatctaaaacattcacaaacctaaaagtcggaccgggcgcggtggctccggcctgtaatcccagcactttgagaggcagaggtggatggatcacttgaggtcaagagttggagaccagcctggccaacatggtgaaacccggactctactgaaaatacaaaaattagctgagcgtggtggcgcacgcctgtagtcccagctattcgagaggctgaagcaggaaaatcgcttcaacccaggaggctgaggttgcacttagccgaaatcgtaccactgcgctccagcctgggcaacagagtaagaccctgtctcaaacaaaacaaacaaacaaaaaaccgctaaaactcactcagccaggccaggagcctaggactacatttgcagcctcagacctcagacacgtactaggagtcacatgcatgtgtgtgtgttcacacatgcacacacaaactcttcttgctctcagccctcccagaaagcaacccacttcctctgtgactctcaaagggtcaccccagccccctagtcccacccccataccccacacagctttgggcctcagcctatctggctcaatttgattaattctcttttctttttttttttttttttgagacagcgtgtcgctctgtcacccaggctggagtgcagtgtccctatcttggctcactgcaagctctacctcccaggttcaagcgattctccttcctcagcccccacccccacaatctgccaagtagctgggattagaggtgtgcgccaccatacgtggctaattttttctgggtttttgtttacttgtttgtttgtttttgagacggagtctcgctctgttgcccaggctgaagtgcagtggcatgatctccgctcactgcaagttccgcctcctgggttcacaccattctcctgcctcagccgtccgagtagctgggactacaggcaactggcaccatgctctgctaattttttttttgtatttttagtagagacggggtttcaccgtgtcagccaggatggtctcgatctcctgacctcgtgatctgcctgcctcagcctcccaaagtgttgggattacaggcgtgagccaccgcgcccagcttctatttttttagtagagactgggttttgccatgttggccaggctggtctcgaactcctgacttcaagtgatccgcccgcctcagcctcccaaagtgctgggattacaggcgtgagccaccacgcccagccttgatcaattgccttttcccaaatcagtcatgctgcacaggcttcctgcagctccctctgttcctgtggaaagaatggggaccctgagaggcctggagcccagccctggaggaacttccagtctggggaagaaaaagctagacgcacacacacccagtgtggagggctcagggctgggccagagaaaggcatggaatctgggaagggcctggggtacacgggtggtgggtgaggactttgcctgggagggttatttatttgttcattcatgtattcaacaagtatggctaaggctccagccctgtatcacactctgttctatggactgggggtgcaccctggagggcgtccaagaggac

SEQ ID NO: 1560775 - DNA, 4001 bp, Homo sapiens
aggaaggagggaaggaagtcggggacatattcatgtgtgtgctgggggtgggggagcaggaagaaggacaggaaactccctcccatcccctcccccaacttccctttcctccaatttctgctggacaccctcacaggcatccagggggtccctgattcctgtcccacctggatggaggtgggggagggctaggatgggaggaagaaagtcggcttgtattcatctgtagggaggaggtaggaggcccccaccccacccactgccaggcctggcggagaggaaagggtgcactctgcctgaagccatccctctcccatccggaggaaaaggccagaggaagtggagattttggcaaggtgaccgcggggaggggcttgtccgctgcggggtctccctcctaccagggagctagaggacagggctctgaggaccccaaaaaaccccacctcttccctgagccccccacggcagggcatgcacctagagttcccagctcggcttttcttctctggtacacacacctccttgggtcacacacccagggagagcccctctcttccctcacactgccttccgtggtgtcaaacattcggcaatctccaatacacacggacacacacacagcctcccttgtcaaacacatgcagaatcatccccatatctctggtgtcacacactcagccatttcacacacacacctctccttgttacacccatacacacagctgggtgtcatatgcacacgtgccctgtcacatggggacccatccttccttctcctttttacacaccctcgtgcgtttcacccacaagccccagcctctccctcgtcatacacccaccttccctgttgcacacaccccctctgatgtcactgttgcacacctccatgtgtcacacccagccacagcctctctggagtcacacccacacccttttcttgtcacatcccctcaccagccacgcctgtgtcacacacactggacccctttcctctgatctacacggcctcttctggctgacacccagagccagcccattcggtgtcccccacacacctccttgcatgtcacacacaccctctcatgtgtcacactctgccacagcccccttgggggtgacaagcacacacctttccttgtcacacgtacccgctggagggtctcaaacatggagcccagcccctgtcccctgtctttctcatacacccccctatgctgtcatattcctgatccctaatgtcacacatccaggctgtagagggcacacatacacacacacgcacacacatacacacctgtcctagcctcacattctcccacctagctttacacacccaccatttcctccatttcaccccacacacctacccagcctgtccccacgcacgatccggccagggccacacaagcctccatctgggacaacccttgttcaggacatccccagggagggaggctgggaagctcccggtccacaggcctctactccttcccctcccccagccaggacacgcgagctcggggaacacccctgctccgaaagggtcacatcacacacccctcaaggacacacagacacctgccctgaggctcccacgccccccatcttctgcgccccccaaggacacttatcaccccctcccccccacccctctcctcgcagacaaagctcccagccccgggcctcagcgagaggaggagggggtccagccccctcctcaactccccgctctgtcccccgcctcggggaggggtgtctctcccctccccagagcccttgcacctgccacgggagggggggaaaggatggagaaaggcgaggccccctgcccgctcccccgccccgagccgcagccctttctcacctcccgtgttgctgcgcttggtgcagaccacctcggggggcgtttcgaggggcctcttgcgggaatccggggcctcgggctccatggggggggcctggggcggcggctgctgctgctgcggcggctgcggcggcggcggcggcggctgctgtggcggcggcgacggctgctggggaggctggggttgcggcggcggcggcggcgggggcggcggcggctgcggggccgcggaggccgtgaagaggccgtgcaccgcgccggcggccatcatcctcatggtgggggggggcggggggcggggggcgggggagggggaggggaggggaggtgggagggggagggggcggtggagggatgggggagggggagccccggagagggaaggcgggggtaggggggagccggttctcggggggctgacagagcctggagagcggccgtgagcaggatggcagggccgaggggggtctccgatagggccgggaaagaactgagaggtggggtctctcctgggaccacagaggctggggactggacgcgccactggggggacgggactccccgcttcttcttggctccctggggcaagagggccgagccccccagaccctgctcggggtggggggccggaggagcgtggccggagtgggaggcggaggcggccgctagtgggggcccggggggcggcgggcgcgggcggcggcggcgacggggctggcggtggctgctggcccgagcatcttcttcccggaggctcccacagcgcctggcccctcccacccaacgaggtcacgcccatgccgggtagggccacgcccttcggcgcccccattggtccagccttgaagcctggaccacgtccctctgggttggccacgcccctcccggcggcagagagctggacccgactcccccaggctgctgggaggaccccgggctcctccaagccgtccccactcctcaccttgaatgaacgtttattgagcacttactgtgtgccaggtccggttccaagcaagcacgtcacagacgttatcgcatttactccccagagcgaccagctctgtgagttacgcttattatccctattttacagatgaggaaacagccttaggagcttactttgacttcacttggtcaagacaagaaatttcgactaggcgcggtggttcatgcctgtcatcccagcactttgggaggccgaggcggaagaatcacttgagcccaggagtttgagacgagctgggcaacaatattgtgagaccccatctctacaaaaaaaaaattttttttttaattagccaggcgtggtagcacatgcttgtagccccaggtactctggagtctgaggtgggaggatctcttgagcacaggagtttgaggctgcagtcagccatgatcaagcaactagattcgagcctgggagacagagcaaaaccttgtctcaaaaaaaaaaaaaaaaaagaaagaaagaaagagaaagaaatttcacttcactctttttcaatcctttcagctgggaaattccccttcaaatctttcatccatcctttgaagaatcaacaccgtgatgctgaaagggctcagaggattgaattcactgagctggagttgcagcctgcagcacctgccctggggcacaactggctctccattcaaacaacagcactcagggcctacctactaagtgccaggcactgtccctgatgctgcgatacaatagagaacaaaacagccttggcccttgtacagtattactactcatgtcattaagaaaaatttgttttcagatgacaaagtggaggcctgggaacattgagggtggcttcttcaagggcacacagcttgagagagagaaactgggatgagaacgcaggacaagtccaatttcagagcccaaagtcattggaactagggtgcctttctttggaatggatcattgctattattctgtgttccttgatgcaagaatttccttctccctgggttcttaacctccaaggaatctttccttcctgggttggtcagaggcaagattaggctcagaaggggtctggatgcaggtaattgtggccactgcgtgatctgcggcagggggatcggctccaacccccccctgctcctcccttgccat

SEQ ID NO: 1560776 - DNA, 4001 bp, Homo sapiens
aagtaataataacataacagcacttctatgtctcaataataaagtctgagtaataataataaacttagatatttatctgtatcttacagagtttatatttttacatattctagattatattgctttgcctatttctttattgcgtcttggccactaggatgccagccgctccggggcagggacttttgtctagattgtttctcctgctcaatcccagcgctcagaaaagtgccagacaggcaggagatgctccaaaagcgacagcccccccgccccctcctccatgccccgaacccctccagcagccctgcaaggttactgctgataacagcattggccgcatagcggtggcttgctctgagctaggcacttccagggactttgcaaatatgacctggttgattctctgctcagccccctgggggaggttggaccgttttttcccacttcacattaaggcacagagaagtgaggcgacctgcccggggttgcaaagctgggaggtggctgcgcggcgacaggaaccctggggcatcttcctgaagttccccatctcatccgccacatcatactgtctccctcttgctcctccaactgggggctcagactgtacagtccttgcgttcccgccggggcccctcaggtctggatccagggtatctcgcccattagcgaatgggcgtcccaagccagggtgagtcccctctgtcccgctcatgcagctgggagtttctttggttgtaataatgattcctctcctctaataaaaatataggaatagcatttaccagtgaccactagaactgccagggccttgtttagggcagaattcacgaaatcttcccaacctcttgcgcccatttgacagtttaataaactgaggcttggagagcagaagccacctgatagggacacgcaaaggtcctggctgactccagagacaagcatctgggcgagggcaggcccgcagcccggatctgggctgcagtgactccgcctggagggccccgggaccctcgccccgcgcatgagcactcaccgaggccagctggcggccccgcggctctcagcccccagggcggcgcccccagcgcggcgaaccggcgcaggcggaggtaggtgacgctgaggcgcacgatggaagccttgtccagctggctggagatggcgccgggcagcgggagaagcttggccagctcgaagaactccaggttctccttcccgcgccgcgagcgcgccgcgttccgggacttctccttgcgctgcgcctgcaggctgggcgggcggcgcggaggaggtgtcggcggggccccggggctcaggggcttgggaactgggggcgagccccgcctcccggggccttgggaacgggacgggacgttgggagtggattccacatctctggaggtgggagcagaccggagtgtggattttacactccgacccagggacagaacctcgagtgtcaattctggtgggaaggaggaggaagggcgagagattaaagatgttgggcgtgaattctgaggaccgggactagaagcagaacgcaggggaccgggctcaggacggtagttaactcaaggtaagaccttctagccctaaggggcgggtcagggagctgggtgtgaactgccccttggcacggggacagaacatcgggtgtgaattggacccgggggggggcccgcggccaggggggcggggctttgctcaccacggtccggacggcgccttgaccatcagcccgggtagaaagtcccaggggacgctggcgccgcggcctcccacgcatttgacctcgcttccgccgccactgccgggatagggggccgccatctccggggggctcgctcaggcgggctccgagccccgagtctcctgcagcgggagggggccaggggcaacgcttagtgccctcgggagaccttctagggaaactgagatccgtgcagggctcagggtcccagcaaggagctgggggggggggggcctggatgatgcctcagtttcccctacctggaggcctcagctcccaccctagccggcccggggctggcgctccgggtgaggacgtgccccgccgccgcctcccccgcgccgcccgccagcgcgcccgcctcacgcccgcgccgggccggctcccgcataccaatgggcgcacgcggcgcgcatacggatcgaaccggcccgcgcgctgcgtgccaagcatgcccaagccgggcggggggcgggcgcctcccgggccaggcacgcacgccccagcccccggagccctctgccccgaggacccgccccccaagcccatccccggtgtctgactccccggatctgcaccctgttttcccggctgggctaaggaggcagggggcagagggcagggacccccatcctgtgtcctgcccagggatccccccagcctctcgggatggcgccacgtgttcggaccgccacatccccacgaccacaacttcctccctgaagaccccggcgcgcgagccccagccccggacgcagccgccgcagcctctgccccaggacgcccccaggattgacccgacactcggggcccaggtgtcctggtctcctgatcccctaacgttttcagttaggtcttcattcctccaggaccaggcgttcagaacaccccctaaccccaggaaccaggccgcccccaaacctcccagccaggtgtccagatgccccagacccccgtgtccaggtctcccaaccccagatttctccaggactcaaacatccgtgcgccccttcccccaggctcgggataccctcgtcccaccccctatcccccaggacactggagttccagccccccattcctctgggacccagaagtccccctcctgccagcccgcaagcttcccctacccgcaggaccgccagtccgattacttggccgcagagcaggctccgggcgcggcgtggggccggccgggcggcgcggaggggcagctccatagaccccggggcgcgcggggcgcagcgggacgcgcgggctgtggcgcccagctctcggcgcccacctcggcctcgcagacttggagacgcgcgaccagcgctgcgggcgggggcggggtctgccggagccccgcccgccgcgtctccgcccccggacccgccctgctcgcctttccctggtagggggccaagctaccctggggtccgagttcccttgccccacggtaacgtcgggggtcagaatgtagcacctcggatcggagctaccccactccaaaaggggaacagcggagtccgggcactgtctacaccccttcaggaggcagttagtgccccagcagcccctcgggacaagacaggtaccctgcagccgagccccatgtacgagtgaagactcacgtcagtgcttcctccagggacacaaatccagaattcgagaccctccctttccgggagagaactcctgagtgtcagcacactctccccccacagggctgggacttcgcatccaaacccaacccgccttaaaagggggacatacacctccctcgtcagggaccaggatccagctctctaaggagctccagagaccaggatcctggcgtcttatctccatcccccgccgcagggacgggaacccttacatccaagctccccattagatcataaatgggaactcaggggttgtagtacctcgcacagaggacgggaacccaggcgtccaagccaggccttccccagtctgataggaggtcctacagttcccctagctccttctctccatgcagcccccacttcccgttctcagggtcctccctggcatgggggtctccaggcacttaaaagcctctacatgaccttaacatggggaaagaaaatggagctggggccgggcgcggtggcttacacctataatcccagcaccttgggaggccagggcggttggatcacccgaggtcaggagttcaaggccagcctggccaacatagtgaaaccctgtctctactaaaaatacaaaaatt

SEQ ID NO: 1560777 - DNA, 4001 bp, Homo sapiens
caacctccacttcttgggttcaagtgattctcctgcctcagccccctgaggagctgggagtacaggcatgcgccaccacacccggctaatttttgtatttttagtgaaaacagggtttcaccatgttgacccagctgatcttgaactcctgacctcaggtgatccgcccacctcagcctcccaaagtgctgggattacaggcatgagccaccacctctgttccccatgaagaagctttgagagtcaggatgaagaattgggtcccagatgttcatacctagcccaagcttcatgcttgcatccctggggtctggggttcccatggggaaaattaggggtcaaggttggggggttgtttcagtttccacacctggctgtggcctccacagtgaagagtttctgctgggagccctcgttcacgtttgcagagatgtcagatattgtctgtccaccttggggcagcaagagggctagaggggttccaggctccccgcaagatagattctggggagcatggcctggaagtcctcagggtgggtgcgatgccccctccctcctcgttctagaggaaaagggcctggggcagagctgcatcccctcccgactttctggactgcctgaatgccgcagtcttcagtgctgggtcctgggcctccccgctcttctcaactccttgctgggttgtaccatgcaccctatccctcagcttctcatgtctgcaccagcgctactgcccatatttctatctgggcctcagccttgtgctggttgctgccgccctcgatgtgccctcgcatccactgggtcccacactggcctcagcatctccccacaccttctcctgggtccccatcccagggatgacatcttttctggggcccttagaagggtactggtcaggaacacacacccttcccactccagaggcttcatgctgccccctgccacccagttcacccacactcactcaggagaatggtgatgtcaggtgctggcttcgcgtccccagacacacagttgaccacgtactcctgcccagctacccaggtgaccatggtgcctgcctctggggtcagcaggagcagcttgggaggaactggtgagagaagggtctggggtaagcttccagcactgagaaggacttgaagattggagttcggtacccagagtctgggagaggagaggctgggggcttggacttccgggttgcggggtaggggagggcttgaagcccagactcatgggtcctgggcgtctctcacccatacccaggatggagaggatcactctgggagacacgagctcgggccccatctcagagcggccgacctggcactcatactccgcgtcatcgctgaggtcacaggcctcgatgtgcaggtggaattcacctgcagggggagccggaagtcagggccgcagcttccgctggtggctgagggtctcaggctctgatcccttacctctagcagggtccccttccaggcggtacctcgggaagcctgggatcctggggtcggggcccaggagcagcccatctttggcccattgcaccgcactgccaggggtgctgaccccacaacgcagctccactgaggccccctccaccaccgtcaggttttcaggcagggcccagaagccccggggaacggaggcaggaatcgccaactgcgccaggcctgaggacacagcgcggtgcaaggaaagggcagagggtttgtctagggaaggtaagtgggaaatgggggccacttggcgctgggtacaaggctgggatcccactcaccttcagtcagcagccccaggagcaggagagaagccctgagcgtcgtccccagggccatcacaggtccccctactgtgacccccacagcgcccgctgccagccacctgcgtctgtctggctttctctgggtccctctctgtgtgtctctgccacctgcttttcttttttatctctttccgttactctcctccctttctcgttttcctcttcccctcttccctgtgagtatctctctctgtcttgctctcagtctcaatctctgagtctctttctctgtctctttaaaaaaacttttttttcttttttcttttttttttcttttttttttttttagagacggggtctcactatgttggccaggttgatctcagactctttccttcaagccatcctcccaccttggcctccccaagtgttgggattacaggcgtgagccactgcgcccagtctctttatctttccatctttctctccttgtctaagccgttctctctccttttgtctctgtctcttcctctctctctgtctctctctctctctctctctcaatctctatcttctctcctgccacccctcactcctgctccttgtctcactactcacagcctttcaagaaggacctgcagcccagagtccagcaggccaggagcctaggagagcgatgaggctgatgcaggcactggcagagtcagccctgctctctgacccagcttgagctcattctcacagtgcaacctcccccaggtaccttccagagcccccagctctggcctctgcccagcaggctcctcccagctggcccagctggagcataaaatcccctgtcagcacatgccaggcgcgttcctcggtgcctccccagcctccgtgaccccagggcctggcttaggctgggaagatgggagaagtcagatcaaggtggtctcccagctcagcaggggagcagccagctgggcccccagctcttccttgccctgatacatgaccttggcaagtctctttctttctttctttcttttcttgagatagtcttgctctgttgctcaggctggagtgcagtggcatctcggctcactgcaacttccacctcccatggcttgaacctcccaggttcaagtaattctcccacctctgtctcccaagtagctggtgctacaggtatatagcaccatgcctggctaatttttgtatttttactagagacggggtttcatcatgttggccacgctggtctcgaactcctgacctcaggtgatccatctgcctcagcctcccaaaatgctgggattacagacatgagccaccgcacctggcctcccttccttttttagtagacatcagtgcctaaatgatgtcagggatctctgctggggaggatgcaagagtgagtgtgacaggctgggagagtgtgggagagagggaagatatgcatgtgtgtacgtgggtgtgagagtggggaaggttagagtgaactgcgatctgtaataagcatgtggagagcgtgtgtgtgacagtgtcttacgtgggagtgcacagggtgtgggcgggagtaaaaggcagagtccaattccaccggcccccagtgtgggtgcagtgtgagcccaaagtgggcgccctttggcaaggactgcatgagctttcttctccctctttttcttgccctctctcccatctcttctttccttctccatgtctctctctctccctccctctatctatcttgatttatctttctttcttttgagatggaatcttgctctgttgcccaggctggagggcagtggcatgatcttggttcattgcagcctcaacttcctgggctcaggtgatcctcctgcctcagcctcctgaatagctgggactacaggtgcacaccaccactccagctaattttttaaaatttgtttgtagagacagggtctttctctattgcccaggctggagtgcagtggtgtgatcatggctcattgaagcctcaaacctcctaggctcaagtgttctttctgcctcagcctcctgagtagctgggactacaggcccgcatcaccactctggctatttttttttttttttttttttttttgagagggagtcttgctctgtcacccaggctggagtgcaatggtgcgatgttggctcactgtaacctccgcctcccaggtccaagcgattctcctgcctcagcctcctgagtagctgggaatacaggcattga

SEQ ID NO: 1560778 - DNA, 4001 bp, Homo sapiens
tgcctccttgcacttgcgcagccggcactgctggcacttgcgccgcatgaaagcgtccatctggcaggttccgccaccccggcaggcatagcgcctggccccaccacggaccacactgcgccggaagaagcccttgcagccttcgcagctgagcacgttgtagtggaagccggaggccttgtccccacagacacggcaaagctcgtggcccagcatcttcggggctgggcccttctttcgcttgcgctctggttcctcttcgggatctgggatgactggggtgggtaggtagaggccatgagaaagccacaaggagaaacaggaaccagagagatgggcccacaggagatccccaggcaaagagccagaggatggagggagagaggagttgctgctcacattcagggaaattgcaatttagaaagatgtatatgttaaggagaaagcaagaacaaaaagcaaagatcagggcctcccattcccatttctatttctttctcccttcctaaacccctccccaagcccccacatcaactccagggccctgtctcaccccagtctgtgctgcaggctgagctggcctcatcagtgcctgggacatcagggtccggacccccgggccacggctccggaccctcctcctttacagtgggtgaagaagaaggggcgccaggctgaggggggccatttcctggaagagggtggaatccgggagaggtacagtgagcttctgctcgtgtgtgataagggctgggtggggaagagagtcactcaccaggcaggggggtatccagggaactcgtggtaggagaggacatggtggggtcacggagcagcctgtagaatacaggggattgagagccttgtggggctaagaagggttaggttaggtcagttacaggtcctgacagggctttcccttttttttccatctctccaaagaccctactctcagccacaaccctggttcctgccagcctacaaaccctccccatccttctaacaagacctgcccccttctgttccacgccagccttcagcttggtcttaagccccgcccctgctgtaggccccgccccctcaggtccaatccacctgctttttctaggtagggcccattctcctttaatcatgctctgccttcacggcctccatgccatgtagtttccccccacctcctcttcttaagactctacctcacttctgccccaagcatccctatttctcattctgaccccacctcctcctactatgctccgccctcaaccttccaggttcagcccctaaagcccccatcatgggcctcccaacaccttgccccgccccatatgcatccctccctccaagcctcacccccacaacctcgctccaggtccccatcccctcccatcatgccccgcccccgccccgcctcctcccttcctactgcacccccacaacctcgctccaggccccgccacatctcctcccatcatgccccgcccccagccccgcctcctcccttcatgccccgcccccgcaccgcgctgcaggtcccgccccatcacctcccatcatgccccgccccgcctcctccattcatgctccgccctcgcacctctctccaggtcccgcccctctccaagcaacagcggggggcggggctcatggctgcgcgcgggggtctcgtggacggcctctcgcggagtgaactactcctgttgccctggaaacagccgcgggaggcgcgaattaccgaggggaggaaatggaaggagagaagggggcagagcggagtacgcggggagcgccgagaagccccgggttcggggctcctcctgcgtctccccactctcgggtgcacctacctgggttcccttgctctgcttttcttcgtcctcctctttagcccctgacacaccgccgctactcaaataccctcaaaagtaacttcgccacttcttccggcaaccccgcccttgcgtcacgtccggaagaggggcggagcgtgaaacttgacgaacttccggtccgcttaggaccagccgaagctgctgccccgcacggaagttggaaactcaccggaagtttaccgggtagatctactgggacttggcagaagagttccgaacccatttcctcgcttcttgggagccaaacctccagccccgcgctttgtggctttagctcattcatgcgcttctctgagcctgcggccaaaccctagctatagctgcttgtcgcacatgactgatttaaggcacgtttgcacttttttggtcgttacaagttttctgattttggagtcgtgctgcttgttagttttatttatttttatttatttatttggagaggtctcactctgtcaccccagactggagtgcagtggtgtgatctcagctcactccagcctctgcgtcctgggttcaagagattctcttgcctcaccctcccaagtaactgggattacaggcatgtgccaccacgcccggctcatttttttgtatttttagtagagacagggtttcgccatgttggcgaggctggtctcgaactcctgacttcaaatgatccgcctgcctcggcctcccaaagtgctgggattacaggcgtgagctgcggcaccgggcttatttttacttttttttttttgagatggagtctcactctgttgcccaggctggagtgcagtgccgcgatctcagctaactgcaacttccgcctcctgggttcaagcgattctcctgcctcagcctcccttgtagctgggattacaggtgcccaccaccacggccggctaatttttctatttttagtagagatggggtttcaccatgtttgccaggctggtatcgaactcctgacctcaggcaatccacctacctcggccttccagagtgttgggattacaggcgtgagccgctgtgcctggccagatttgagatgtcagaattttctcattgttaaaattttgcaaaaatggtttcaataacttggtgattggaagaattaaaaaagctcagtctcggaccgggcgcggtggctcacgcctgtaatcccagcactttgggaggccgaggtgggcagatcacctgaggtcgggagtttgagatcagcctgaccaacatggagaaactccgtctctactaaaaatacaaaattagccaggcatggtggcgggcgcctgtaatcccagctactcgggagaggctgaggcaggagaatcgcttgaacccaggaggcggaggttgcggtgagccgaggttgcggtgagccgagattgcgccattgcactccagtctgggtaacaagagcgaaactccgtctcaaaaataaaatgcaataaaaataaaggaataaaagaatggctactccaggtagagcagcggcttgggctgttcactgtgattatacttatagttatttcttgattatatactaaacaacgggtggattattcatgagttttccaggaaaagggtaggcaattctcagaattgagggttcctcccccgtttagaccatataggggaacttcctgacgttgccatggcatttgtaagctgtcatcgtgctggtgggtgtgacttttagcatgctaatgcgttataattagtgtataatgagccatgaggacggctagaggtcactctcatcgccatcttggttttgctgggatctggctgacttctttactgcatatgctgttttatcagcaagctctttgtgacccgtatcttgtgccaacctcctatcctatctcatcctgtgactaagaatgccttaacctcctgggaacgcagcccagtaggtctcagccttattttaccaagctcctattcaagacagaatcgctgtggttggaatgcctctgacatatgtgtatgcctttataaaaaagaaatgggactatgtgatccatgctcttctgtaacttattatgtctactcaggcccatcgtttgagattgtggaattttccacctagggatgttagaagcgaaacaagtgattaacatgagc

SEQ ID NO: 1560779 - DNA, 4001 bp, Homo sapiens
tttatattaattctgaaaagctacaaaagtgcatttttacaaacttaggggaagttgaggttcctggggtgagtcctcggttctcccagctttgctctgtaatgcaggtctctgcaagggtccctgtttgtcccctaaggggagagcgcaggttggcctgtgcctccaccccactcccgattcaagctcacagcccaccttttccctgccccatctcagtgcaacaggtgatcgagaaccacatcctcaagctcttccagagcaacctggtgcccgctgaccctgagtgaaggccgcctgccggggactcagacactcagggaacaaaatggtcagccagagctggggaaacccagaactgacttcaaaggcagcttctggacaggtggtgggaggggacccttcccaagaggaaccaataaaccttctgtgcagaatgagggactttgctgtgcttcccggagggcttcctggaggagacagcccctagaggtctcacaccttctccccaagcacccgcaggtggtagatgaccacacggccaaaaaagtcagtggcatcctcaaacgtcaccttcagccggtccacttcagcagctggtatggggaaagtgtgagcgtgggcagtcaagggaaactggtgatttctggtttcccacccgcaggcccccaccccttccagacccagctcacactccaccgatgtgggcaacctggggaagctgcaggtccctctaagcctctcacacagaacaggtggtcatcagcaccattttacagaaaaagtggagtcctagaggtcacgtgttcaagatcacacatcagggttcccattcgggtttgggtgagtccaaagcttccagaggcacagaccacccaccccagaagcaggggcaggatatctgaagcgagttgttgtcctcagggtagaaatctacaatcttgtggagagcctgagtgccctgtgaaccttcagcagagaaaggcaatgagtgtctggggtgacccctggaacccctgccacccagggccttctagtaccttccaggcagccccggcgactggagaagccaccctgaaactggatctgcagctgggagacacggatgagctggggaaactccagcgtcacccactgggaggggccctggaagcagacagggaaactgaggcgcaagctcactgcaggcacagagccctgctatgcctgtctcattcacatagttcttggaatggaggggaagaaggaaattcggcacatgttcctttcctggccacccatgagggccccctgacgttctcaaggcatgagatctgaatctgaatcaccctagagatggagggtcgagggaggcgcctcacctggtctgagttccaacatgtctcctcatcctggtcgaaaagatgtttttttccaaactgccgagtgttgcgattcagcactgaactcaccctggaggcaccaggatcaaggcgaagagaggggctgagaccagctctcagctccgcggagggcctgacccccagatctgtccactgagggctcgaccccaggcttagggcctcgccactgcctgtccccacagactcttacctgctcactgtctctggacaaaccaaagagtgggtcatgtcggttccacaagacctcgcagggcttaggattgggcacagccttggttcgaatcccggcgcctcctcaagctacagggcggcgcgatcttggctacgccttggcctgaacgtcctcacctgtaacttgggacgagaaccgccactccctcgcccaccccagtcctaaatgtcgcctcgatcaatcccctgccggaaaatttgggagagaggatcagggaaaccgccaatgcccggaggccaggcctttcacaggaaacagatttcccgcgggtttcgggggcggtggctttttgtgcgaggctgtttctctgcgaatagctcttggagccaaatcttgggacccggaaccgcgtgggcttggcgcatgcgtgttgtaattcaggcgccgaccgcggacgctccagaggtggggtttggttcgaccccgccccttcatgctcgcttcttaaagggcccgggttcgatgattgaatttaccttggttcccttgaagctgtagggaaaaggctggctgcgcgcacggggcgctgtccctcggcgcccgaaggtgtagagcactgattttgactgattttggaatccgaaagacttcctttttttttttttttttttgaggcggagtctcactgtcgcccaggctggagtgcagtggcacgatctccgctcactgcaagctccgccccctgggttcacgccgttctcctgcctcagcctcccaagtagctgggaatacaggcgcccgccaccacgcccggctaatttttcgtatatttagtagagacggggtttcaccgtgttagccagaatggtcttgatctcctgacctcgtgatccagccgccggggcttccaaagtgctgggattacaggcttgagccaccgcgcccggcctttttttttttttttttttgaagtggggtctcactgtcacccaggctggagtacaatggtgggatcgcggctctctgcgacctctgcctcccaggctccagcaatcctcctacccagcttcccgaatagttggaactagtaggcgcgcgccaccacggcaggctattttgtttgtttgtttgtttgtttgttttttggtagagatgaggtttcgccatgttgcccagattggtctcgaactcctgggctcaagtgatccgcccacctcagcctcccaaagtgctgggattacaggcgtaagccaccgcgcccggccagagagacttcctatgacaatgtctttcttcctactctaacctactctaccctaacggctaccctaacctactctaacctactctaccctaaccactaaatgcagcctgggaatccccgaacttcactgcctcccggaggccaaaggcagagttgtggaaaaggccacgatgttgggagtatctgaagtcctcatcaaccctttttgttcttgttgggacagaggagccctggcctccaagtttgtctttcccagaaaatgctgctgggacgtcaaggaaggcttcttggaggagggagcatgcgaggtcgggtgttttttgttgtttctgttttgttttgtttcgagacggagcctcactttgttgcccaggctggagtgcagtggtgtgatctcagctcactgcaacctccgcctcccaggttcaagtgattcccctgcctcagcctcctgagtagctgtgactacaggtgcgcaccactatgcctggctaatttttgtatttttagtagagatggggtttcgctatcttggccaggctggtctcgaactcctaacctcgtgatctgcccgccttggcctcccaaagtgctgggattacaggtgtgagccaccgcacccaggctgtgaggtgggttttgaagcatgaacaggagtttgccaaacaaagcctcagataccaagctgaagatttggttcactgattcactagacacctcctgcaagctctactgtcacactgtcatgtccagccttctgctggatgatgctggggacagcaagaggcctcagctccaggcctgtcccagaggagcccctgatctgggcaagacagaggtagacatagacactcctagccccaagggagagatggggccggaggagcaggggctctacctggaggaagggcttcctgggaaaggggatgttagaactgcaccttaatagggggtcaggcgccaggaattcacaagggtgagaaaatctggagtggggagggtgtcccaggcagggagcttagcataagccaaggcctagttgggtgaaagaccatgaatttgaataaaatatgtggagccacatcctgctgggcccggagcagtcatggaaggtgttggagaaagggcaggacaccatccgttctgcatgaatggagggttc

SEQ ID NO: 1560780 - DNA, 4001 bp, Homo sapiens
aactacccaggctgggccccagcgagaccctgctcaatccatttgaagctcagaatggaatggtgatttcaccaggtcacacaactgacacagcacaaacctgtcagctccaagcaaggccccccccacccaaaattgctgctccctgacaccaccctcaggaagctcctgggaccccaaaactgcctgagcccccctcccttaccctccctaaagatatgaccagagagcaggcggttttccagcagcaagaatgaggccaaagtctagtggcccactttgtgctggaggagggagcaaggcagctctgccacacatggccacaccaggccagccctgacccgggacctggggccaaactccaccctcgggtacctggggccctatttggtggcctcagccaacaagccttccatcagccgttctccctggggccactccgatccgaactcagcggtccccaccctagccccacagttcccccacagtgcccccaactcgggcagcgtccctccatgtccaacgcaaagcaggcaccaggacctctctctgggcctttgggcctctgttttgggcagctgggaactgagaccgtctagacgggctccacagagaccctgcatgttcctggggtgcagagtaggggcttataaacggacagatcggatgctcgcccgggaacggtgagaaaagaactcccgggctggacaaccccgatcgctttccctggggaccttccgccagaacagctagcaaggccacgccctgccagagaggtctccgacctgggacagcccaaggctcctgctcggaaacgtttcactccctgcccgtctcagagacacccaaagtttgagggatttttccaggagccccaggtctgcacccacccctgggggagagggacgtttcagtcaattccggtggccctgccggccttccagtggcgatttccggtgacccaaggcccagagtgagcccagaggggttccctgagatgggcaagcccagctcccacccccacccccaccgctgggcccctcatgcgaagaaggccgccccgtgccaccccagcctccctccgtctgccgcctccgtagccacagcgactttggaagtgatatttgaccccaagggcgcgccgtatcgatccgcgcggccgcagacaatggcccctggacgctgcgagctccacggtccaagttccacgttcgattccctcgagggcatcccgcgcgccgggatccccgagaacgggtgccctggggttgggttaccacccctgacagcacccctacccccaccccagcgcggagatgacccctccccagagaaaaagcggagggaaggagaagcaagtaactggggcaaaagcctccagggaccacctgatggggggggaacctgcaacgatgtagcgccgactgtatacacaatcccagccatggaatgcgggaggagggtgctgtgcccctatctcagagggggcagtggaggcccagggaaggtcagcgccaggcccaaggtgaccgagcaggtcagaggcctgccccaggtcggggcggggtgcacggcggcggcgcgcggatggggggctcaccggcaggtgtagctgaggttgcggcggatgcttcgcttgaaaaagctcttgcagccctcgcaggtgaagacaccgtaatgcttgccgctcgacttgtccccgcacaccacgcagtccacctgcagccccggccgctcctcgtcgcccggctcggcgtcgctggcggcaccggggggcgaggccgagtcgtcctcggccgcgcgcgggtagccgcccgccttgtccacgccgttcgtgtcgccgccggggccgccccagccgccggtcaccatggccatagccccagggcagcggggccggggcgcccccaccgcgctcttccctccgggcacccctctcggcccgggggaccctacgcggcgcgcattcggccccggcgcgcggggggcacgggctgcaccccccaaaaaagttttgcagcaacttcctgcggccggtcctcgcgcccgggcggaactggtcgggccggttccaggccaactttcccacgcgtgcgcggggccgggcccggggccgggaggggcacgctagaggcgcgggccgggggcccagaggactcgcgtcccgccgccctggggccccggcgggggcgcgcgggccatggcccggcccgagccgcgcagggggcgtcctctggcctggccgccgctcgcccgggggctgcggccaactcagcgggccgccatccgagcgcgggaggccggggggaaagtttggccgcaagttgcgcggccgcccgtggcggggggggaggggcggcgggtgcgcgccggggctgatcgccgcgccccctgggtcccccggcgcccgcggctgccgctccgggcctgcagggccgctgggccggcgcctctggagctgccgcccccgctgcggccgctcctgcctggcctgggcctgcgcctgggcccaagcctcgctctcgccgccgccaccgccaccgaccccgcgcgccggcctcgcgctgcggccggtttgacacacagcgttccattcgcggggcgggcggggggcgggggcgggggcaggggcgcgcgccgcgggctgggggcgggcgctcgttgccccggcgacggccgcccttataagggcatgggtggccgcgcgcggcgccgggcgaacgggccggcgggagggacgggggccgagcgctgggccgcggggcctgaccctcccccgcctccctctgcccctccccccgcacccccgccctcgccctcgcccagctcgggccttaacccctgccgggccgcggcgggagcctcagccgcgcctgccctctgcccttccttgagcctcgccaagatgtctctccaaggccctcccctccacctctggccttggacgttgggtcgctcgatcaccctcgaggcgcccctcggaacctctccccaccccacagttcctggcaaagcaatgatggggggccagtggcacccggggggggggtacgcccctgcgcaagacacacgcgcgcgcgagacagacagacacacacacacacacacacacacacacacacacacacaccctagattgtgtttgcttcctcttccagaaagtcgccgcgtctgacccccaccccaccctttctctgctcgggttaacacctggtgcccggaatctccagggggaagggatgttgtggtctgagaccggctggccggggccgcgaggtcagggggcccctctgcagaatttctggcctccgggggcagggcgcccacccgccccgcgcggctggaggcgacaggcatgccctgtctgggggcctgcccctttttcccttttaatttccttttctttctgtgctttgcagaaagggcttggcctggcggccggctggactgcagatgtctcttccaggcgccctggagcctcgcagctgccgccacctccaactcaccccatcccccagtaccggggctggggcccgcccgaccagcatttattaagcaccctttgtatgcgaggcccgggctggcgagcctctggctctgggcaggttaacctttaaccggctggacaagcccttccaggagtgacctttcacctcggagtcttgcagccccagccacccagactgtggtcccaccccgccctgagcccagagctggacaccagagcatgcagctgggcctctgagagctctggccaggacagtgccttctgcgcaccccctcctctgcctcccagagccctgatgagacttgaagaattgccctccctggagtagggggaaagattcttagagatcttacaacacttaaaaagaaactgaggttctgggagagccaggcacacccagccctgggcctctcaacctgctccagggacgttctggctgcctgggaggtggaggaggaggcgttagtaaacacgaaaagcaggaaggactagg

SEQ ID NO: 1560781 - DNA, 4001 bp, Homo sapiens
ggggctggctgcttgcacaggggctagaacacaaggtccccagcctgaaattccaccaggagcctagaacatggggacttggggagtcagtggccactcgctttttgcagtagggcagacaggcacccgcccatgggccctgaccctccgcagtgcctgaaattcctccattcgtgctttgccccccgcaccccaagtcctggagcactggattttgggggtcccgcccgggtctctgtcccagagtcctaggaaggacttcacgccgcttgcagagagggaagtggtgggaggacagaagtggagctcgtgctggaggccacccttgtgcattgtaaggacaagaaaagaggattgtgtgggctggcaggggcgggcgcagacgcgcacatgggcgtactcgtggcccacacccaaaggcgctgcacacgcaccctgccggcatccacgcctcagatgcccgcgcaggcgcacgcatggacatgtgcgtgggcacaggggtcagggcccacgcaccaccctcaccccacagcacctgcggtggggcaggcattagggattggtggggagttgggcgagggtcttgccctcagggtgggcatttctgtgtccctatagcagcacttttgcccgtgtctgtgcccccagccccgtctctcctctctccacccctcctcaccccttcgaatctctgggcctttcttccggtttttagctcctgctccatctcccgcctccccttggtccctgtcccctggggcaggtcactgggacctcagatccagcctctctctcctcccaccgccccccctgctgcgccgcgggggccaaccaggcgaatgcccaggtctaatctccatctggcccccacgggacctcagggcagagcctaattccttgtgacagctgagccgaaagaccccagttcccagaagtcaccctagctccaccaggccattgggggaatttgcaacctccctccaccccatctttttttagaaaatgtatttattattataatgttttgagacagaatcttgctctgttgctcaggctggagtatagtggtgcaatcatagctcaatgcagccttgaactcttgggctcaagtgatcctcccacctcagcctcccaagtagctggaactacaggcgtgcgccactacacctggctaatttctgaagttttttgtagagatggcggtctcgctacattgccctggctggtcatgaactcctgggctcaagagatcctcctgtctcagcctcccaaagtgctgggattataggcaggcgccaccatgccttgccctgaataatcttttaggatgtctgtccctgcctccctgcaagggggctggctggccctatctttaaaaaacctatgacacccccccaccacctcccactccactgcctgaaattctaccccttacgttgggggtatctgaccccacacagaggaggagcttacactgggccaggcgggcaatccgggcgtccagggttcgaggcaggcggtgcagggggaccagcgcaggtccgaggcggtggctgagaagcaggccctctcgacacatccagatggacagcacggagctgcagagcactgaggccaaggccgccgccttccagcgctgcatcctcagcctgcgggcacgggatggtcagccgcacgccccgtctgtccctccagcagccaacgggcacagggcgctgggccaggactcagtgtggggcctttgactttgaacgcctgccgaatggtcgataatcacatgggaatggtccctcaaggaaccattgaacaaggaaggggttggcctccgtgccaggagtcacagggaaccgcccccatctgggggtcccggagtgccttcctgaggagccgatgacaaggtccagacttgaataaacgtaggagttggccaggcagaggagaatggcatcacaggcaggggacacagccagtgcaaaggccccgaggccagactgagtgtggcgtatcccaggaacagcaaggaggccggagcggctgcagctgaggagccagggggaagagtgaaaggaggagaggtcattcccggcaggtggcagtgtgggacaaaggcgcggggagggtggtgtttaggacagtctggaggcaggaatctggggctgacactgttccctacatgctggtgtcctccattgactctgcccctctctgagcctgtttcccatccagatggataagcaggcccagaagtgggcagcaatggaccagagctgccctggacatggagtcccagctctgggcttttgcacagataggtccttgcatggagaacacttcttccctccctccccactcccactcccctttctttctctttttctttttttcttttggagatggagtctcactcttgtccctcaggctggagtgcagtggcgcaatctcagctcactgcaacctctgcctcccgggttcaagcgattctcctgcctcagccccccgagtagctgggattacaggcacctgccagcatgactggctaatttttgtatttttaatagagacagggtttctccctgttagctatgctggtctcaagctcctgaactcaagtgatccgcccaccttggcctcccaaagtgctgggattacaggcatgagccaccgcacccagcctcctctctctctttctctttctttctttcctttttctttctttcttctctctttctttttctcttcctttctttcctttctttctttctctctctctctttctttttttttgagacagggtcttgctctgtcacccaggctggagtgcagtggtgtgatcacagctcactgcagcctccacctcctaggctcaagcgatcctcccacctcagcctcccaagtagctaggactgactacaggcatgagccaccgtgcctggctaatttttaattttttttgtttttgtttttgtttaatagagaggggaatctcacaacgttgcccaggctggtctcaaactcctgggctcaagctatccttccactttggcctcccaaagagctgggattacaggcgtgagtcactgtacctagctctcactccccttgcaatctcagcttggagggtgcctcctccagggagccttccatggctgcctaccctattcacttcaacctctggctggtgcaggggcgctagtgggcccccaggaatgccctgagctttacccattcgggcaccagttacttggtgctgtgagtgcctggtggcatcctcctcactgcatacagtcggtgtttaataactcacgtgtacacgcccaccacactcgacgccgtctgggctcctcccgagcgtcccgcggcccccagcccgagtttacattccccctcccggctgcctagtgtggggcggcgtggagcctggcggccggccaggtgtaaacatttacaccgagcactgaaagccgggctggatgcgggtcagcacctccgggcctgggctcggctcatggggttcccaggcgccccccaaatgcgtgcaccttgtacctccagccttgcacgctgccctgcaccacccagagatttatttgcatgggatttgcatttcatttgcatggaccgcgcctcgtgtcctgatgtgcagaaactcaaaccaccccttccccaccccactcacccccatggacggcgacgacaggagctacacatatcagaccttaagtaacaggacacatttattaagcaccagctgtgtaacaggcctggtgctgagcccacaagagaggcactactatctccattttacagctagggaaaccgaggcacaaaatgggtaggggcttgtccaagggttagaaaaggacatgggatttgaacccaggttctttgacacagcacacaccatatgggctgggctgggcttgggagcagatgctgtagtcaccctgagaactcagcactattggtggtacttgagactgtttggtattggtggtggttat

SEQ ID NO: 1560782 - DNA, 4001 bp, Homo sapiens
gggagagaaggtcccactcaggggccagaaaagggggcaatgttgagggtgggggttgggactcaattggcacactggggaggaggaaaaggaggaggatggggagggagcatgaggggagagggagcatctctcggagcacctggagacagaaagagggaggctgggattagagaagggggtaaaaacttcagtggggaaagaagttgggaaccccaggggaggcttgcctgccaggattgtggggaagcccttgttctagaagtttgggggaccctatatctagggcttgcgtaatgcgcaacttgtagattaataataaatattcaactactacaggccaggcactgtgccccacacctctaatcccagcactctgggaggctgaggcaggtggatgacttgaggtcaggagttccagagcagcctggccaacatggtgaaacctcatctctaccaaaaataccaaaattaaccgggcatagtgctgcacgcctgtaatcccagctactcagtaggctgaggcaggagaatcacttgaacccaggaggccgaggttgcagtgagcagagagtgcaccactcccctgccacctgggcgacaagagtgagactctgtctcaaaagtaaaaataaggccaggcatggtggctcacacctgtaatcccggcactttgggaggccgagatgggcggctcacctgaggtgaggagttccagaccagcttggtcaacatggtgaaaccccttctctactaaaaatacagaattacccgggtgtggtggcgcatgtctgtaatcccagttacttgggaggctgaggcagggcaatcacttgaacccaggaggtggaggttgtggtgggctgagattgaaccattgcactccagcctgggcaacaagagcgaaactccgtcttaaaaaacaataataataataaaataaaaataaaaataattcaactactattacttaacagtaacagatgttgaaatacaggctcagagaagttaatgatttgtgcccggtcacacagccagcaaatggcagagatgggacttcacctctgggcaactgcactctgccgtccttcctgtgcaactctgaggaaccgacagtcttgcatcttggaggatgttccaaacaattttttttttttgagacagaatctcactctgttggccaggctggagtacagtggcacaatcctggctcactgcaatgtctgcctcctgggttcaagtgattctcctgcctcagccttctgagtaggtgggattacaagcacctgccactgtgcccagctaatttttgtatttttaatagagatggggtttcaccatgttggccagactggtcttgaactcccaacctcaagcaatagtcgtgtcctggcctcccaaagtgctgggattacaagcataagccaccatgcctggtcccaaacaaaatttttttttttttttttttgagatggaatctccctctgtcgcccaggctggagtgcagtggcacgatcttggctcactgcaagctccgcctcccaagttcatggcattctcctgcctcagcctcctgagtagctgggactacagactcaagccaccacgcctggccacattccacaatttagagaaaggtcacaacctggaatcctagggagaccccagttcacctcaaaactgccactaaggaggtaaaacgctgcccctctgaggcaggcttcagtttccctgtgtgtgaaattgacctggcgctgggagaggctggtggaggcgcggattttgcagtttccctacaacattctggaagcctgtggttctgggaaagggtggcgtggagaagactgggaaacagtcagtagttaccagacctgtcagcacctcctccgcctcggagctctggggctgggagtccccaggcttcggggggcccctgtggaggacacaggtggccccctccttcctgacatctcaggagagggagggggcaaccacctaggggaagaaaagaatagacaggttatagaggcaggtggggaaggggccaaatccctgaacaaccccttcccagagttcctcttcaagtgcagggtacccaagagtcaaggccccgccccctttccagaggccccttttctacccaggtgatggctcctggctgggatgggaagcagatggagggaggggaagggagaataggggaagggagaggcagtggatgaaggaggctggaagagattacatccccctcggcccattcatctcccagatggggcggaactggcctggacacccgggtccctgagggcccacactcaagaagccctggttccccaagctgcttcctggaatgttccctcctcacaggacaggccagggcccgcccaagacttctgcacatacctggagtggctgcctgccctggctcctcggtacaggaaaggggaagggtggagagtgaaaggagcccaggctgacccaaccaggaccgccttctccctcagaccgagtagtgcagaccccagggcctccaccttcagacccaggagttcagatccccagcgccctcctccctcagacccaggagtagtccaggcccccagcgccctcctctctcagacccagaagtccaggcccccagcacccttctccctcagacccaggaggagtccaggcccaggcccccagcacccttctccctcagaccctggagtccaggtccccagcgccctcctccttcagacccaggagtccatgcccccagcgcccttctccctcagacccaggaatccaggcccccagtgccctcctctctcagacccaggagttctggaattcaggcccctccttctcggatactaagaaatgcagactccgggttcctcatcctccagatttgggttgggggttccggactccgagacccctcaggggaaaccggctgcatatctgggacacttccctcttgcctcagtttcctccgccaagccccgccccggtcggccccgcccccgtccctccccacccgagggcagggcgaccaggacgccggaatcccgagggaggaggagtggagatcttacctggggcgccctcttcggctcccgcggctgccctccgcccggcagcagctcctcctcctgctcgctggctgcagggacgctcgctggcccgccgggtgctagctgctcacgctccgcagggcccgggtcgggggcgggggcggggcggcgccgggcggcagaggaggggccgggggatcctgccttgcactcgcgtgccgggaccttggaagccaggcctggctcgttcaacgcggccgccttggtcacaggagtcccagtttccagctgcctcctcctttggacctagcagtccaggcccccagcccctcctcccttcagacccaggagtccaggcatccggcccctcctccctcagacccaggacttgcgaccccagccacctctccccccagccccaggcgcctgagtactaagcccacagttccccccaccacctcccaaccccgccccgtctcagactcaggagtccagcccccagcctcctcctccattagccccaggagtctgggcctgagattcctttgccgtcttttgccaattgcgtgtcaatcccggggcagattcccaccctctgctctcctccccacttcccaggagctccacgccagacattaaccagctgggcttgggcagtgataaggccccaggcccggggagacagtggatgtgggggctcccgcatactcctctcccctggaatttcctggctggggaccggggagaaggtcttgtcctgagctcagataagagacgtgcaaggtatcataggaccagagatagacagatgtgtcttaagaacaatcagctaccttgagaaatggtgcgcggtgacatgaagggagagatagggagaagacatggaaaagtggggagagaccaaaagaaagagggggaccgagactagagagagtgggg

SEQ ID NO: 1560783 - DNA, 4001 bp, Homo sapiens
tggagggaagagaggtggctgggctggggatctcagccgcagcctctacccctcctggaggtgtcctgtggaactggggcattccacccccaacccgtccaggccccctccccggctgcatggaagcgaggaaaatagttccatctggggagaattactgtttacataacccaaaggggaaagaacgcagacaaaatcgagaattttgcctgaactaatccgtagcttaacaccccagagttatccgtcagtgtcgaggggcagggggccctggggagcggtgagcggctggagcagaggggctggccaaggccagcagacgtggaaacctagagagggacacagagacaagcagggctgggcaggagagggggcttagggacagatgaagactcagtcacaaagaaatagaggacaggacagaggcagagagaggacagtcagcctaggggaggcgctcggcacagagaagttgctgcaaagacagaggaacagacaggaggctgagaggctgagacagaggccaggcacccagaggccacagggagctgggagactgaggctcggactgcctgggggctgggataggtgggcaggtgggctcagagacacccagcctggcaggccctggggaggggagggaaggggacaggctaggggtgtctggcgggggatcagaagtgagagaccgaggcccaggcctgcagggatcagagccattgcctttcccacatggggccctaaccttgttctccacaccctgggcacggaaggggattatcaccaaacaacccagcctccctgccacccgcccacccacccccagcgccccacccttaaccctttcccacccgagtgcaaagcccagagagctgagctgaggaaagggatgctgggagctggaacctgggtggctctggggcttgggagcgggacagtgggatccccatggggtcaggggaagcagacacctgggttcccttcagaactcagggtgtggggaccggaagttagcgttctgggactttctgctcacctcaaccctgccctctattctgggcctcagggcctggagaccagagtccccacattctccacccatccagagttccccagagcagatgggggaacagatgttgggggcggtgggtaatgaggaggagagaggcaggaaggcaggagctgggacagggtggggtgccagatgccagggcgcccgtgggggcagaagcccagaccctaggaatggcaggagctgggaaggactggactctgaaatgcccccactttccccttccagggccagcagcctctggtgaggagctcactgtggactgggggcctcggagcctttccaggcccttggctctgaatctgcgcccaggaatgtccctgggctgggcatctctggggcaccctggcggttgaggtgggccacacctgccccagcctggcctcactgcccatgtccccactgctgttggccacatgcagacgctgcctcccctggcccagatgacaggcctcgccctccgccctcccaaggagcctggcgccattttgcacccactcaggtggcagccgcctgcctggccctcagcagcatcctgttaagggccagtcccccatgtcccctttctctctggatagttgctggatagttcagggggtggcaccctctggcccttagcaccttgaggaaccaggctgtgagttccctagtgttcctgggggatccagaaaccagtcgtggcccacagagagcccatacccctctttaagaaagagtccagccatgctcccagcagactcataggaggcctgcctgggcggcctggggtccatctgggacccaggcttcctttccctggctcttggcatgcaccccccaacccgagccctgaggccccgacattggccaaacctgcactcaagaagagagcgtcctgcagccagttccccgcaggctcttcctccaagctgtggcgcggtgggctctcaggagggagtggcgtggctgttctcaggccccaggctagtggggtttctgggctgggcgggggctcagagcagagcccgcagaatctaacaccgccacccccctcccaccccaatccctcaccaaccgcagccacgctatccccacagggacccctgccagccaggccacccgcaacggtgtgggacgtgagtgccgttgcccccggcggtccagcagcaggacagccccgagcagcctggcctaggaggctcaccgcaggtaggacgggaggctgtcagtcgggggtcccgctccatcccactccacccctgcccactggctcagccccgccttgtggtggccgccatcgcgatcgggcaggggctgacctttgggagacaatcgctgttggaaactttgctcagcccctgcctctggctgcgtgaccccaagccagcccctcctcctcctctctggaaccttttgtcagctgtgggttcaccgagccttaaggtcagtaaaatctgtgctcttggaaggttcagaccagcccctggaattcaaaagacctcagtcgctttctaagatggtggggaaggcgacaaatgagctgagaacacctgggccccagtgtttctcatgcggcagagggagaaggcggggacccccggggtgcgggggaccaagctcaaaagcacctccccagtgccgctggtgtcctgcgagtcctcagtgctttcatcgtgacattttcatgcgaatgttgctgtctgttctattccatctccgaatgggttgactagaaaaataatgttttctgtcacttcccgctgagaaaagcaagggcctcatggagttggggcgcggcacctgctgccctgggtggccccagcgtttatcgtggtgtagcgtgggcccaatcctgacaggcttgggacccactgccccaggcccgcccccagggggtgcgagggcacagcaaaggcgaccctcgactctggacccttaggtaccacgttggagggggccagatttggcaggagcaggacagggacatcggatttgaaagaagggagtcactccgaaagctgggaggtgcatcagctgcaggaggatggaatggggctgagacgccccccatcagagggggcatgtcagagctgggggcccaggctgtgtgagtcagagtggaacttcgggattcaggcgcaggtccctccgctgaccctgcctgagctccccctgtatgggactttgccgggggttcgcgctgggaacacagacccctgccccatcaggctcagtgtccagagagggagggggagaccccagcagcgcaggtccttctgtgctctaggttgttggaaggtgccaagtgccttggagcaaagcaagtggggggggcggccacgggggcccggggattgcagatgtaagtggggtgatgcggaggggcatttgtgctgagcccaccgccagcacagaacccagctttgctgccacacaaaactgaggaagaaggcttaggtctcgctgcgtcttcctccccacctgggcgaagtctcaagctccggctcctggagggaagcttttgttccttgcagcttgagctgcctgagttgatgggcgcccctgcgggtgcccgggggcaggcggggaagaacagacggagctgccacagccgagcacatagtgccccaagctgggaaggagactgttttttttgttggggagagttctttaagggctggagaccttcaccctcacagcttctacagaaggccaggcctgcccaaggcacatctctgaggtgggttcaacccagagagaacctcagtgctgggctcacacagacctctaacccctgccttggtggcccagatataacggagtctccacgaggcagggcaggtcacccgcaggagttactgggcattgtgtggctgggtagggcctgccctcccggacatgttcaaaaaggccaggatggtaaccccagccatactgcctgggttcaaat

SEQ ID NO: 1560784 - DNA, 4001 bp, Homo sapiens
catctcccagtgagcagggatagtccatgggcatggggcatgcacatggctgggccctaacaactatgcaacacataggcaacactatgcccggctcatagaaggtgctcaggaaacatgtggaatggaagaaaagaaatgggactcaacaaagccttcctgggtctgcaaggatttcacagaatagaggcctaacttgcagcgtggggaccaggaacatgcaatgatccgttccagggggtaatgactagcccattctttgttttttgagacagtctcagaaaacagagtctcagctctgttgcccaggctggagtgcaatggcgtgaccttggctcactgcaacctccacctctcttggttccagcacgagaattcgtgcctcagcctcccagagtagctgggattataggcgtgagccaccacgcccagctaatttctgcatttttggtagagatggggttttgccatgttggccaggctggtcttgaactcctgacctcaagtgatccgcctgtctcggcctcccaaagtgctaggattacaggcatgagccactgcgcctggcctgaccagcctatccttatggggagctataggaagattcggaccacaagacactcactgaccttcaggatctccaaagttccaaatcccttaagaccaaagcttttattgggtttgataaacacatgtaggaattaataaacaagcagttcacccgcccttctgtaatttaaactacaactcccaagagcaccatgaagtcagaataccccagctagccaacatcaactgctactgggaactagcaacatggtgctactgggaaatgtagttttgtttgtttgttttcaaattccttcttgggtggagagaatcttaaaaaaacagacgtttagttggggcgtgatgcagattttccacacctcagagtcagggacctccagtttttcaccaagtcaaacccctgctgctgggaggaatggtgggcaaaaaacaagctacaactgtagggccaggaagtcactggagcatccgccctacgggcaccggggtctgcaggagctgtagtaccactgcaaacacctggctggatagcagggcagggccactcacgggactctcagtcgcaggggtctcctccttgttgggcgcccctcgctccagggggacagccagcacggcgcgaagcaggagcagcagcagcagcggcaacagaaggagggttcctcggggcccagagggaggcatggcagtgtggtctgtgggggatggagggctggataatgcataatgtctgtcccaagcctcttcctcccctggaaccaggagttcgggcccccagcgccgcccccacttccaagaatcaagacacaagcattttgttacccaggccccaggattccaggcctccggccttcccttcctccgacacaggagtctgggccctcagacccaggggtcctggctcccaacacgctcctctctcacactcaggaatccgggatctcggccgcctcctcccccagacccaagagtccagggtcccagcctcctcttttcccaggacctaaagtactggcacccagtgcatcctcctccgggacccagttttccagccctctggcccccatcctccctaggacccaagagtatgggaaccctggcctctcacctctccttcaccgcagagggcgttttccagggcgggcaaggacctccggtgcgttcttggtgacttcccccctagaccacgcccacttatccacagaggccccgccccaaagaggtctgattggtccacgctggctctgtagctttcatccacgtccagcggccccgccccttgccgaagccgctcgcattttcgtgaaagcctcgcttctttctcggaatcccagcctcttgacgccacatttcccgcctatgccaaaagagagagaaggctttcaaagataactacaactccctgccggccgggggaaaaataacttccgcgggcatcgtggccccttcgcctcatgggagctgtagttttcccatttattttcgccccacgaagtgcctggaagttatagcgcggtagcaattgcatagcctttcttatgagtttctttcttcttcttcttattattcgagacagggtttgctctgtcacccaggttggagtgcagtggcgcaatcacttctcactgcagcctctacctcccaggcccaagcaatcctcccgcgtcagcctcccaagtagatgggaccacaggccacactaccatgcctggctaatgtatattttttaaatttttaatacaaatatttaaatctttaattcttttttagcctttttttttttttaacgttctgtctttcacacttctcacactttgttgttgttgttttttaaagagacggatgtcaagccgggcttgggggttcactcctgtaatcccagcactttgggaggctgaggcaggcagatcacctgaggtcaagggtttgagaccagcctggccaacatggagaaacctcgcctccactaaaaatacaaattagccaggcgtggttgcgcatgcctgtaatcccagctactcaggaagctgaggcaggacaatctcttaaacccgggaggcggaggttgcagtgagccgagatcgcgccactgcactccagcctgggcgacagagtgagactacgtctcaaaaaaaaaaaaaaatctctgtgttgctggtctggatctggatctcctggactcaagcaatcttgcctccccgtctccgcctcccaaagtgctgggattacaggcgtgagccactgcgccccgcctcttttaagtttcttgtaagcgagatgtgtacagtgaggccgcgaggtctctggtctcccgctctctctctctctttttttttttttttttgagacggtgtctacctctgtcacacaggctggagtgcagtggcgcgatctcagctcactgcgagctccgcctcccgggttcacgccattctcctgcctcagcctcccgagtagctgggactacaggcgcccgcccgccacaacgcccggctaatttttttgtgtatatatatatatttttttttagtagagacggggattcaccatgttagccaggatggtctagatctcctgaccccgtgatccgcccgcctcggcctcccaaagtgctgggattacaggcgtgagccaccgcgccgggccggtctctggtctctttaaggaacccccacacggcattcgtgttcagaacccccggagcagggttgcctggctgcatcagtgaccgagttcgttactttgttggaagtggagagtggagggtcagaagggagtggaccagttcaggtcccagagggaatcctccctccctctgagccgtctttcttctcctccctatttcgcagatatcccgagattaggtccccagcttccaaagagaggatcaggtatgtttagagattggccagagaggcaaggtaccgaggcatcaatgtgagcagcctctccaggcacctggtgaggagaacaagtctcccggatcccaggcaggtgggcagtggagttctaggccgctgggggctgggtgtttgaagtgcacagtcctgagttctgatgcctgggtgctggagaattagatatttgggggagagagaagcggacttgcggacccccgtgggaagctggaaacaggctactagatcccgacaggagtgggtgctgggattcgggctgcctgggtccggaagcaaatttaaaggtaaggatcaggccgggcactgtggctcatgcctgtaatcctagcactttggaaggccaaggcgggcagatcacctgaggtcaggagtccggcaccagcctggccaacatagtgaaaaccggtatctactaaaatacaaaaaaattaggcagaatagcggacgcctgtagtcccagctactcgggaggctgaggcaggagaatcgcttgaacccaggaggtggaggttg

SEQ ID NO: 1560785 - DNA, 4001 bp, Homo sapiens
actacaactgcagggccccttctttgcccctgtccagcaggaagtagctagagcagtcattgcccaattcccaacagcagatggggtgccctgtttagaggcgggattgagaggtgaagcccctggacttcctgggtccagtggggacttggagaacttttctgtctagctaaagatttgtaaatgcaccaatcagcactctgtaaaaacgcaccaatcagtgctctgtgtctagctaaaggtttgtaaatgcaccaatcagtactatgtaaaaacgcaccaatcagtgctctgtctagctaaagatttgtaaacgcaccaatccgcactctgtaaaaatggaccaatcagcactctgcaaaatggaccaatcagcaggacatgggcagggccaaataagggaataaaagctggccacccagccaccagcacccaacctgctctgatccccttccgctgtgggaggtttgttcttttgctctttgcaataaatcttgctgctgctcactccttgggtccgcactacctttataagctgtaacactgaccacaaatgtctgcagcttcgctcctgaagccagcgagaccacaaacccaccaagaggaacaaacaactcctgacgcaccacctttaagagctgtaacactcactgcgaaggtctgcggcttcaatcctgaagtcagcgagaccacgaacctaccagaaggaagaaactccagacacatctgaacatctgaaggaagaaactggacacaccatctttaagaactgtaacactcacttcgagggtccgcggctttattcttaaagtcagcgagaccaagaacccactggaaggaaccaattctggacacaccaggagctggagacgagcctgggtgtgcaacacagagagacaagacccccatctgtaccaaaaataaataaaaataggaagactggatcatattaagtctgttctccaagaaaaccaaattaaacggctgtggagatgtactatgtctacacatgtacaagtgcttacacagtggccacgctggaggaaccacgtggagagacaggctccaggccttgagaccccaaagcctaggaaagcagagagcacttcaccaagagcatggctttggtctacaggggtgagagtttccagcccgtctaagcgttccttgctgcttaatctctctgggcttggcctatgcgggggtcccttgggggcctgggccgctgggaggggtcctccctctcacgtcctggcggtccgcagcaaggccctgagcaggccttacctggtagcccaccacctccgccaagtcggggtagacgggcggcggctcgcgcaggcagcacaggaagaaggccgtgtcaaagcggcgagtggtgccccgcaagaaaggggtgagccaggcgctccagttgtgcagcgcccagatgtcgggtgtgcagtcgaggtgggcgcacagccgcaggaagtggcgcgggtcctggcgcacgcggtcgcgccaggaggccaggcccggcggtggctccagggcgaggccaggcccgggtgctgggcctggtggggaagtcctgggccgcagcagcagcacgcccgcctcctcaaaggcctcccgcacggcgcagatgcggaaggctacgtcctcaggcagcgtcccagtgttgtcggtcttgtggtcatcggtgtcgggcagcgacgggaaagcggtgcggctgaatggcgccgggcccaggccgaagcgcggcggcccgtggtgcggcgcgaagaggcccagccagtccgccgagcggtcggccgcatccagcactccgccggagaagacgtgcgcgcccggcatgaagccttggtgcggggagcgctgcagcagcagcagccggaagccctcggccggcggcgggcgcgacggcggggtggcggtctccgggcgcgaccagccagccgccaggacgatgctggccgcccgccgccagcggctggggcccggccgcagggagctgctcatggcgcgcagcttcccggatccgattctggcgcggcctgagctccacggcaggtggcccggccctgcagggaccccagcacctccgggggcctcgcgggaattgaggacgagcctctggcgttgggtgaacctgggcgtttggtcggcaacggcgcctgcctgtgggaggggcacccgagcagggaccgcctcgagtgcactggggcccagctagggcactctcgcgggacaatgggtgtcacggcagccagcgaccgtttgtcattcacagctgcctgaaaggaggaccgcagtattcccacgcaggaagcttggaccaaaagcaggaatgcttaagggcgcatatgacttgccatggtaaaaaacaggatgccaacccaggcctgatgacatccacctcactaaaagctaaggactaggactttctgctttaaacaaggacccacatgtgggtgttttctgtgggagagggagagaggacattcgaagggcagaagtctgacctttgcaagcacacgtgaaccacaccaatgagaaatgaatggacgagccagatgccaatttataaatttcctactgcacaccttgaatgtgaaaggtactcccagagtaatttctctcgtgttctggttaccttttattgtcagggcgcctggggacggccttaggtgtcttaggacatttgacgagttccactttgatgggagatgtttaatctgggcctccacatggagatttctctccaccttgttagtgtctagaagacttccacctccaatagcaggattatgatcttttgaaaagcctgtgtaaatttgagtcttttcttttataactccttatcagtcaccgacagcttttcccataattgctattataattggatcacacatttgttatgtttttggatgaaatacactatacccctgccgaccctcacaaaccatcattttaatgtgggttatttcctgggtagaatccacagatgacattgtcaatatttaggggttttgtttgtttttttgtttgaagagacctggtctctggccaggcgctgtggcttacacctgtaatcccagcactttgggaggccgaggtggtcggatcacctgaggccaggacttcaagaccagcatggccaacatggcaaaaccccgcctctactaaaaatacaaaaattagctgggtgtggcggcccgcgcctatagttgcagctactcaggaggctgaggcaggagaatcacttgaatctgggtggaggttgctgtgagccaagatcctgccactgcattccggcatgggtgacagagcgagactctgtctcaaaaaaataaataaataaataaaataaaaatacagagcaatggagagaaaggcactcaggtgattaaagtaacatgtcttcaatactaggagtaataataatcctaggggataataatattagtagttactgggtacagtgtgtgaggcactaggaactttattagtattagttgtgtaattcttacaaaaccccatgaagtggaaacagttaccactattttacagatgactaaccatttatggagggattaagggtcttaagaacatactactccctttgctgtaaaataacaccgtggttttgtaggtgaatgtgtgtgtttcaacatcagctggttttcacagaagctggttactcatgagtgagatgaccaagtcctggtcctgggtgcatagcaaaacaacagaaactgaaccttttttttttttgagagggagtctggcgctctcaccaggctggagtgcagtggtgcgatctcggcttactgcaatatctgcctctcgggttcaagcaattctcctgcctcagcctctggagtagctgggattgcaggcgcatgctactacgcctgactaatttttgtatttttagcagagacaaggtttcatcatgttggtgaggctggtctctaacgcctgacctcaagtgatctgcctacctcagcctcccaaag

SEQ ID NO: 1560786 - DNA, 4001 bp, Homo sapiens
tcaaacacaataatatggaagccataatcatatacacacccctacaaacataatttcctggcaccagcacggagacacatccacagctttagtcacacacaaataatccctctaaatagccagggtttcagacaccaagtcaaatacataacccaaatcacacatgcaaggctagaaatacacacaatcactcgttatcacacacactgctagatacagtcatttatattaatacaacctcagtcacacactcagacatggttctgcatacgcaaccactgtcatacacaatactgtcacacaaccccagtcacacagatacaatgtgacttcagacacaatggcagtcacacaggcagagttgcacagacaggtgtgtgtcactcacgtatataaaatcaggtagagacacaactataaacattgtcagtcactgggagggtcacacatgcacatggagccatagacaactccactcacacacagtcacaactccacccacgtcctgtcagtcacacgcatgcccacccccagactcaacacatactgtcacatacccagttatagttaccgaggcatacaaacacagggtcacaaaagacacaatcacagacaaccacagtcacaaccatgcacacctccaaacacagacagactaaaaagtacaggattctgcacagtgagcagctgtcacacacacatacacagtcacacagatactagggtcacagacacaatcatagacaccaccacaagcacacacacacgacacaggattcctcagtcaccagctgcagcgtacgcgtgcacacacacacacacatacacagccacagtcacacaaacacagggcacactcctagccacctccccatcgcttgcttccccccttccccccaggtaccacacacaaagccgccgtcaccgtcaccgcagacactgcagacagacagggctgcacccggtccctggggagccgcccccagcccagcctgtatcctggagcctgagggccaggtccaggagggggaagcggtgcattgtctgcgggtggggccactcttggacagctgggcagccctggggacaaagggggtggcctagggatcctgtgccctgggacccatgaccaagccagggggtggagggattgggggttgcctgaaattgtccttattttattcaggctggggtggggtggagtcccaggcacagggaccttgttttgagaagtggctgtgcctgggactccgcccaaggattggggggatgctgtgcccagggtgcctctgagacctgggggcaggctgtgcttggagtccccctaggccttggcgtggtgggaacgctgtacccagtgaccccatcctcgagaccgtacctaggcagttgttgtgctgagacccccttaggcagggagaggtagggattgtgtctggaatcgcgtcctggaggccttggtttgatacgggggctgtgtccccgaccccatctccatccccatctagttctaggagttgtacctagaatctctgtacccctgtccttggttttgtggggggtctgtgtccaggatccctatttccagggccttggcaagagatggcccaggggtctgtgcccaagaccccggtctcctgggctttggcttgttgggcctgttcctggacccccacccgggaccaccctctccagccttggcaccctctctccatccgggcgccgcggccgcctcccaccctccgccacatcagcagcggcgccgcccccgacccgagcccccctctcccgcccttctcacgctggccgccgcgctgcgggacatccagggcccgggcgcccccgcctcccgcggccctggctgggcctggctccccgactgctgctgctgcggtggtggcggcggcagctcggtctgacgccggccagggcccggggccgggggatggtgcgggatgcacgcgcgcgagcctcctcggctcccgggaggattccgttccgggggcgggggagcgtccctcggcctcggctccccgccccgaccccgcccattggcccgccgcctgccgtatatgcagaaaggtcccgccccgccccgccccttggcctgaagaccccgcccacacgcagacaccatcccgccttccccggcgcggccaccgccccgccacgcccattggccagtcccgagctgagcatgcctatgaacatcgccgagtcctttcccccggtccgtcctggcctgggctccctttccctccgtgacacctgacctcagatcccctccagctccgcgtccgaaagagttgcttctagaggcgccttgccgccccacacccccaaatcttcccgctaaccccatggttccccagcccggcgggggcgggcaggagcggtgacgaggcactttttgcaaggaaggggagggggtgtgaacagaccaaggcgtcctgatgcgcgatcggttcggctttgggaacgggggcgccggggtgggaccagggcgcggttctggccgctacggcgcccccgccgccccctacgccaatcctgtgggtttggcaaagcagctggcagggacattagagcccattagtaaaggcgaggttgccaggagtgaggggagggagcccgcagccaagaggcactgtgtgtgtgggaggcctcagctgccacagcccttagagcaggtggtcagcacgtgggggggggtggggaaggcgagaaggaggttcccggcaacagatggcacaggcagggctgaggctttcagacaagggggtgcaggggggctggccatctgcacctggaggccgctggcgagctcctccccctctccccccaaccctagcgcagagaaaagagctgggggaaggggagggctgcttttattccgattgaagattcagctcccccccaccccgcacccctacctctccaacacactgagaggctggaacccgggagaaggcagctgttggaggagcgagggaggcagaggtgaggactgcctccaggaccatctcgccttccacgggaggcttgaggcagaggtgagggctccccctgatgagtctgatctgcataacgacatgcagcggcccaaggctccctcaaatgttggcaaagataagttaaccgcttccctggcttagttttcggatacccactttcgagtggggaggtgcaggatctagggcacgaagttgggagttccccagccccagggatcctgagctcctgggccaaggaggagagccaggcaagactgggaagcccaagggggctcctctgacccagggcagacggggaagggataagaggcactacagcagggtacggcctgctctggggactgaatcccccatggaggctgtcatgagggatccacccaggagtcccctttggtggggaggctgccggcagtggctgcgtctggctggcgactggcccagtagcggtggtaggtgtcctggaagaggtccctgcaggcgatgtgggctcggaggtgggcacaggccaggaaagcccctgccagcttgcggtgcagggcataggtctcctcgggtgggggacacagccggtgccgcagcagcaccgggatgaggtcctgtatgcggcgggccgtttcccccgacccaaagtcataagggccctgggtggcgaaaggctcccccaggatcatcactgcctccacgtgggcgtcggagaatgcctgggagtgggggtggggggagagcaaaggcagccagtgtggacatagagccctctgcataacccagaaacaacgtgtagcctccactccctccagtctccaccatcaacacaagccccgactcccccaagagtgagcagcttccactccttccagagcctggactagacaagcagctgcctattccccgagtaagcaccccttacttccctgcagagcctccaacagacaagtagccctctactctctctacaacagagaagcggccttcgcccctcctgaacag

SEQ ID NO: 1560787 - DNA, 4001 bp, Homo sapiens
ataggcatggccacagcatcaatgtccatgtgacccagccacctatcatggtcataatcccgtcacccagtgtccatacacagctgtaccatgtcactccaatgcagcgaaacatatagcctttcttcatgcaggcacacaagtcacacagacaagtatgtggccatatagaatcacagccccgtgtggacaggtgcacaaagtcacaagccccacctacacacatatctcacacatagagacataagcacacagttttagtttcccatgtcacaagtacacagtccagtgtatgcacataaatgcagtgaccaggatgtggcatttatagctgggtttacacagaagacacaggtcctgacggagccatgtgcacagtcaggggccaatctcatcaccaaatcacacattctaacacaggtagtccagcacatacacacagagacaaaaacaggcacacagctacagaccccacactctcacagatgatgacatagacacagacatctatagtcacccagggtcagacatgcaggtcaaacacaataatatggaagccataatcatatacacacccctacaaacataatttcctggcaccagcacggagacacatccacagctttagtcacacacaaataatccctctaaatagccagggtttcagacaccaagtcaaatacataacccaaatcacacatgcaaggctagaaatacacacaatcactcgttatcacacacactgctagatacagtcatttatattaatacaacctcagtcacacactcagacatggttctgcatacgcaaccactgtcatacacaatactgtcacacaaccccagtcacacagatacaatgtgacttcagacacaatggcagtcacacaggcagagttgcacagacaggtgtgtgtcactcacgtatataaaatcaggtagagacacaactataaacattgtcagtcactgggagggtcacacatgcacatggagccatagacaactccactcacacacagtcacaactccacccacgtcctgtcagtcacacgcatgcccacccccagactcaacacatactgtcacatacccagttatagttaccgaggcatacaaacacagggtcacaaaagacacaatcacagacaaccacagtcacaaccatgcacacctccaaacacagacagactaaaaagtacaggattctgcacagtgagcagctgtcacacacacatacacagtcacacagatactagggtcacagacacaatcatagacaccaccacaagcacacacacacgacacaggattcctcagtcaccagctgcagcgtacgcgtgcacacacacacacacatacacagccacagtcacacaaacacagggcacactcctagccacctccccatcgcttgcttccccccttccccccaggtaccacacacaaagccgccgtcaccgtcaccgcagacactgcagacagacagggctgcacccggtccctggggagccgcccccagcccagcctgtatcctggagcctgagggccaggtccaggagggggaagcggtgcattgtctgcgggtggggccactcttggacagctgggcagccctggggacaaagggggtggcctagggatcctgtgccctgggacccatgaccaagccagggggtggagggattgggggttgcctgaaattgtccttattttattcaggctggggtggggtggagtcccaggcacagggaccttgttttgagaagtggctgtgcctgggactccgcccaaggattggggggatgctgtgcccagggtgcctctgagacctgggggcaggctgtgcttggagtccccctaggccttggcgtggtgggaacgctgtacccagtgaccccatcctcgagaccgtacctaggcagttgttgtgctgagacccccttaggcagggagaggtagggattgtgtctggaatcgcgtcctggaggccttggtttgatacgggggctgtgtccccgaccccatctccatccccatctagttctaggagttgtacctagaatctctgtacccctgtccttggttttgtggggggtctgtgtccaggatccctatttccagggccttggcaagagatggcccaggggtctgtgcccaagaccccggtctcctgggctttggcttgttgggcctgttcctggacccccacccgggaccaccctctccagccttggcaccctctctccatccgggcgccgcggccgcctcccaccctccgccacatcagcagcggcgccgcccccgacccgagcccccctctcccgcccttctcacgctggccgccgcgctgcgggacatccagggcccgggcgcccccgcctcccgcggccctggctgggcctggctccccgactgctgctgctgcggtggtggcggcggcagctcggtctgacgccggccagggcccggggccgggggatggtgcgggatgcacgcgcgcgagcctcctcggctcccgggaggattccgttccgggggcgggggagcgtccctcggcctcggctccccgccccgaccccgcccattggcccgccgcctgccgtatatgcagaaaggtcccgccccgccccgccccttggcctgaagaccccgcccacacgcagacaccatcccgccttccccggcgcggccaccgccccgccacgcccattggccagtcccgagctgagcatgcctatgaacatcgccgagtcctttcccccggtccgtcctggcctgggctccctttccctccgtgacacctgacctcagatcccctccagctccgcgtccgaaagagttgcttctagaggcgccttgccgccccacacccccaaatcttcccgctaaccccatggttccccagcccggcgggggcgggcaggagcggtgacgaggcactttttgcaaggaaggggagggggtgtgaacagaccaaggcgtcctgatgcgcgatcggttcggctttgggaacgggggcgccggggtgggaccagggcgcggttctggccgctacggcgcccccgccgccccctacgccaatcctgtgggtttggcaaagcagctggcagggacattagagcccattagtaaaggcgaggttgccaggagtgaggggagggagcccgcagccaagaggcactgtgtgtgtgggaggcctcagctgccacagcccttagagcaggtggtcagcacgtgggggggggtggggaaggcgagaaggaggttcccggcaacagatggcacaggcagggctgaggctttcagacaagggggtgcaggggggctggccatctgcacctggaggccgctggcgagctcctccccctctccccccaaccctagcgcagagaaaagagctgggggaaggggagggctgcttttattccgattgaagattcagctcccccccaccccgcacccctacctctccaacacactgagaggctggaacccgggagaaggcagctgttggaggagcgagggaggcagaggtgaggactgcctccaggaccatctcgccttccacgggaggcttgaggcagaggtgagggctccccctgatgagtctgatctgcataacgacatgcagcggcccaaggctccctcaaatgttggcaaagataagttaaccgcttccctggcttagttttcggatacccactttcgagtggggaggtgcaggatctagggcacgaagttgggagttccccagccccagggatcctgagctcctgggccaaggaggagagccaggcaagactgggaagcccaagggggctcctctgacccagggcagacggggaagggataagaggcactacagcagggtacggcctgctctggggactgaatcccccatggaggctgtcatgagggatccacccaggagtcccctttggtggggaggctgccggcagtggctgcgtctggctggcgactggcccagtagcggtggt

SEQ ID NO: 1560788 - DNA, 4001 bp, Homo sapiens
taacacagcccctataggcccaagaaaatatagggcaagtgctcaaaaactggcagagtggacagtaagtgctctaagggaaggtggtcagatcccaagaaggacttcctgcccgcaacaggtaaggaaggagaaagaagcttgtgtgtaccgctcagtatcaggattcctccaccttctctggaccttgattcagtctcctaactgccacagaagggatgaaggttgaactccagctgggatgtcctgatgtggatgggacaaggtgggtttctgcaacagagaaaagacggacatccacctcggctggtggaggagggcccagtgcatgagaaggggcaagatggctaccctgtgactaaacgaaaacggagatcttccatttttggcagggttgggagatagttcctatccagtggaagctgaaggacggtttgaaaggaagccaagggcaagggatggagaaaaggacgcagctggggcctcgatgtctgaatccctgccaggggatggggcctgggcacccatcatttggaatggaagatgaggatagctggaaacagacactttagagggatgagggagacagaagaatgacagcaggtgttggacagtccaacgtctgcggctcttacaagtggtaaggaagaaatgagactgggccccagagttcctattaataaaatatgctgaggccgggagcgatggctcacgcctgtaatcccagcactttgggaggccgaggcgggcggatcacgaggccaggaaattgagaccatcctggctaacacagtgaaaccccgtctctactaaaaatacaaaaaattagccgggcgtggtggcgggcgcctgtagtcccagctactcgggaggctgaggcaggagaatggcgtgaacctgggaggcggagtttgcagtgagccgagatcgcgccactgcactccagcctgggcgacagagacggagagactccgtctcaaaaaaaaaaaacagttgaacaggaatgtatgagttgagctctgtgcataaggcttgccagacatcgtcttatttgagtctcataaacccaccaggcgagttgatttttcttattttacagatagggaaatgaagtaagagaacttaagttatttgcccgaggccatcctggcaggtctgtatttgggagagtgctgtgactcatgctggactctaacccacgagggtttctcagagtcagcagctgggggatgaagaagtgaaaagtgactggcaggaaattctgcaagcaaggaaagggaaagagaaatgaactggtgcaggtctgcgggaagagaatgaggctggatcctcaaaatcacaggaggaagcaggcccagacctcagaggcagaaagagaaagaaaccagagcttagagtcaggaggaggaaaccagaccccggagccacaaggagagggctggatccccggctcagagggaagaggtcggatccccagctgagagggaggagggtcccggaccctaggagtgggaaggaaaggctcggatcccctgatccccaggaggaggggacccggctgcctcccggttggggccgcgcgagggcggggcgcggaaggatccgggagggccgtgctccgccacccagtatatatctgtccccagtccccggggccgcctcattccctgtcctcggatcacagtctcttctcactacagtgtcgccgcctctgcctgcgtagccccggccatggctctgtagcctcgacccctttgtgcccccggcccgtctccgcgctcaccacgcctgcgctctccgctcccaccttctttcttcagccgaggccgccgccgcctctccttgctgcagccatggagtgagtaaccgcttacctcttctccaactgcctttcccgccctttcgcagctcgtggccctctttagggagccctggggggtggggagtcgcgagcggggaatcacggtcgcgcaggcgcagaagtagtacggtgggccgaaggcgcgcggctgcgcatgcgcactgggcccggggccgggtgggagagttctagactcgatgtttgtcagcccgcgtgcagctgggcctgagcactccaggggagggtgtgttttttttttttctaaacgattcttcgtgcttggttgttcctgcgcagtagcccaccagtgccccgtagtgaaagagctgcggaccctgaatggccgcacatgcgcattgatccccaagagggcggaggtgtaaaggcaattggaccgctcgggcgacgtagcatgcgccttggccctcggcgcagagccgcgtgtggacgggtggcgttcgggtagccgttctccgcgtgccccctctaccctcctccaccctccctgccccacgttgctctggctcacagcccagcttccttccttttaaaccaggcacctgctgaggcggggactggcttagattgacagggcagaaggcgggacccagaggcaaccctctaagtgggtggggatagaaccactgtcgtcacgatgggtgggatttcggaagcacattgtgagaaggggcggggctaaaccaaccgttagttgaggggtggggtttcgatgtgacaaagaggcggggcctctggggaatcgggggaggggcggagctaaataaacaatgaggggcggggcttggaggggcagcggcagagcgaggagtgggatttgagtggataacattgctgaagggctgcggcctggggcagttcccctgggaactggtttgggatggaagctaggaaggcagtggggccaaaaggaaatattttagaggaaggggcgtggctggaagaaaatgtccctgggattgagtttttccttgaggcgaaatattctgaggtggatgggaggggcctaaggtaattcccctgggagacctttaggttttttttttctgtattgggggaaggggtggggcatcggtcctactttaggacctaaagaaattcccttgggagtgggtggggctcagagatttgggtaaagaaagggcaaatttagaattcggagaggctgaggcttagtgttctaaacggtggttggaagggggagggaggagcctcatggacgtgcctgggggtgtggcttggcttccccttgattttggccggtggatgacgctgtcctgaccacacccactcttgtctcacgcgtgtaggtcttccactttcgccttggtgcctgtcttcgcccacctgagcatcctccagagcctcgtgccagctgctggtgcagcctctcctgttgccatcagtgcccagcacctgtgctacagccatgtcactcctggcgaccctggggctggagctggacagggccctgctcccagctagtgggctgggatggctcgtagactatgggaaactccccccggcccctgcccccctggctccctatgaggtccttgggggagccctggagggcgggcttccagtggggggagagcccctggcaggtaagggcaggtggaaggtggagctggggagtggagggcaggggaagatgggggaggaagaactcatccatgtattcaataaatattgagtgcctacaatgtgccaggcactgttttaggtgctgaggatacggctgggaacaagaagaacatggtctgtgccttccagcagctcacactgtggggagtagaccagagataaattaaatgagagtgtattggaataagtcaaaaacacctagcagctgagctacaaaatgacaaaggggacctaatatagaatgggtagccagaaaaccttctccaagtaggtaacatgttgactgaggcataaatgatgggaaggaagccaggcatgatggcctgtaatcccagcactttgggaggccaagcggggagaattgctttagtccaggagttcaggacgtgggcaacatagcgagacctcatatctataggaaaaaaaaaattagccaggcatggtggctcacgcttgtagtcacagctacttggga

SEQ ID NO: 1560789 - DNA, 4001 bp, Homo sapiens
tgctactctgtatactgcctcagtgataacacagcccctataggcccaagaaaatatagggcaagtgctcaaaaactggcagagtggacagtaagtgctctaagggaaggtggtcagatcccaagaaggacttcctgcccgcaacaggtaaggaaggagaaagaagcttgtgtgtaccgctcagtatcaggattcctccaccttctctggaccttgattcagtctcctaactgccacagaagggatgaaggttgaactccagctgggatgtcctgatgtggatgggacaaggtgggtttctgcaacagagaaaagacggacatccacctcggctggtggaggagggcccagtgcatgagaaggggcaagatggctaccctgtgactaaacgaaaacggagatcttccatttttggcagggttgggagatagttcctatccagtggaagctgaaggacggtttgaaaggaagccaagggcaagggatggagaaaaggacgcagctggggcctcgatgtctgaatccctgccaggggatggggcctgggcacccatcatttggaatggaagatgaggatagctggaaacagacactttagagggatgagggagacagaagaatgacagcaggtgttggacagtccaacgtctgcggctcttacaagtggtaaggaagaaatgagactgggccccagagttcctattaataaaatatgctgaggccgggagcgatggctcacgcctgtaatcccagcactttgggaggccgaggcgggcggatcacgaggccaggaaattgagaccatcctggctaacacagtgaaaccccgtctctactaaaaatacaaaaaattagccgggcgtggtggcgggcgcctgtagtcccagctactcgggaggctgaggcaggagaatggcgtgaacctgggaggcggagtttgcagtgagccgagatcgcgccactgcactccagcctgggcgacagagacggagagactccgtctcaaaaaaaaaaaacagttgaacaggaatgtatgagttgagctctgtgcataaggcttgccagacatcgtcttatttgagtctcataaacccaccaggcgagttgatttttcttattttacagatagggaaatgaagtaagagaacttaagttatttgcccgaggccatcctggcaggtctgtatttgggagagtgctgtgactcatgctggactctaacccacgagggtttctcagagtcagcagctgggggatgaagaagtgaaaagtgactggcaggaaattctgcaagcaaggaaagggaaagagaaatgaactggtgcaggtctgcgggaagagaatgaggctggatcctcaaaatcacaggaggaagcaggcccagacctcagaggcagaaagagaaagaaaccagagcttagagtcaggaggaggaaaccagaccccggagccacaaggagagggctggatccccggctcagagggaagaggtcggatccccagctgagagggaggagggtcccggaccctaggagtgggaaggaaaggctcggatcccctgatccccaggaggaggggacccggctgcctcccggttggggccgcgcgagggcggggcgcggaaggatccgggagggccgtgctccgccacccagtatatatctgtccccagtccccggggccgcctcattccctgtcctcggatcacagtctcttctcactacagtgtcgccgcctctgcctgcgtagccccggccatggctctgtagcctcgacccctttgtgcccccggcccgtctccgcgctcaccacgcctgcgctctccgctcccaccttctttcttcagccgaggccgccgccgcctctccttgctgcagccatggagtgagtaaccgcttacctcttctccaactgcctttcccgccctttcgcagctcgtggccctctttagggagccctggggggtggggagtcgcgagcggggaatcacggtcgcgcaggcgcagaagtagtacggtgggccgaaggcgcgcggctgcgcatgcgcactgggcccggggccgggtgggagagttctagactcgatgtttgtcagcccgcgtgcagctgggcctgagcactccaggggagggtgtgttttttttttttctaaacgattcttcgtgcttggttgttcctgcgcagtagcccaccagtgccccgtagtgaaagagctgcggaccctgaatggccgcacatgcgcattgatccccaagagggcggaggtgtaaaggcaattggaccgctcgggcgacgtagcatgcgccttggccctcggcgcagagccgcgtgtggacgggtggcgttcgggtagccgttctccgcgtgccccctctaccctcctccaccctccctgccccacgttgctctggctcacagcccagcttccttccttttaaaccaggcacctgctgaggcggggactggcttagattgacagggcagaaggcgggacccagaggcaaccctctaagtgggtggggatagaaccactgtcgtcacgatgggtgggatttcggaagcacattgtgagaaggggcggggctaaaccaaccgttagttgaggggtggggtttcgatgtgacaaagaggcggggcctctggggaatcgggggaggggcggagctaaataaacaatgaggggcggggcttggaggggcagcggcagagcgaggagtgggatttgagtggataacattgctgaagggctgcggcctggggcagttcccctgggaactggtttgggatggaagctaggaaggcagtggggccaaaaggaaatattttagaggaaggggcgtggctggaagaaaatgtccctgggattgagtttttccttgaggcgaaatattctgaggtggatgggaggggcctaaggtaattcccctgggagacctttaggttttttttttctgtattgggggaaggggtggggcatcggtcctactttaggacctaaagaaattcccttgggagtgggtggggctcagagatttgggtaaagaaagggcaaatttagaattcggagaggctgaggcttagtgttctaaacggtggttggaagggggagggaggagcctcatggacgtgcctgggggtgtggcttggcttccccttgattttggccggtggatgacgctgtcctgaccacacccactcttgtctcacgcgtgtaggtcttccactttcgccttggtgcctgtcttcgcccacctgagcatcctccagagcctcgtgccagctgctggtgcagcctctcctgttgccatcagtgcccagcacctgtgctacagccatgtcactcctggcgaccctggggctggagctggacagggccctgctcccagctagtgggctgggatggctcgtagactatgggaaactccccccggcccctgcccccctggctccctatgaggtccttgggggagccctggagggcgggcttccagtggggggagagcccctggcaggtaagggcaggtggaaggtggagctggggagtggagggcaggggaagatgggggaggaagaactcatccatgtattcaataaatattgagtgcctacaatgtgccaggcactgttttaggtgctgaggatacggctgggaacaagaagaacatggtctgtgccttccagcagctcacactgtggggagtagaccagagataaattaaatgagagtgtattggaataagtcaaaaacacctagcagctgagctacaaaatgacaaaggggacctaatatagaatgggtagccagaaaaccttctccaagtaggtaacatgttgactgaggcataaatgatgggaaggaagccaggcatgatggcctgtaatcccagcactttgggaggccaagcggggagaattgctttagtccaggagttcaggacgtgggcaacatagcgagacctcatatctataggaaaaaaaaaattagccaggcatggtggctc

SEQ ID NO: 1560790 - DNA, 4001 bp, Homo sapiens
gattcagtctcctaactgccacagaagggatgaaggttgaactccagctgggatgtcctgatgtggatgggacaaggtgggtttctgcaacagagaaaagacggacatccacctcggctggtggaggagggcccagtgcatgagaaggggcaagatggctaccctgtgactaaacgaaaacggagatcttccatttttggcagggttgggagatagttcctatccagtggaagctgaaggacggtttgaaaggaagccaagggcaagggatggagaaaaggacgcagctggggcctcgatgtctgaatccctgccaggggatggggcctgggcacccatcatttggaatggaagatgaggatagctggaaacagacactttagagggatgagggagacagaagaatgacagcaggtgttggacagtccaacgtctgcggctcttacaagtggtaaggaagaaatgagactgggccccagagttcctattaataaaatatgctgaggccgggagcgatggctcacgcctgtaatcccagcactttgggaggccgaggcgggcggatcacgaggccaggaaattgagaccatcctggctaacacagtgaaaccccgtctctactaaaaatacaaaaaattagccgggcgtggtggcgggcgcctgtagtcccagctactcgggaggctgaggcaggagaatggcgtgaacctgggaggcggagtttgcagtgagccgagatcgcgccactgcactccagcctgggcgacagagacggagagactccgtctcaaaaaaaaaaaacagttgaacaggaatgtatgagttgagctctgtgcataaggcttgccagacatcgtcttatttgagtctcataaacccaccaggcgagttgatttttcttattttacagatagggaaatgaagtaagagaacttaagttatttgcccgaggccatcctggcaggtctgtatttgggagagtgctgtgactcatgctggactctaacccacgagggtttctcagagtcagcagctgggggatgaagaagtgaaaagtgactggcaggaaattctgcaagcaaggaaagggaaagagaaatgaactggtgcaggtctgcgggaagagaatgaggctggatcctcaaaatcacaggaggaagcaggcccagacctcagaggcagaaagagaaagaaaccagagcttagagtcaggaggaggaaaccagaccccggagccacaaggagagggctggatccccggctcagagggaagaggtcggatccccagctgagagggaggagggtcccggaccctaggagtgggaaggaaaggctcggatcccctgatccccaggaggaggggacccggctgcctcccggttggggccgcgcgagggcggggcgcggaaggatccgggagggccgtgctccgccacccagtatatatctgtccccagtccccggggccgcctcattccctgtcctcggatcacagtctcttctcactacagtgtcgccgcctctgcctgcgtagccccggccatggctctgtagcctcgacccctttgtgcccccggcccgtctccgcgctcaccacgcctgcgctctccgctcccaccttctttcttcagccgaggccgccgccgcctctccttgctgcagccatggagtgagtaaccgcttacctcttctccaactgcctttcccgccctttcgcagctcgtggccctctttagggagccctggggggtggggagtcgcgagcggggaatcacggtcgcgcaggcgcagaagtagtacggtgggccgaaggcgcgcggctgcgcatgcgcactgggcccggggccgggtgggagagttctagactcgatgtttgtcagcccgcgtgcagctgggcctgagcactccaggggagggtgtgttttttttttttctaaacgattcttcgtgcttggttgttcctgcgcagtagcccaccagtgccccgtagtgaaagagctgcggaccctgaatggccgcacatgcgcattgatccccaagagggcggaggtgtaaaggcaattggaccgctcgggcgacgtagcatgcgccttggccctcggcgcagagccgcgtgtggacgggtggcgttcgggtagccgttctccgcgtgccccctctaccctcctccaccctccctgccccacgttgctctggctcacagcccagcttccttccttttaaaccaggcacctgctgaggcggggactggcttagattgacagggcagaaggcgggacccagaggcaaccctctaagtgggtggggatagaaccactgtcgtcacgatgggtgggatttcggaagcacattgtgagaaggggcggggctaaaccaaccgttagttgaggggtggggtttcgatgtgacaaagaggcggggcctctggggaatcgggggaggggcggagctaaataaacaatgaggggcggggcttggaggggcagcggcagagcgaggagtgggatttgagtggataacattgctgaagggctgcggcctggggcagttcccctgggaactggtttgggatggaagctaggaaggcagtggggccaaaaggaaatattttagaggaaggggcgtggctggaagaaaatgtccctgggattgagtttttccttgaggcgaaatattctgaggtggatgggaggggcctaaggtaattcccctgggagacctttaggttttttttttctgtattgggggaaggggtggggcatcggtcctactttaggacctaaagaaattcccttgggagtgggtggggctcagagatttgggtaaagaaagggcaaatttagaattcggagaggctgaggcttagtgttctaaacggtggttggaagggggagggaggagcctcatggacgtgcctgggggtgtggcttggcttccccttgattttggccggtggatgacgctgtcctgaccacacccactcttgtctcacgcgtgtaggtcttccactttcgccttggtgcctgtcttcgcccacctgagcatcctccagagcctcgtgccagctgctggtgcagcctctcctgttgccatcagtgcccagcacctgtgctacagccatgtcactcctggcgaccctggggctggagctggacagggccctgctcccagctagtgggctgggatggctcgtagactatgggaaactccccccggcccctgcccccctggctccctatgaggtccttgggggagccctggagggcgggcttccagtggggggagagcccctggcaggtaagggcaggtggaaggtggagctggggagtggagggcaggggaagatgggggaggaagaactcatccatgtattcaataaatattgagtgcctacaatgtgccaggcactgttttaggtgctgaggatacggctgggaacaagaagaacatggtctgtgccttccagcagctcacactgtggggagtagaccagagataaattaaatgagagtgtattggaataagtcaaaaacacctagcagctgagctacaaaatgacaaaggggacctaatatagaatgggtagccagaaaaccttctccaagtaggtaacatgttgactgaggcataaatgatgggaaggaagccaggcatgatggcctgtaatcccagcactttgggaggccaagcggggagaattgctttagtccaggagttcaggacgtgggcaacatagcgagacctcatatctataggaaaaaaaaaattagccaggcatggtggctcacgcttgtagtcacagctacttgggaggctgaggtgggaggatcgcttgagcctgggaggtctaggctgcagtgagccaagatgatgccactgcactgcagcctgggcaacagagtgaaaccctatcccttaaaataaaaaaaaagtagggaaggaatgaggaaaacacccaagggaagagcattttagttggagggaactgtatatgcagaagc

SEQ ID NO: 1560791 - DNA, 4001 bp, Homo sapiens
tgcctcagtgataacacagcccctataggcccaagaaaatatagggcaagtgctcaaaaactggcagagtggacagtaagtgctctaagggaaggtggtcagatcccaagaaggacttcctgcccgcaacaggtaaggaaggagaaagaagcttgtgtgtaccgctcagtatcaggattcctccaccttctctggaccttgattcagtctcctaactgccacagaagggatgaaggttgaactccagctgggatgtcctgatgtggatgggacaaggtgggtttctgcaacagagaaaagacggacatccacctcggctggtggaggagggcccagtgcatgagaaggggcaagatggctaccctgtgactaaacgaaaacggagatcttccatttttggcagggttgggagatagttcctatccagtggaagctgaaggacggtttgaaaggaagccaagggcaagggatggagaaaaggacgcagctggggcctcgatgtctgaatccctgccaggggatggggcctgggcacccatcatttggaatggaagatgaggatagctggaaacagacactttagagggatgagggagacagaagaatgacagcaggtgttggacagtccaacgtctgcggctcttacaagtggtaaggaagaaatgagactgggccccagagttcctattaataaaatatgctgaggccgggagcgatggctcacgcctgtaatcccagcactttgggaggccgaggcgggcggatcacgaggccaggaaattgagaccatcctggctaacacagtgaaaccccgtctctactaaaaatacaaaaaattagccgggcgtggtggcgggcgcctgtagtcccagctactcgggaggctgaggcaggagaatggcgtgaacctgggaggcggagtttgcagtgagccgagatcgcgccactgcactccagcctgggcgacagagacggagagactccgtctcaaaaaaaaaaaacagttgaacaggaatgtatgagttgagctctgtgcataaggcttgccagacatcgtcttatttgagtctcataaacccaccaggcgagttgatttttcttattttacagatagggaaatgaagtaagagaacttaagttatttgcccgaggccatcctggcaggtctgtatttgggagagtgctgtgactcatgctggactctaacccacgagggtttctcagagtcagcagctgggggatgaagaagtgaaaagtgactggcaggaaattctgcaagcaaggaaagggaaagagaaatgaactggtgcaggtctgcgggaagagaatgaggctggatcctcaaaatcacaggaggaagcaggcccagacctcagaggcagaaagagaaagaaaccagagcttagagtcaggaggaggaaaccagaccccggagccacaaggagagggctggatccccggctcagagggaagaggtcggatccccagctgagagggaggagggtcccggaccctaggagtgggaaggaaaggctcggatcccctgatccccaggaggaggggacccggctgcctcccggttggggccgcgcgagggcggggcgcggaaggatccgggagggccgtgctccgccacccagtatatatctgtccccagtccccggggccgcctcattccctgtcctcggatcacagtctcttctcactacagtgtcgccgcctctgcctgcgtagccccggccatggctctgtagcctcgacccctttgtgcccccggcccgtctccgcgctcaccacgcctgcgctctccgctcccaccttctttcttcagccgaggccgccgccgcctctccttgctgcagccatggagtgagtaaccgcttacctcttctccaactgcctttcccgccctttcgcagctcgtggccctctttagggagccctggggggtggggagtcgcgagcggggaatcacggtcgcgcaggcgcagaagtagtacggtgggccgaaggcgcgcggctgcgcatgcgcactgggcccggggccgggtgggagagttctagactcgatgtttgtcagcccgcgtgcagctgggcctgagcactccaggggagggtgtgttttttttttttctaaacgattcttcgtgcttggttgttcctgcgcagtagcccaccagtgccccgtagtgaaagagctgcggaccctgaatggccgcacatgcgcattgatccccaagagggcggaggtgtaaaggcaattggaccgctcgggcgacgtagcatgcgccttggccctcggcgcagagccgcgtgtggacgggtggcgttcgggtagccgttctccgcgtgccccctctaccctcctccaccctccctgccccacgttgctctggctcacagcccagcttccttccttttaaaccaggcacctgctgaggcggggactggcttagattgacagggcagaaggcgggacccagaggcaaccctctaagtgggtggggatagaaccactgtcgtcacgatgggtgggatttcggaagcacattgtgagaaggggcggggctaaaccaaccgttagttgaggggtggggtttcgatgtgacaaagaggcggggcctctggggaatcgggggaggggcggagctaaataaacaatgaggggcggggcttggaggggcagcggcagagcgaggagtgggatttgagtggataacattgctgaagggctgcggcctggggcagttcccctgggaactggtttgggatggaagctaggaaggcagtggggccaaaaggaaatattttagaggaaggggcgtggctggaagaaaatgtccctgggattgagtttttccttgaggcgaaatattctgaggtggatgggaggggcctaaggtaattcccctgggagacctttaggttttttttttctgtattgggggaaggggtggggcatcggtcctactttaggacctaaagaaattcccttgggagtgggtggggctcagagatttgggtaaagaaagggcaaatttagaattcggagaggctgaggcttagtgttctaaacggtggttggaagggggagggaggagcctcatggacgtgcctgggggtgtggcttggcttccccttgattttggccggtggatgacgctgtcctgaccacacccactcttgtctcacgcgtgtaggtcttccactttcgccttggtgcctgtcttcgcccacctgagcatcctccagagcctcgtgccagctgctggtgcagcctctcctgttgccatcagtgcccagcacctgtgctacagccatgtcactcctggcgaccctggggctggagctggacagggccctgctcccagctagtgggctgggatggctcgtagactatgggaaactccccccggcccctgcccccctggctccctatgaggtccttgggggagccctggagggcgggcttccagtggggggagagcccctggcaggtaagggcaggtggaaggtggagctggggagtggagggcaggggaagatgggggaggaagaactcatccatgtattcaataaatattgagtgcctacaatgtgccaggcactgttttaggtgctgaggatacggctgggaacaagaagaacatggtctgtgccttccagcagctcacactgtggggagtagaccagagataaattaaatgagagtgtattggaataagtcaaaaacacctagcagctgagctacaaaatgacaaaggggacctaatatagaatgggtagccagaaaaccttctccaagtaggtaacatgttgactgaggcataaatgatgggaaggaagccaggcatgatggcctgtaatcccagcactttgggaggccaagcggggagaattgctttagtccaggagttcaggacgtgggcaacatagcgagacctcatatctataggaaaaaaaaaattagccaggcatggtggctcacgcttgtagtcaca

SEQ ID NO: 1560792 - DNA, 4001 bp, Homo sapiens
catgctaggcttaagttttttattttttgtagggacgggagtctcactgtgttgctcaggctgttcttgaactcttggcctcaagccatcctcctgcctcagcctcccaaagtgctgggattagaggcatgagccaccacgggcagccagagttaattattttctcagcagtaaaggcccagtaaatagagttgagcgtcaccattcaacagatgagaaaactgcagcttagagtgagaactttctcaccagctagaagggcagagtcagggagcgagtgcgggtcagaccccctctcctccacggaccccgcccccataaacccagcccggccccccagccaccttcccacaactcacctggataccacagtttagctgcagcctgctgatctcactgaggccccagttctgggtcccagcatctctccagacctctcttagcacctcctccccaatcttctgatcttgaatttgcctccaccacaatttctgttccttctctcgttttcctgggtcccagcaggctccttggacccgaattcacttcagcgcctggccacgctcccttggttactgcctgctgatgatcgcaggaggataagagtctttgaccttgcctttcacctctaggctttttcctagtctctctcccagacttcctccatctcagtatgacaaacatttgaggccagatcatcctctgtggtggcaattgtcccatgcattttaggatgttgcaaagcatttccggcccccacccactagatttcaacagcacacccccaccaccaccaccaaagtcgtcacaattaaaaagtatccctaggctgggtgcagtggctcacacctctaatcccagcactttgagaggccaaaacaggcagattacttgaggccaggagttcgagaccagcctggccaacatggcgaaaccccatctctactaaaaatacaaaaattagctggcgcggtggcatgtacctgtaatcccagctactcggaagcctgaggcaggagaatcgcttgaacccgggaagcagaggttgcagtgagccgagatcgtgccactgcgctccagcctgggcaacagagcaaggctccatctcaaaaagaaaaagtctcggccaggtgcggtggctcacgcctgtaatcccagcactttgggaagccgaggagggcagatcatgaggtcaggagatcgagaccatcctggctaacacggtgaaaccccgtctctactaaaaatacaaaaaattagccgggcatgtggcggacacctgtagtcccagctactcaggaggctgaggcaggagaatggtgtgaacctgggaggcagagcttgcagtaactgagatcacgccactgcactccagcctagtgacagagcgagactccgtctcaaaaaaaaaaaagtctccctagacattgcaatgtcccctagggggcagaattccccttactcgagaaccccctagtctaatgcatttagcttatttcaacctcagggcctttgcacgtcctgtactttagtgctctatgctgcatctgttcatgttgttcacattttagcttcaatgctacctcctcctgagaggctgtctctgaccatcccattgcgtagtgaccccttaagtcactcccaatgccatcgccttattttaattttctgcatggtactcaccaacagctgatatgtttctacatgttattgtttgtctgtcccacgagaaagtgaattccatgagcccaaggatcttgtctggtaaggctggcgtgcctggcacatagtaggtgctcagtaaattatcatcacaacagcttcctccacaactgtttctctttctggacttctgtttgttgctgaagaagacagctgagcaggactgggcttccccagtaaggacagaggccctttgcagtgtcagcgttctggctgtcctgggggctccagcctctctttagcctttgctggtagttgaacgaccaatttagactcctctggggaaataggttagagaggacagtttcctggcctcggcgccacccggaagacaagcccctggctatcctagtaactttcgtcttaggtattttatgggtctctccttgcccaattctcccagcaactgggataatgaaagcgattgtttgcactagggcaccagcttagccgggcattcagcccagacttagtggttaactattgtgtgccaggctgatacggctcctcgtaaaagatgccatttgctgacagtctaggaggtgcagttggttggcatttggcattagcagtccacattattaccccaagagacagacattatgatcctgtttcacagatgaagaaaacaagatgcagaaaggtgaagtcccttgcctgtgacgcttcactactctgcacttgaattttctcactaacttcctgtgttggtgagacaatgaaaagcatttatatagagagtgagactaacactacacctacatcacaggaagggcccgtgagatgttagccatgattaattaccattaaaactccaagaccgggcacggtggctcatgcctgtaatcccagcactttgggaggccgaggcaggcggatcacctgaggtcaggcattcaagaccagactggccaatatggtgagacccctatctctactaaaaatagaaaaattagctgggcgtggtgacgcatgcctgtaatcccagctacttgggaggctgaggcacaagaattgtttgaacctgggagttggaggttgcaatgagccgagatcctgccactgcactgcagcctgggcgacagagcaagactttgtctcaaaaactcacaaatcacccgggcatggtggctcacgctagtaatcccagcactttgggaggccaaggcaggcagatcacgaggtcaggagatcaagaccatcctggctaacacggtgaaaccccgtctctacaaaaaaaacaaaacaaaacaaaacaaaaaattagctgggcgtggtggtttgcacctgtagtcccagctactcaggaagctgaggcaggagaatggcatgaacccgggaggtggagcttgcagtgagccgagatcgcaccactgcactccagcctgggtgacagagcgagactttgtctcaaaaactcacaagtcacccaggcatggtggctcacgccagtaatcccagcactttgggaggccaaggcaggcagatcacgaggtcaggagatcaagaccatcctggctaacatggtgaaaccctgtctctacataaaaaacaaaaaacaaaaaacaaaaaattagctgggcgtggtggtttgcacctgtagtcccagctactcaggaagctgaggcaggagaatggcatgaacctgggaggtggagcttgcagtgagccgagattgcgccactgcactccagcctgggcgacagagcaagcctccatctcaaagaaaaagtaataataatagtgttactatattttcagggatagaagtttcagatacttggtcaggcgcggtggctcatgcctgtaatcccagcactttgggaggccgaggtgggcaaatcacctgaggtcaggaatttgagaccagcttggccaatatggtgagaccccatctctactaaaaacaaaaattagccaggcatggtggcaggtgcctgtaatcccagctacttgggaggctgaggcaggaggatcacttaaacctgggaggcagaggttgcagtgagcagagattacgccattgcactccagcctggacgacagagccacactacactccatctcacaaaaaaaaaaaaaaaagaagtttcaggtgctgccaggcacagtggcatgctcctgtagtcccagctactggggaagccaaggtgggaggatcactcaaggccaggagttcaagaccagcctgggcaacatagtgagaccctcatctctacaacaacaacaataacaaaaaattagctgggcgtggtggtgtgtgcctgtagtcccaacta

SEQ ID NO: 1560793 - DNA, 4001 bp, Homo sapiens
tttcttttttataattttagagatgggagtggtggtgtcttgctgtgttgcccaagctggtcttcaactcccagcctcaagcaatcctcctgcctcagcctccaaaagtgctgggattgcaggtgtcagccaccatgcctggctggacatctccttataaagcttgaatccgactacctctccctctgttctaatgtccaccatggctccctgctactctgaggatcatgtctatacttgttaaggtggctctgcaccacagacctgtcacatctaaagaagattatgacaaatgcgtgggcagtaacaataacattgtaaatttgatcctctccggaattacctacagtctccctgaactggttgttctttctctgacagcctccaagcctttctgctgtgccctctgcctggaaccccttccctttcctcattctccatcctcctatctttcttctcattggagtctccctgtaatttatttatttattacattttttattttttatttttatttttgagacagagtctcactctgttgcccaggctggagtgcagtggcaccatctcggatcactgcaactttcgcctcctggattcaagcaattctcctgcctcagcctcgcaagtagctgggaccacagctgtgcgccaccaggcctggctaatttttgtatttttagtagagacagggttttgccatattggtcaggctagtctcgaactcctgacctcaggtgatctgctcaccttggcctcccaaagtgctagatttacaggtgtgagccaccgtacctggccttacttttttaagagacagggtctacctgtattgccctggctggagtgcagtggtgcgatcatagctcactgcagcctcaaactctaggctccagttatcctcttaccatagcctcccaggtggctaggactacaggcatgagccaccgtgcccagctaggggtctctctttaaagccactttttcggggaagcatcctctgaccccggaacctcaccaaggtttccctcattgtatttccactttgtggcctagctttgtcctctgagcactactgcaattcgctattatatatttgttttttgattttttagacagagtctccctctgtcacccaggctggagggcagtggcacgatcttacctcactgcagcatctgcctcccagtttcaaacgattctcctgcctcagcctcccaagcagctgggattacaggcgcccaccaccacgcctggataatttttgtatttttagtagagacagggtttcactatgttgaccaggcttgtctcaaactcccgacctcaggtgatctgcccacctcggcctgccaaagtcctgggattacagggttaagccaccatgcccggccttgctattacatagttgattctgtcttttgcatctgttcctctcactcggctctaagctccctggggtggcatggaagccagcatgtggaagtgggcacccctgtctgtaccccctagttcccagtatatggactggcacacaggggctgctcattcactctagttagaatggatgcttcactttcagcgaacatgccccctcctccaggaagccctccctgcccctcctcacctcctcagatcatcctcaaagggcaggaaaagccatttctttggcatgtccttgaggaacaggtcctgctgctcctccgtggagtcctgggacacgtacaccagggccagctgagccgcccgcagtacatagaactcatctgtgagccgcacgaagaagtccttgaggatgggcacgaaggcctggcactgtggacaagccccagcaccaaagaacagcagcaccagccggttctccagcctgcgactgacctcagcctccgtatccagctcgtcctggtcgctattgttgcggatcaggatgcggccagagaacagggaggccatggtaacctgggttgggtgctggggacagcgcggcgtgtggtccccggtctgctgactggctcctctcccagaaatagaaatctttagaaaaccagcttaggacttcactaatctgcctaaaccttgacctgaggggcctctaagggcggggggcagggctctctgtgtggcccttctcaggagagagccgcaaacgcattaagaaaacacgtaacagatgggcacggtggctcacgcctgtgatcccagcactttgagaggcagaggtgggaggatcatctgaggtcaggagtttgagaccagcctggccaacatggtgaaaccctgtctgtactaaaaaataaaaaaattagccaggcgtggtggtgggcacctgtaatcccagctacttgggcagccgaggcaggagaatcgcttgaagccaggaggcggaggttgcagtgagctgagattgtgccactgcactccagcctgggcgacagagcgagactccatctcagaaaaaaaaagaaagaaagaaagaaaaaaaaccaaaaaaccatgtagcagacagtgactcacgcctgtaatctcagcactttgggaggctgaggcaggaggatcacctgagaccaggagtttgagagcagcttgggcaacagtgtgagaccccatctctatgaaaaaattaaaaacttagctgggcatggtgttgtcatgagcctgtagtcccagctactcagctgagatggaaggatcacttgagcctgggaggttgaggctacaatgactgcactactgcactccatcctgggtgacagagcaagacctagtgtctaaaaataaaaaataggctgggcacggtggctcacgcctgtaatcccaaagctttgggaggtcaaggtgggtggatcacctgaagtcaggagttcgagaccagtctggccaacatggagaaaccccatctctactaaaaatgcaaaaattggccaggtgtggtggctcacgcctgtaatcccagcactttgggaggctgaggcaggtggatcacaaggtcaggagatcgagaccatcctgactaacacagtgaaaccccgtctctactaaaagtacaaaaaaaattagccgggtgtggtggcgggcacctgtagtcccagctactcgggaggctgaggcaggagaatggcgtgaacccgggaggtggagcttgcagtgagccgagaccgcgccactgcactccagcctgggtgacagagtgagattccgtctcaaaaaaaaaaaaaaagcaaaaattagaccgggtgtggtggctcatgcctgtaatcccagcgctttgggaggctgaggcaggcggatcacctgaggtcaggagttcgaaaccagcctggccaacatggtgaaaccccatctctactgaaaatacaaaaattagcggctcgtgatggcacatgcctgtaatcccagctactcgggaggctaaggcaggagaactgcttgagcctgggaggcagaggttgcagtgagctgagattgcaccactgcactccatccagcctgggcaacagagcgagactacatctcaaaaaaaaaaaagcaaaaattagccaggcgtggtggtgcatgcctgtaatcccagctacttgggaggctgagggaggagaattgcttgaacccaagaggcggaggctgcagtgagacaagattgtcccactgcactccaacctgggggatagagtgagactctgtctccaaaataaaaataaaaaaatttaatatctgacttttttgtatgtatattttttgagactgggtctcactctgtcaaggtgcccaggctggagtgcagtggtgtgatcatggctcactgcagccttgacctccagggctcgggcgatccttctatttcagcgtccctgttagctggcactagagttctgtgccaccacgtctggctaattttttgtatttttagtagagatgaggttttgccatgttgcccaggctggcctccaagtcctgggctcaagcaatcctccagcctcggcctcccaaagtgctgggattacagg

SEQ ID NO: 1560794 - DNA, 4001 bp, Homo sapiens
tccctcgcccacctgggatcttcaggggtgggtgaggggcatcaggagcaccaccgaggccccggacccgggttactacagcagtggagggagaccctggaactgaagatgatgcaggtcacgaggcagcgccaggctccgggcggagacccctccagggcgtccgggcggccttcagcacatccccacccctgcctcggccaaaagaccccgccccgcccaggcaggggcccacccggtcccacacccccgaggcttcccgaaggcagctccaacgcctgccccaagcacctacaagggcagcagtcactgagccccgactcctcgggcggcgccgcccaggacagcccaaccttcccagggcggggggccccttcccctcacgcagccccgccggggcagagcctcaccccccggccaccaagacagccagcgcttccccttttcagttctgtcgcggcttcccctttccaccctgcactacggccaaaatctgggactcttgcttgtccccgcgaagaccgggcgggcctagcctgacctcatggaggacgcgccccgctccggctcccggccgcccgcccccccgcccccgctccaggcccgggccctcccggttgcgtcatccaggcagacgcggcctcgcgccccgggggagattttcacaatcgcgcagccggcagcgccagcagccatttgctgcgcagggtaaacaggccccaaagttgcctccattttgcacggcccccaaaccgcggcaccgccagcaccgcggcccaacctcccgatccggggctgagcgacgcccacctcgggggacgcagtcgggaaagctcgaccgagaccccgcgggctcccccacaaccgcagctggcacccgcgcccccggaagcgggacgcgtcttcccgggaagcggcgggggtcttcccagggcgctgccgggctgtcggagtgcgccacccccagctccccggcggcccccgcggagaagccctgggtgccgtctacgtgcgcggcctcgcccggcgcgtcccgggccatccagaccgactcgctcaggggcgaaaaacggggcccacgaggtccgtcgcgtgcaggggccacatcgaggcaacagggacccgcgggagctcgtccaccgcaaagcgctccccgctcccgcagcgcacgctcgacggccgggaccgaaaagtgcagattcaccagccccgcgggccctgcctgtccgcggaccagccccccaaggccgaccccgcccccaaccagattgccccatcctgcgcctcccaaatccgacccgaccgcacacccttcctccaaaccgaattcccagtctgcgccccgcaaatccaaccctcgaccagaagcctctcccctcctccgaagccgagtcccatcccgcgaaccccgcaaaagacacacgcctcccccgactccccgtcctgcgcccaaatccgacctccgacccatgcccctcccgcaaatcaggcgccccggacggtgccccccaaatccaactccgcacccttgccccccaaacccgactcccccgagagcactgctaaggccgggggggacctccaggcccgccctgcgcctacctcgtccccggcgcgattctggccttgacaaaggggcggatctcgcgcgccggggacctatctggcgccccgaggacggccccccgcaggcctgcgcggccggcgcttctggaagcttcggacgggggcggggcacttacctctcactgctgctgccgccgcggctgtgcaggcttaggagcggcatggtgcggctggcgtggatggtggcgctgggtttatccccttccttctctctggcgaagcagtggctattgaggatccgctgcagggaggatttcaccatccggccgctggggtccgaaaccaggaaaacctccgctgcgtctctccgcgccgccgccgctgctcgccgttcgcaaaatggcgcctctgccgccgcccgcctttatagatgctgcgcccaggccacgccccccgcgccgccgggaacgcgaccgcacgaggggcagagccgcggggccgccgggaaaaaaagtcgcgcccgcccctcccagcgcctgattggtgaaagggaaagggaaaggaagaggctctctggagattggttggtgagcctcgggccacgccccctcctgcgcgcgtccttctgggggcggggctgccgtggcgccgggtacgcgctgcgcgcgccccgagccgtccccgcccccacaatcgtgccttgggggcgggggcggctcgctggggccgattttcgggggtcttcgagtgcccgtttgtctgtcgtggtccacgtcgccctccctagggtcccttcacgcagcgggacccctcccctgggtaggcccccgggtgcttggggggttgtccaaccgcgccagaattatttccagtaacacctggtaatcatcgatgatattactggttttatttttttaaatttggtcttgcagttcttaaaatgcttccagtgtttaaaaaaaaagaacttccaatgttaaagatattcaaatttagtaaaatatttcgtgtacaatttggacttaagcaaaaattttactccttgcagataaattcagatttttcctgtggaaactgaaacttaccctaaggaaaaacactactcctggcagttaaaattcagaaacacatctcatgtatgaactaaaatgtggatctcccaaggaaaaaacgatttctttggtggtcaagttcggtaaactgtttcgcctgtgaggtaaaatgtggacttacctagcaaaaatatttcccctcctggttaaatccagaaaaaaaatctcaggtatgaactgcactttgcttttaataagcaaagatataactcttggcagtcacatacgggtacatagcttgtgtgtagactaaattatgaatttagcaaaaagttgccactttgcagtgaggtttaataaaatattttttatttcatgtataaacaaaattttgttcttaccaagcaaaaatgctactcctggcaaatcctgattcctttcatggttttaattttgttttgtttgcgaccgggcctggctgtcacccaggctggagtgcagtggcgcaatctcggctcgctgcaacctccgcctcccaggttcaagcgattctcctgcttcagcctcctgaggagctgggattacaggtgcccgccaccacgcccggctaatttttgtatttttagtagagatggggtttcaccatgttggcaaggctggtctggaactcctgacctcaggtgatccgcctgcctcgacctcccaaagtttggggattaacaggcgtgagccaccgcgcctgcctgtctttcgagatttcgtactgcaccagaaggctgttgttgcatctctgctacgagcattcgctattcaggtgttgaggcagaaattaactcctgcggttgacatttggggccgccctgggcactgcagggcgctgagcagcgtccctggcctccacccactccatgccttgagcacccccagttgtgacaaccacaagtatccgcagacatcacccagtgtcccttggcgggggcagaatcaccctgggtgagactcccgagttaggggattccacggacccccccaagagactctgcatcccatgatcctctgccctgctgaggtcccaggagactgcgcacgttgaaatccacaccttgaggcagaggttgcagtgagctgagatggcgccgctgcactccagcctggtgacagagcgagactctgtcacaaaaaaaacaaaaaaaaagcaatccacaccctgagtggggaaggagagaggagaagcatcccaggagctgggggcctcctggtttataccgtttgccccattaggagtttatcctgaggctgggcacggtggctcacgcctgtaatcccagcactttgggaggccgaggcgggtggatcacgaggtcaggagtgcaagaccagtct

SEQ ID NO: 1560795 - DNA, 4001 bp, Homo sapiens
gaggagtagaaagggggtttagggagagttgaattcaagaagggatgaagaaactgaggctcagacagactaaatgcccatctagtggggacttcaagggctgaccttagccatgtgtcacggcgcccagccaaccgagaggagaaagagtcctggaaatctggacccagtgggtgtcccagaggcttgggtcgggccactcagaagggctgcggggcagggctttctccctagtgctgacctggctttggggtgggggcagggagctcagcagggcctccagctgcctgagctttgcctgtgcacaccccacctcgtgctggagctccaagaactctccgtactggtcctggaacactgcgacatagcggctccgttccctctcactgctcactggcgggtacttactaccaggttgaagagggtcagagtgtgagtgtaaagaaccccactctttcccccagtcagtgtaatttgcttttctttgtccatgctgggcccctactagaaacgttccttttctctccctcttttaatttatttattattattttttgagatagagtcttgctctgttgtccaggctggagtgcagtgtagcgatctcagctcactgcaacctccacctcccgggttcaagcaattctcccacctcagcctcttcagtagctgggattacaggcatgcgccactatatccagctaatttttgtgtttttagtagagacggggtttcacaatgttggccgggctggtctcgaactcctgacctcaggtgatccgcctgcctcagcctcccaaagtgctgggattacaggcatgagccaccgcgcctcgcctatttatttatttattttcggagacgggatctcactgtgttgcccaggctggagtgcagtggcttattcacagggacaatcccactactgatcagcaagggatcctttcctttctactctttggtaaactcttattcaactatcaaagccccagcctcagtgcccctctcctgatcccaggcatgaagaatcacatgggggacactcacagctcatagtcgggcactgggtggggcctaggcttatgccccttagggatggctccaataggcttcttggcgcccaggagggcctgggagagcaactcatcctcaaacacaatcttcttggtctttgccttgtggggtcccggctggggctggcacggagggcggggggcgctggttttgaggcctcggggcgccagtccctgcagctgccacaggaatcgtggtctggagttaaatcggggtgtcgggaaaccggagtccctcaaactggaggggctaaatcttttgcctagaggcccggcctggggaccccctcccggtcaggctcaccgggggcccaggcccaggcgggtgagtatgcaggtgcccccgggagccgcgagtctttgggggctcccgggtgggcatcggcctccgggagaagcagctcaggggtttccgggctgatgggcgggtcctgcggggggcgtcgtgtcccgcgcgcggcgggggtggtctgcgggcggcctgtgggtggacacgcggagaggacacgcctgacgacgcgcacggagaaaggacgcgcgggcagctcggccgaagagcggccaactctcaccccgcgggagcagagttccccagaacgaccgctatttgcatagacgcacgcgattggtccgcagcgacgtccagaccccgcccacgactgcgcaacccaaataagcgctatgtaaatgaactctgacgtcgccgcgcagcctgggaccggctcgagttaacccccgcgctgccggagcctcgacctccagggcgcgcagagcccacagacgaccgcgcccgaggagctcctcgggacctccgccccacctgcaaggccgtccggctcgctaccgccccgggtcacctgtcccagcgtctggagctccgagcctggatctgctgtcggagaggcacttccgtccgggttgtgcatttactgcaggatggacccgactggcggggtcgctcagcagggctgggggcggggtctgacgaaagggggctgggcctgacggcctgggggcggggctgacctggctgggcgtggccacacaccttcgaaacatggtcgactccgacctcgaccctcaagtttgtctgaaaaaacgggatggttttgcaaatttaaacttatttatttttttcagcaattatatgaaaaaaattttttaacaagagtctcacttgcccaggctggaatgcagtggcgtgatctcggctcactgcagcctccgcctcccgggttcaagcggttctcctgcctccggctcccgagtagctgggactacatgcgcacacttccacgcccagctaattttttgctgttgttgttgtttgtatttttagtagagacggggtttcgccacattggccaggctggtctcaaacttctgacgtcaagtgatccgtccgcctcggcctcccaaagtgctgggattacaggtgtgagccaccgcgcccgcccggagtttcgtcattttagccaggctggtcttgaacagcttccgggactcaagcaatccgcttgcctcggcctcccaaagtgctgggttacaggcgtgagccaccgcacccgcccctttctttctttttcttttatttcttttaagggcgagcaggtggtgttagatggcatctttactgaacagtactgttcctggcagagcagagctaacttatagacagtgtgccccaaatcggccttttatatatatatatatagagagagagagagagagaggctgtgttgcccaggctggagggcatgatcatggctcactgtggcctcgacctccttcctagcctcaattgatccttccacctcagcctcccaaatagctggaaccacaggtgacacaacgcctccctaatttttgtgttttttgtagagacgggatctcgccgcgttgctcaggctggtcttgaactcccgagttccagcaatccacccgcctcagcctcccacagtgctgggattacaggtgtgatcccataatcgtgcttggcattttttttttttttttttttttttttttttgagaggaaatgtccttatgggtccaggctgttttccaactcctggactcaagcgatcctcctgcctcagcctcctgtctgggatgtgtgtattttacatttggaacatactgccaagttactccttagtgagattgtaccatttatgctccaagagatacaggggttttcccacaaccttggcggcactggcatgataacggattccctcacctgtactttcttttcttttttttttttttttgagacggagtctcgctctgtctcctaggctggagtacagtggcgcgatctcggctcactgcaagctccgcctccagggttcaaaccattctcctgcctcagcctcctgagtagctgggactacaggcgcccaccaccacgcccggctaattttttctattttttagtagagacgaggtttcaccgtgttagccaggatggtctcgatctcctgacctcgtgatccgcctgcctcggcctcccagcgtgctgggattacaggcgtgagccacagcgctggcccctcacctgtactttcaaagttgaaaatattgcctactaaggctaggcgcggtggctcacgcctgtaatcctaacactttgagaggccgaggcgggcggatcacaaggtcaggagttcgagaccagcctggccaacatagtgaaaccccgtctctactaaaaatataaaaaattagccaggtgtgacggcgggcgcctgtaatcccagctacttgggaggctgaggcaggagaatcgcttgaacccgggaggcagaggttgcagtgagccaagattgcgccagtgcactccagcctggatgacagttgagagactgtctcaaaaaaaaggaaatattgcctagtgtatgagtgaaaaaatttagagactatttc

SEQ ID NO: 1560796 - DNA, 4001 bp, Homo sapiens
tcacagatggggaaactgaggcccaggcagagatacatggtcacagatggggaaactgaggcccaggcagagatacacggtcacagatggggagactgaggcccaggcagagatacacggtcacagatcgggaaactgaggcctgagcctcccagagatacacggtcacagatggggagactgaggcctgagcctcccagagatacacggtcacagatggggagactgaggcctaggcagagatacatggtcacagatggggagactgaggcctgagcctcccagagatacacggtcacagatggggaaactgaggcctaggcagagatacatggtcacagatggggagactgaggcccaggcagagatacatggtcacagatggggaaactgaggcccaggcagagatacacggtcacaggtggggaaactgaggcccaggcagagatacacgatcacagatggggagactgaggcctgagcctcccagagatacacggtcacagatggggaaactgagggccaggcagagaaacacggtcacagatggggagactgaggcccaggcagagatacacggtcacagatcgggaaactgaggcccaggcagagatacacagtcacagatggggagactgaggcctgagcctcccagagatacacggtcacagatggggagactgaggcccaggcagagatacatggtcacagatggggaaactgaggcccaggcagagatacacgatcacagatggggagactgaggcccaggcagagatacacgatcacagatggggagactgaggcctgagcctcccagagatacacggtcacagatggggaaactgagggccaggcagagatacacggtcacagatggggagactgaggcccaggcagagatacacggtcacagatggggaaactgaggcccaggcagagatacacggtcacagatggggaaactgaggcccaggcagagatacacggtcacagatggggaaactgaggcccaggcagagatacacgatcacagatggggagactgaggcctgagcctcccagagatacacggtcacagacgccatgtgttgtggcttctgcagaatctcgatgccacagggatcaggagagaccacagaaccagcccgaggacctggcttggggcctgactccagccgctaattgtgggtgaggaaactgcggcccgtcctgggccctcaccgaggccagcagctgatgtggctcccagcagagccgcctccgcacacgcgcccctcgccctgccccacgttgtctagggcgcccgtccctgagggccacgctggaaatattccctcctccccgcgtctcccgcatgatcgctgtggctttgcccactgctgtacccacagcccctggaaggggacccggctggcaaagcacgcagcttccgttggacagacacatactcggggctcacggcaaccccgtgtccacacccatcctgccggaaggaaaactgaggtctggggaagggcaaggacttgcctgaaactcctgcctcctgctgggctcccagaacattccagaagccccagaagtatggggagtggagcaggaaaaggtcccacccatcccccacggctggcacgcaccgttctccagggtggccgtcccacaggacttcctcaggccggtctccggaatctggccctccgtcactcgccggccaaggggggctgtggccagccgtggggtggagtcgcagctgagggtccccatggtgggcaggcgatggcccccacagcacccacggggcctggtgctaccttctgagccgcagcagctctggcggccacaggcccaggcaccgtccccaccttcacggcctcaccacaccctcccacgaccacagccgcacagacggcctcttgtcccgcagcagggagtcgtggggccctggcccaaggcaggctggtcggccggacactggcctggaagtggggccgggatcgagtgtcggccaggcggctggatggtccaggaaagagtccggtgtcagcagagtgcgtctcccgggagccggcagagctgggcagctggggccagggccggccccagggaactagacctgcaaacatgacacccacagccttgcagcaggagggcctggcggggtcgtgggtggcgtggccccgtttctacacctggggaaactgaggcacagcccaaggtcatacagcaagtacacaactctgggagtttcagctctgagccaagaagcattcactgcctcatcctgtcactcattcctgccaaagcatgtactgggcacctactgtgtaccagcctctgttgggggtggtgagaactggacacgaacagacggaaaagaaggagatgttctcaggatgggagagagaaagtcgtcagtaaatgtgataagtgaacacagtctggtgtatgaggaggcactgaacgtgagggaaaacgcagacaggtttggggcccagggtagcagtgtgggtgtgggtgagccccacggagaaggtaaaactgaacagtcccaaagcaggtgaggaggcagccgtgcagaggccctggggcagcggcgaggacagcggggaggtgagagccgtcctcactgcctcccagatgcctccgagatttaaaccacaatggattttgatacattcaaggcgaccactgcgtgaggctccaagaagaggctcagaaaactgccagatgagatgcacgttcctgtctcttccttgtttgtttctgtattttttggagccttttgcagtgtaatttttttttttttttgagacagagtctcactctgtcacccagcctggagtgcgctggtgcgatctcggctcactgcaacctctgcctcccgggtttatgcgattatcctgcctcagcctcctgagtagctgagattacaggcacccgccaccacgcctgactaatttttatattttttagtagagatggggtttcaccacgcctggctaattttttttttttttttttttttttttttttgagacagagtcttgctcccccgcccaggctggaatgcagtggcgcgatctcggctcactggaacctccgcctccagggttcaagaaattctcctgcctcagcctctcgagtagctgggattacaggcatgcaccaccacgtctagctaatttttttgtatttttagtagctaattacaggcacactccaccatgtccagctaatttttttgtatttttagtagagacggggtttcaccacgttggccaggatggcctcaatctcttgaccttgtgatccaaccgcctcagcctcccaaagtgccaggattacaggtgtgagccaccgcgcccagccaatttttttgtatttttagtagagatggggtttctccatgttggccaggctggtttcaaactcctgacctcaggtgatccacacacctcggcctcccaaagtgctgggattacaagcgtaagccaccgtgcctggcctgcagtgtcatctttaacagctttattgatataattcacataccatacaattatacatttcaccctgcaatgtaattttaatgtattgcatgttttaaaattttttaatcaaaatggtatagtctacataaaggatcataaaacaagtcttagtacatatcaaacttttgaaacttacagagcatattatctggtgaaaaaggaattaaaatagaaatcaccaacaatacgatatccaggatcccccaaatatatttagaagttaaacaacatacttctgaataacccacgcatcaaagaagtcatcacaaaggaagttagaaaattttcaaactaaatgactataaaaaatcaacatattaaactgtgtaggatgcagttaaagaagtacttagagggaaaatggttgctttaaatttttatatgagaaaagaaggctgggcacagcggctcacacctgtaatccctgcactttgggaagccaaggcaagcaga

SEQ ID NO: 1560797 - DNA, 4001 bp, Homo sapiens
caactccctcccagccctgggggctgtaggagtcaccctccaattgcaattctggcagcaaactctggcatcctagccaatcttggtgagaagccagaaaatctagtgcccccctagcagggagtggaggagaagccacagggggtggttctctgtctcctctgctaggtcaaggataattcaacttgattcctggctcattttttttccactggtttctcaagtgtgtgcctcttttggtctctcgtctcccaggtgtgtctcttggcttctctcaggctcacacatccattgagtacctattgtgtgtgtcctcatgcctggggctgggcacactccctatcccacccagcgcgtgggtgctgagatgcgtggggaaatggaggagcgagggaggggaccccacaatctctcctcgtggcctggaaatccttctatctggagtctaacctccattcctcccaacacccccctcggggtgagcacaagggtctgattcttttcttgataaggggaaggtgcccaaattgtttctcccctgcctatctacctaaaagcccacctagcaatgtcttcacggacgctgtccacacccatggagcggattatttaacaagagggtaatcgtgtgggctcaggagccggactgcctcggttcagtcccacctctgtcactctcgagcttgagcaagtgatttaacttttctgcgcctcagtttccccatccataaaatgaggtaacaataccatgctctagtagggaggaggcagagggggttaaatgccttagtctgtgctgtgtgattgaaacagcacctctcaaattagcacgtaatgaatgatcactgttatcataatgactattttattatttttgatcccagcttccctgtgaactcctacagatctgagaacttgggggtgctctcactcccaagatggaggaggagaggggctttccaatagcaaaagagagcgtggacgccccacattttgcaagcctccctgagcctgcccaagagaaaggtgccatggggagggagacccgcttctgtaagggtatgaatggcgtgtgcggttgtgagcaaggcaccaagatacacacacacacgtgcatggatggacacgtttgcacacacagcgcttgcacacacacacacccttttagagtgatttacccaaaggtacagaatagcacacgctcactccaaggctctcacacggccacacacctggccacacacgtattgtacaacacccagtcatctggagccagtaatgaggacacggtcacacacagactctgtctcacgtactgatcacaccccaactcgggcactagttggacaagccccccaaccgccacacacacaaactccccccggtcacacccaaccacgacacaaagacacacacgtttaccctgcacccccacagcatttcacacgcgtccccgtcagtcactctcacgtgagtcccgtcccctgccccacactgggggctgcaggcgaggagtggagggcttcagaaactgggcatctcggccccgaagaggaagtcaagggtaagcaaccgcccccctccaatgccccctgaagtttccctcccaaccccattcagctccagcgagatggcggggtgggggctcggggccatggaggggttgagaaccccaaagacgccaccccccaaaccagcccagcttgaggctggatttgaagcccccctcgtcctctcccaagccagagagtgcacgtcccggcccctcccccgctgcgacccccgcccctcgccgccctgcagctgggggggcttgtggagcctcccaaccccgtttctccgggaaccctccgcgcccccctcctctcccggagccacccgcgcccgcacctgcccgccgggcccctacctgtccggccaggcctgagcacagcagcagcagcagcggcggcgggaccgtgagcggccacatgacgcgcccctagcccggcgtcccgacccccgcccgccctagcggcgcctcggcgcggggaccgccaccaggcgcgaccccgcccgcccggccggggcgaccctgcgccgccgcctcccccgcctcgccggcggccgggattccgccccacccccgccccctcgctcgctccgagtctttgttgcgggctccgccccccgccccgcccccagctcctcttcgggagcagctcgagcagggtcgggtgggggggtgggggcggggaagtgggggagccagcgccggcgaggggacctgaggacaggacttggcagcgccccccaacccccaggccattccgggagcgggtcgcggaggtgggggaggggtgcccgtcacgtgtttgtaaatttcaccctccgggggcatttcccacgttgcaggtgggacggggacgaatggttgggggagaggaataggaggaaggcctggtagcagagaggggaaatgatgaacgccccctccctaaaaactcaagagtcaacagggaaactgaggcagaatctgaaattggaagttggaggaggggtcaatgccaggacaagaggggtgaggcatagatggagacggggaataagaggaaaaaattgaggttggggggacaggagaccgagaatcaggcaagaggccaatggaaatggccacgtgggtgggcttggcctcaaaaaggggcgtctcgttttcactctccccgggcgccccatttccccaccagtcctcccgctggaagcctccccgcctccgccacacctggaagagtttctcttcgctccctgtttcaatagcccaagatgaaagaccacatcccccgagagaatcaaaatattaacaccgcctccacgcgaagccatttgcatatgaagggcgtccttgtctagcctcactttcgggaggctttccagcctttctctgcctctcactcctccaaaagtctccctaggccgggcgcggtggctcacgcctgtaattccagcaatttgggaggctgaggagggtggatcatctgaggtcaggagttcaagaccagcctggccaacatggcaaaaccccacctctactaaaacatacaaaaattagccgggcgtggtggtgcatgcctggaatcccagctactcgggaggctgagacaggagaatcgcttgaacccgggaggcagaggttgcagtgagcagagatcgtgccattgcactccagcctgggcaacaggagcaaaccttgtctcaaaaaaaaaaaaaaaaaaaaagtgtccctagtcgtctttcctccccacagcccctctagggattcggatatatgtaggcagaggtggaggaggggggcgggcaaataagtcagattggaaagaaatcgggcataaaatatgcgaggccaggaagcctggcatttttgtgaccctgatactgttgggctaggaggggtctccccagacgctggtggggcctcgaccccagctggtgtccaggctcttaacaccatcgcaagaatgaattcaaggaggaatcagaaaatcatgaaaagttcggagatttttttgttaagggaaaagtccacacttgagaaaagggagtgggcgtacttaagagagagagatgggcaaggtggtttgggactgctacctttatgtgtctctttttttttttttttttttttttttttgagacaaagtctcgctctgtcacccaggctggagtgcagtggtgtgatctcggctcactgcaacctctgcctcccaggttcaagcaattctcctgcctcagcctcctgagtagctgggattacaggtgtgcgccatcacagccggctaattttttgtgtttttagtagagacagggtttcaccatattggccagcctggtctcaaactcctgacctcgtgatccacccgccttggcctcccaaagtgctgagattacaggcgtgagccaccacaacaggccactgtgtatctctttaaccaagggatggaatattcatgaaaactggaaaaagg

SEQ ID NO: 1560798 - DNA, 4001 bp, Homo sapiens
ttccgaccgagagaggagagaagtggacatgagagacacaaaaccccaaagccaggcgggcaggggcgcgcgcacccgagccacgaccaaactgcgcggggcgggcgccgggtcggggtgtgaaggcctccgggcggcgcgggccgagggtccccggggccgcccctcccccgccattctcgggtgacctttgccagcggccggaggggagagggagggggtatcgatcgcggggccgaactacaaagaagcgcgcgctggggcaggtggggggatgagcgcgggctcggcctctgctgctgagctgcaggcgcccgccgcaacgtctcggagctctgtggcccggggctgggggctcaacagcccctctccacccactctggaggaggggagtggcaccttagccgacaacagcagctcgttcggggacacagctccccccaacaggcgcgcgctcacacacacacacgcacacacacaatgagcttccctgagggctgcttggggagaggctcggagcctcccagcagtctaacaaggactagagaacccctacgcgctcccgaaaggggcagaagcggcgaccggggggcggggaggcggcacaatccctttctcccttttggcaacggtacaaacgggcagcggcgcggatcgcggtctagcttcctgatagggggtcccgggctgccggggcgcacgggcggggcttggggcgctggccccgggcatcggccgccgccccgctaggtgctcgggagtccagagccggcgcccccagggtctggccctgcgcgccacgctcctacctgccaagcgcagcgccgacatgcgctggaactctggctcctgcagccacttccacatcctgcggaaggtctcgcggccggatttgagcttgctccacggcttggggttgcgcagcaggtcggagagcgtgccctgagagcgacacaggatccgctgcgcgaagattgcctgcgggatgctgtagcgcttcagctccgccgtgatgcgctgcgccacctccttggtgttgatctcctcggccgctgcgcccgcgctggggccgccgccgctcccgccggggccgccgcctcccccgtgcggcccgtgcgccccggccgccgccagcccgcccagcggcgccagcagccccgcggcgctcccgctgcccgctccgccgctgcctgtgccgccgccgcctccgggcagcccgcgggccagtgcgtcctccgcgcgtcccagcagcgcggcgtgcggctcgaaggcggcgggcggcagcagcttgtccccagccaggtggcctggcgggccgtaggcggccagcggcgggggtggtggcggcggcgggggctgcggggcgccgtgcagcgcgggcggcagcgcgttgggcagcggcgacagcggcgaccccatggcgggcagctccttgccgtagggtccgtagaggtggcccacggaggcgagcgccgcccgctcgtcgcgcatgagggtgaagctgccgctcacgctggccgccagacgctgcggcgggggtggcgggggcggcgcggccgccgggtgcgggtgcgcgtggggatggccgccgtgcgccccggccacggccgcggccgccgcgtgctggtggaacttgtcggccacggccgcgagcggcggcaggtgctgcaggggcgtgagcgtcgtgtaggtgccgcccaggcccggcgcctcgcaggccatgcccattgccgggtgcagcgggcccgccagttccccgcggaagtccgcgccgccgcccgcgctgcccgcgccgcccgcgcccccggcgcccccaccgccgccgccgccgccgccgtccagcaggctcgccatgccggccaccaggcccgggcgcccgggcgccaccaggccgcggtgctgcgccgccgccgagcgcgcgtggcccgggctcagcagctcgcccgcctgcgcgtgggccacgctgtgcaggccccccaggctctccaggctcagctccatgctcggctgccctcccgccgcgcgcgctcctcagcgccggcccctagtgctcaaggccgctgcatgactcccgcccgctccccggtggctgcgcgcgaggctgccaggctgcgcggcgcacggcccggcccggctgcgagcgcggccaccaggatgtggcaggggagcggccgccggcgcccgggcccgggtctgacgtcagcgcccccgcccacccgctcctgccaccgctgcctcccgcagcctcgctctccgcccgccccggccccactcgagcaccaagcaggccgaagtcggccagacttggggcttcggcgtccctggccactgcgcccgcccgcgcccgctggggcaggccgtacccgggggacagcgggcgggggtccgaggacagactctgcccaggtggggctgggggcctcgacccagagtctccgatttcgcgtctctgtgtgattctctccagagtcccagatgtggctttctgcctggcacccccaagtccatctccagggagtttctgggagtgtggctggacggtcgcctgtaatgtacgtgtccccccccccccccgttccctacagacccccaggagctagatccccactgcaagctcagcttcccccgactcccactcacacctacggagtcacagcccccttcccacaacctctttgtggaggaagtgggggaaaagggaggtcctaaggctaggtcagggcctccgtgcgccccaggggtcagcctctgcccatgtgtgggcacctgggcctccgtttccccaactgtacaatgggctgcccggcctcggggttgccaaaggccccttctaattgcagggcctttttacagtgcggccgctggaggcactggagcctgggggtgaccactaagagcccctgtcaccctccagcccacggaggctgaggctggatcccctgtcttctgagacgtcgctggtgcaaactcctctttgtccctggggcttctcttcaatgtggggggaggcaggggtctcctttttctcagcacctggagacaggtgagccccaggggcccctgggaactgggatagatgggggaagggctcctataatcagagagacccccaggggactagatcccgccagtggggtaaggtcagggctgcggatctggaggggccagaccagaatctagaggatgctctgtcttgtaggccagaggctacggtgcagagtccaaaaccagcctcagccccttcctgcttccccgttgcctctgccccccccacccccggggtaacgcttgtgcactttctagaagaggaaggggatgggtcaggcagtcggttcgcgggagcccccagttacccccatctcagagggttgcatcagggctcaaagctgaaggaagaggggaggacacagtcaggctgtcacttcccctttggtgcaaaccttctgggcaaaccccggccccagctttgcacctgcatccagatttcctggcccctgtagacgtggctacacattggagatgcgattttctgaaccaagactaggttggctctggaatagggccctttctgtgcctcagtttccccttctctggtgtgggagggggtgccctccagcctgcccagctgggagccggaggtgagtctatgctgaccacaacagccagagagagagggggcctgaatgatctgggcccccagcctgaggtggcctgatccaagtcctggggagggatagggctgaaggggacccctgttagtactcgctgcttagggctcggcatttagtaagtgcctgttatttaccaggcatactctcctctctcagccccagagagggggaagtcaaatcacaatttttccgggtgtctctggcccaaggtgggggggtggtggccctagagttccccccttcattcctacatctgcccaagtgctaactcctgccccctgaagtgtcggtccctaaactttccagttccagggttcaggtataatttct

SEQ ID NO: 1560799 - DNA, 4001 bp, Homo sapiens
aaaggcaatccagtcgccagacaagaaggaggtctgctttgggaaagggctgttaccatgtttgtttaaactataaactacaaactaaatctctcccaaagttagttcagcctttgcccaggaatgaacaaggatagcttggaggttagaagcaagatggagtaagttaacttagatctctttcgctgtgtcagtcataattttgcaaaggcggtttcagtggttctctgacccagccaatgatgctaaattcccttattttatgtcccacgtagcacaacacagatcaccttttttttttttggagacggagtcttgctccgtcacccaggctggagtacagtgttacgatctcggctcactgcaagctccgccttccgggttcacgccattctcctgcctcagcctcctgagtagctgggaccacaggcgcccagccaccacgcccggctaatttttttgtatttttagtagagatggggtttcaccgtgttagccaggatggtctccatcttctgacctcgtgatctgcccacctcggcctcccaaagtgctgggattacaggcgtgagccaccgcgcccggcaagatcacctttttaaagtagtttatattttgggtgtttactaagccctttatttctatttattattttttgagacagtcttgctgtgtcgcccaggctggagtgcaatggcacaatctaggctcactgcagcctccacctaccaggttcaagcgattcccctgcctcagcctcccaagtagctgggattacaggtgtgcgccaccacacccagctaatttttgtatttttagtacagaccgggtttcactatgttggccaggctggtctcgaactcctggcctcatgtgatccgcccgcctcggcctcccaaagtgctggtattacaggtgtgagccaccgcgccggaccttactatgccctttagatctgagctcgggcggccccctctaggcagccctgctggcctcaggtccctgggtcagccagttcctctgagctccggggctcccactttcccgaccactctgggttgacagtgatggatcaggagtatatctcccagtgctgagcaaaaaggccgcatagtctgtcaaccgaatgaaaggacggcgtatgagcgcattaatgagtacacagatgaatgtcctctctggctcaaagtccttttccggattcccaggccatgtctccagaacccagacttcacccccgaaccatgcccctaatccagacttattgactacagtaaaactgaggcacgtcgacgtcctaaacggaggatatacaagcacctcctagatcagtggggaaactgaggcacacggtgccgcttttgaaatgaagttgcccaaggacagccgggcaaaggaccccgtccggtttctcctcagcccctcccctagctcctctatcctggaaagccccgtccaaatttctcccatctctcacactattggtttaacagggcatcagtctccaagcgctctcttcctttatcggctggcatttcctactcgcgtggtggctccttgacccgccccttacgccccgccccgccctcactactgggccacccgtacgcccctctatcagaaaccccccactattggccactggactttgccggttcgggctgtgattggtcgtagacagaagtccatcccctaagcaaccacctgacaggggttggagaaaggaaaaaggttggagggaattcgggtcagactcacgttgagccggcgggaggcagatataggtcttgaagaactcgcttcggcgggcggcctccttaatacggttggcaagcggcttgctgacctgccggatgcccaagtatagcagcttcgccatagggaacgcgcccaccaccatcttggcggtctcacagggcacgcgcaaccttgctgactgggcggggcgcctcaacctcttcactcctcccccgccctctcgtggccatgcgtgcgtcagtacgtatgtacgtacgctcgagggaaacttcagaggcgcatcctgacgtcaccccgtcgacgctggcgtagcgacgtccgttcgctgaatatgcaaatatacacggaagtgaggcgggtcagggggcggtgccgttaaacggatgctggaaggcgtgtggattcccacgcccgccttggccaacgtcactgtactccttcgtgatgtcacgttccgagttggcgtccccacccaaaggaggctcttaattagtcctaattagtcctatgagccccaaatacaccttcctctgcaagctagggctctcattgggattaagaggaagccgcgcggtcatacagactttggctgggatcccagctctgccatttcctcgctgtgtaatattagatgagtggcataacctctctggacttcagtattaccgtctaccaaatgggaatcctaatagcagttgcctctttgggttgttgtgaggcttctatgctaatcttgagtgtaaaacagtggaccatgggaagtggttagaatggtgccattcatatagttaagcgctcagtaaatagcccttcttactatacaggtcatgattgcattattaatgctaaatccagcctgagggtgcatttcacccccagaagcagcgaatccaaccctttcccaagtaactgacaaggaaactgaggcccagagcagggcagggggtggcacaaggttcctgcagaggttgatagcctggcatcttggccaataaaaccatacccgttctcaagcaacccaacttccttcattaggaggtaggttccccagggagctagttcagaaataaatttaaggacatgtcccagactgtcctttcttacccagcagggagtaaaatcatataaacaatgtcaggaaggggttgagagaaattcctggatgatggagtgctgatgggtaattgagagattctcggaggcagagggacagaagaaaacaggaacagaggactggccgccatggctcacgcctgtaatcccagcactttgggaggctgaggagggtggatcacctgaggtcaggagtttgagaccaacctggctaacatcgtgaaatcccatctccactaaaaaaaaaaaaaaatttagccgggcatggtggcgggcacctgtaatcccaggtactctggaggctgaggcaggagaatcgcttgaacctgggaggtagaggttgcagtgagccgagatcacgccgctgcactccagtcttggcgacagagcgagactccgtctcaaaaaaaaaaaaaaaaaaaaaaggaaaacaggaacagaggagtggtgtgtaggaggaaacatacattcaggacacagaatcagggggctctggacttctttggtatccagtctgactctctgagtgtcctttgtcaagctcctggcactgagggacctgcgtttcctcatctttactgatggtgctggtgtgtgtgtgaaccctgatattctgaattactaagaatgccaggattccataaaaacaaccttttccagggtcccttccacacggaaggtatgcagaaacttgggactacctaaggtccatcatccatttgggaccagcccccttcccattttacagatcgtttgagcctgggaggttgaagctgtggtgagccatgagctccactgcactccagcctaggcaacacaacaagaccctgtctcaaaaaacataaaatttctgtccccaggccgggcgcagtggctcacgcctgtaatcccagcactttgggaggcacaggtaggcggatcatgtgaggtcaggagttcgagacaagcctggccaacacgatgaaaccccatctctactaaaaatacaaaaaattcgctgggcgtggtggcgcacacctgtaatcccagctactccagaggctgagacaggagaatcacttgatctcgggaggcggaggttgtagtgagccgagatcgtgccaatgcactccagcctgggtgacagagcg

SEQ ID NO: 1560800 - DNA, 4001 bp, Homo sapiens
ctttgcattgctggtttgcattattgggggtattagatgaccctggcttttggcaagaggagtctagatggaggtttggtgctaactgacacagtttcttgcagcagatagaaataatcaaacctggttttctctgtgttagtatctcacacacacttccactccaaatacatccctgatgctgattaacctttgtgtttataattgtatgtcgtctacaaggtcccttgtaaaccttaaagcatgacaaatagaggttactatatgttcatggattgtctttcttttaggggggaagggatagggtctcactctgtcatccatgctagactgcagtggcacagtcatagttcactgtaagctcaaacttctggacttaggcagtaatcccagttcagtctcccaggtagctgggactacaggcatgtaccaccatgccaagctatttttttctaagtttttgtagatatgcagtcttgctatgttgtcaagtctagtcttgaactcctggcctcaagcaatcctcctgccttggcatcccaaggtgctggaattataagtgtgagccacagtgcttggctggaacgtaattttctttttttctttctttctttcttctttgagacagtctcactctgtcgcccaggctggagtgcagtggtgtgatctcagctcactgcaacctccacctaccgggtcaagcgattcttatgcctcagcctcccaagtagctagggttacaggcatgtgccaacatgcctggctaatttttgtatttttagtagagatggggtttcgccatgttagccatgctggtctcaaactcctgacctcaggtgatccgcctgcctcggcctcccaaagtgctgggattacaggcatgagtcaccacggaacgtaatttttaacaatagccttcggtaatccaatttagttgttcccagtgaatttctcctacatcattacatttttttctgggtagagtttactgaagaaggtcttcttcatggcgaccttcagctccttgttcctgaggctgaagatgatggggctgaggaagggtgtgaggaccgtgtaggtgatgcccatcaaggtgtctccttccagagactggggacttttgggcttcaggtaaatgacggaggcaaagccatagtgcacgaccaccacagtgaggtgagaggcacaggtggagaaggccttgttccgaccttcagcagaagggatcttcaagatggcggccacgatgaaggcataggagaggaggatgaggagaaaacagcccagcagggccgtgatacacaccaagcccacgcctttggccaccaccagcacatcgtctccacaggccaacttcaacagaggtggcacatggcaagcaaaatggtggatctccttgtgtccacagaaggcgaggtggaaaatggccgaggtcaccaccatccccatgaccaagccaccagcccaggagcagcccaccaggcaggcgcagccccgcgggctcatgagcacgttgtagcgcagggggtggcagatggccacgtagcggtcgtagcccatgacggtgagcaggaaggagtgggtgaagccgaagctgaaggagaagaacatctgactggcacaggccaggaaggcgatggagcgctgggtggacagcaggtcggccagcatgcgcgggatgatggccacggtgtagaggatctcggagacggagagggcgcacaggaagaggtacatgggcgtgtggaggctgcgctcgctccagacggtggccatgatgagcaggttgcccagcagcgtgaacaggtacatcagcaggaacagcaggaagagcatcagctggaggtgggggaagacagagaagccgacgaggatgaattgggtcactgtggagtgattggctctctgcatggaggctgtgcctggggtgagatgtgacagggagatgtcagttactgcatgaagaaaagttctcagccttccccatacctggatttgcccaagggactgctcttgataaatggtttggttccattcccactctgtacctcctataatttaatactctcgtcaacctagtgagaacggtactattttttcaacccccttttgaagtaccttgagcatagtcattgagaatattgaaatgtagagcttgctcaaggccaagctgttgaaacggtagatcagagactggaacccatagctgggctggctctaaaacctgtacccttcactatttctctatgttgccccctgcccccaaacgaaaatgctccaggctggcatggtggttcacatctgtaatcccagcactttggaggctaagggggaaggacggcttgagcccaagagtttgaggttgcagcaagctatgatggcaccactgtactccagcctgggtgacagagctagactctatctcttaaagaaagaagaaaatggccgggcacggtggctcacgcctataatcccaacactttgggaggctgaggcaggcggatcacgaggtcaagagatggaggccagcctggccaaaatggtgaaaccccatctctactaaaaatataaaaattagtcgggcatggtggcacgcacctgtagtcccagctcttcgggaggcagagacaggagaatctcttgaacctgggaggcggaggttgcagtaagccgagatggcgccactggactccaccctggcgacagagcgagtctctgtctcaaaaaaaaaaaaaataaataaataaaaagaagaagaagaaaaacatattcctttgctggaacttccattcattccttctctgccctcctactcccttctgataaatcacgttcatcccccagctccaggtatcatgagacgttcccacccatggctgcaactccttggaacagggcgcgtctctaaatctgaaccaaccagacttcctctggggttatccatgtaggaaagcagaggcaggagactgtgttgctctaaggaaggagccagaaatcatgctttggttgttttccagctcccatgaggtatgcctctatgttctgaggcaatgaaatgtagccatcagacagaaagaagggcgtgggaatcagcagggctcagttcaaatccctcctctggctgttgtgtaatgattatttatttatttatttatttatgtatttatttatttatttttgtagagacagagtttcattctgttccccagactggagtgcaatggtgcaatcatagttcactgcaacctcaaactcctggattcaagcaatcttcctacctcagcctcccaagtagctgggactacaggcacacaccacctcacccagctaatgttttattttttattatagagatggcatcttgctatgttgcccaggctggtctggaactccacccctcaagtcatcctcctgcctgggattcccaaagtgctggaattacagaagtgagccactgcatctggccaatattttgtaaagttgagcagattcctttatctctctgtacctccctacctcaaagggttgttgtgggaaggaaatgagcttttcttaagtgacctggcatgcagtagatgctacatatgataattaatacagtaaatgagtgactgtacatggtctttgctcagtaactttaatttcatgagatttctatgtgtctttatgaaacaattaaatatattcaattttttttttttcaaaagacagggtctggctctgtcacccaggctggagtgcagtggcacaattatcatagctcactgcagccttcggctcctgggcttaagcgatcttcccttctcagcccccttaaatagctgggactacaggcatgcaccaccatgcttagttaatctcttttttaaaaaatttggcaatgtgtgaccaggtgcagtggctcacgcctataatcccagcactttgggaggccaaggtgggcagatcacttgagatcaggagttcgagaccagcctgggcaacatggtgaaaccctgcct

SEQ ID NO: 1560801 - DNA, 4001 bp, Homo sapiens
tgaaacaattcatctgaaaataaaagaattatatttacagttgtccattgatgtgaaacgtccagaaaaagcaactctaaccagacagaaagattagtggctccctagggctggagggcatggagatttggaggaaacagagagtgactgataatgagtatgggttgtttgtttgtttgagacaaggtttggctctgttgcccaagtcagagttcagtggtgatcatggctcactgcagcctcgaactcctggatgcaagcaatcctcccacatcagcctctggagtagctggggctacaggaatgtgccaccccatttagctaattatcagaatttttgtgtgtgtcaggaaggggaacatcacagactggggcctgttgtggggtagggggagtggggagggatagcattaggagatatacctaatgttaaatgacaagttaatgggtgcagcacaccaacatggcacatgtatatgtatgtaactaacctgtacgtagtgcatatgtaccctaaaacttaaagtgtaataaattaaaaaaaaaagaacttgtgtgtgtgtatgtgtttgtgtgtgtgtgtagatggcatctcactatgttgtccagaccgatcgtgaattcctgacatcaaacaattctcccactcagccttccaaagcactaggatttgggtttcttttttggatgactaaaatactctaagccagattgtcatgatggttgcataactctgaatacgcaaaaaccacagaaatgtgcgctctaatgggtacattgtatggtaggtgaattacatcttaataaagctactataactcaaaaattaaaactcagataaagacatacagatcaagagttgtggaagtaaacatgcttttaacatttactgagcacctactatgtgatgagtgttgtcatatacagaaatctttacacctgccttacaaggtaagcattactagccacactgtgcagacaaggtgatggtcatcctcctatcatattctatcagcacttccacaccagctactcaggtgcctgaggaatagagtgtgctgaggaaggtcctcttcatggcaaccttcagttctttgttcctgaggctgaagatgatggggctgaggaagggcgtgaggactgcgtaggtggtggccatcagggtgtcaccctcctgagagtggggacctttgggcttgaggtagatgacagaggcaaagccatagtgcacaatgaccacaataaggtgagaggcacaggtggagaaggccttgttccgaccttcagcagaagggatcttcaagatgtcggccacgatgaaggcataggagaggaggatgaggagaaaacagcccagcagtgccatgatacataccaagcccacgcccagggccacagctggtacattatttccacaggccaacttcaacagaggtggcacatgacataaaaaatgctggatctcatgggatccacagaaagtcagttggaaaatggccgaggtcaccaccatccccatgaccgagccaccagcccaggagcagcccaccaggcaggcgcagccccgtgggctcatgagcacgttgtagcgcagggggtggcagatggccacgtagcggtcgtagcccatgacggtgagcaggaaggagtgggtgaagccgaagctgaaggagaagaacatctgactggcacaggccaggaaggcgatggagcgctgggtggacagcaggtcggccagcatgcgcgggatgatggccacggtgtagaggatctcggagactgagaggacgcacaggaagaggtacatgggcgtgtggaggctgcgctcgctccagacggtggccatgatgagcaggttgcccagcagcgtgaacaggtacatcagcaggaacagcaggaagagcatcagttggaggtgggggaaggcagagaagccgacgaggatgaattcagacatggaggtgtggtttagccccagcatgacggccacccctagttggggaagagaggaaagaagacccagtggttaggagcatgggggtgtctagtgattcctgcctgggaggacatctgagagcgcctccttcatctgtccaagccatggttactccatctgcagaaaggcattaataataatgtattgaggtttaaataagatcactcaccttaagtgctttgtgcaggtcctgacacaaagtaagaatttaataaattataaatgttgatagtaataattattctgctattgttattgccatcacgattattagatccatgcaccaccacctacaccttgcttttctgcctttgttcatgctggtcttttcatgcttttccctatctttatgggtccaaatcctacctgaattttatgagcaagctgctccctgattgccaccttcagctggaagtcatctcttccctatgtcatggaaacgtccagactctgtttaattctcggcaccactgctttctagctgtgagatgcagggcaggttgcttcccctctctgagcctcattgctcccctggaaaattgaaaccacctttgcaaaattatgactgagacagcgaaagagatctaacttaaccaactccatcttgcttctaacctccaagctgtccttgttcattccaggacatagggtgaactaactttgggggaaatttagtttatagtttatagtttatagtttggaacaaggacgataacagccctttcccaaagcagacctccttcttgtctggggattagattgcctttgtagaactaacattagccacaagattagaaattatggtttaggagtcatgcagctggaggctacaagattctgaccctccctaaattgctcccaagatcagtgcttgagatattttgcagatcctgcacttgatggatcagctggcaccacccaggtcgataaactggctcaactgatcttgtggcccccacccaggaactgactctccgcaagaagacagctttgatttcatctctgaccaatcagcactgctggctcactggcttcccctccacccaccaagttgtccttaaaaactctgctccccaagtgctcagggagactgatttgagtaataataaaactccagtcccctgcagagccagctctgtgtgaattactctttctctatcacaattccgcttttttttttttttttctttgagacagagtctcactctgtccctgctggaatgcagtggcatgatctcggctcactgcaacctccgcctcctgggttcaagcaattctcctgcctccgcctcctgagtagctgggattacaggcccgcatcaccacacctggctaatttttgtatttttagtagagatggggtttaaccatgttgctcgggctggtcttgaacttctgagttcaagtgatcagcctgcctcagcttcccaaagtgctgggatttataggtgtgagccaccatgcccagtcaaaaacttcttagcagaaaatggttatggtccactgacctctaggctatgggcccagcatgcttccactacgtgactctgctggtctcctcctctttttgaccccaaccccaatcctccaatcccaaacctaacagcaaaaacctaggctatcagccatggcttctctcatcaccttccctgagtggccacagagtcagatctgcccaatttctctgccagggcagctctcctccctgcaccaataggagcccttctactttatttagtttatggaagttccccaacaaactaaactaggaggctgtgactcctctcccactctctttcttgccagtctgcaaacaggctagatgcaaaatacaaaagtttatgttacaatgcaaactggatcaatgaatgaatggataaacaaaatgtggtccgaccacacaatgaaatattatgcaaccacgcaaagattgaatcagtgatacatgcaacagcgtggatgcactttgagaacatgaggctgagtgaaggaagccagacacaaa

SEQ ID NO: 1560802 - DNA, 4001 bp, Homo sapiens
cccaaattcttagttattacatttcttgtacagatcaaaaaatgtaaagaactctatttttacttgactacttgacacctgctttctctctctctctttctctctctctctttctcctatctctgtatctctctctctctctctccttcttgctctctctccacttttgcattctgatatccttcactcaattcgacataatatccacacacacacttagggtatatgtctcccaaagacagtgaggaactttaaataagaaaccagtttcagtggctgggtgcaatggttcatgcctgtaatcccagcactctgggagaccaaggccagcagataaagaggtcaagagatccaggccatcctggccaacatggtgaaaacccatctctactaaaaatacaaaaattagctgggcctggtggcacgcgcctgtggtcccagctactcgcgaggctgaggcaggagaatcacttgaacccgggatggggaggttgcagtgagccaagattgtgccattgcactccagcctggtgacagagcaagactccatcaaaacaaaaacagaaaccagtttctctgagacaaatagtttattttcctttgttcatttcttctaattaaaaggataatatttgtaaaacactggacacagtacaggatacatagaaaaacttcaatgcttggtggcatttatgactatgatgttattcttgctttttcttacactaggggaaaataaaatcttttttgcctgtctgtttaagaagaaccatgtgcataaatgcccagacacatccacgtgatgatctccacctatccacagatagaaaacacatttctaggcacagataatgggataaagttcgttacaatggctcataaatgatcacatgagcctaagcaaaaaggaaggggaaaacaatagctagtaggtacaaaacacatattttcaggtattttcacatacctgaacccttacaacagtcctatggagatacacattattatccccagcccttctattatattttatcaccaccaaactggccattaggagcttagagggcagaaccttctgcaaaagtttttatttatggcattcttcagctccttgttccttagactgaaaatgattgggctgaggaagggggtgaagacagtataggtggtggccatcaaggcatcactgtacatagaatggaggcccttgggtttgaggtagataagggaggcaaaactatagtgcatgaccaccacagtgaggtgggatacacaagtggagaaagtcttgtgccggccctcagcagaaggaatcctcaagatggcagccacaatgaagacaaaggagaggatgatgaggaacaaacagcctatcagggctgtgacacacaccagcatcacacccatgatgacagatgatgtcttgctcccacaggccaacttcaagagggaaagcacatgacagagaaaatggtggatcacattagacccacagaaagtgaggtgaaaaaccatcattgtcaccatcatccccatgaccgagccaccagcccaggtccaggccacaagatgggcacagccacggggactcattagcatgttgtaatgcagtgggtggcagatggtcacgtagtgatcatagcccatgaccatgagaaggaaggagtgagtgaagccaaacatgaaggagaagaacatctgaatggcacaagccacaaaggtgatggaacgatgggtgaagagcagatcagccagcatgcgaggggtgatggcaacagtgaacagaatctcagagatggagagggcacacaagaagaggtacatgggtgtgtggagtctgcgttcaatccaaactgtggccatgataagaaggttgccaagcaatgtgaacaggaacatcaggaggtacagcaggaacaagacaggcaggagctgctgggggaaggctgagaagccagagaggataaattcagatatggttctgtagttctgaccaggcatggatactgtatctggtgagatcagaaacaaaattaagtgacagtggttaaaacttagactctagcacagaccaaatggaaacccaacagctctatgctattcaacaactggtggaactttctgggtctcactttcctcatctgttaaatggagtaaataataatagttcttaacattcagcaatgtgacaaagatcaaacgagatcaatatattagatgaccaagtcagatgttggctactaattgggtttccattaacactgactaacataaagaaaagtttcaatacttggagccattagagacaggcatggatgatcagggtcagattcccctgaaaatgtgccagttctagaaaacatttattttgatcttgagccttaaatttttgttccccaagagtctttgtcttttaattgcttatttaacccgtttacatttattttaatactcatttattgatactcatttatgccatcttatttcaaattacacatttactattctaataaatctgaatagaaaattcaaaaataaaaggatgggtaaatatatgtctgaagaatatgcaccaaatgaaagctgaggctgcaaccttaataaaaaagtggaatttaaggaaacaatgatcgcaaggtctctaatacaatacacctctacagggaagtagagttccttaacacatggctgatctgtggtctggacatggaagaaagccttggacatcttctaccagtgtaaaatgaaattttcactaagtaatgggataatattaaaagcctgcaggtaccagattgaaaagatgcccactagtcaaaaacaataatcattgtacagaagatggaggaacaagctaaattatataatgagaaagctttcagaaaaatccagaaggtggataattccacagaacaattggtctggtttcactgatagaggtatattgaaaggataagagagattccaggacatagtaactggatgcaacataggggactagttgaatcttgatctacataaccagctgtaagtattttaaggcaatagagaacattttgattacagtatgaatgaatgattacgtatgagtaatattaaagcattattattgatctaattgtgaattttttagagacaaggtctcactctgccccctaggttacagtgcagtagtaggatcatgactcactgcatcctggaactcctgggctcaagttatgcttcttctcagtctcctaaatagctggactacagatgtgtgccacctcacctgtctaattaaacattttttttttttttttgtagagacagggctttgctttgttgcccaaactggtctctaattcctggcctcaagcaatcttcctgtctcagcctcccaaagtggtgggattatacacatgagccaccatgctcagctaattatttttgtaagtgttatctggttattttgactatgaaggtaaatgtttagtttttcaatgcataccaagatttttacatctcacacacacacacatgcacacacactaagggacagagaataacatttatacccattaaaagaacatagcaaacagcatcaatactataaatccatgtaactatatatcctggaatattcattaacaaataatcaatacaacttcagtgagatagatagaaatagccaaatcgacggcagattgattattttttttttgagacggagtcttgctctgtcacccaggctggagtgcaatggttcaatctcggctcactgcaacctccccttcccaggttcaactgattctcctgcctcagcctccctaatagctgggattacaggcgcgtgccaccacgcctggctaatttttgtatttttagtagaggcagggtttcaccatgttggccaggctggtctcaaacttctgacctcaggtgatccgcccacctcagcctcccaaagtgctgggattacaggtgtgagccaccacacctggcagatagattattatagt

SEQ ID NO: 1560803 - DNA, 4001 bp, Homo sapiens
cacattgagactgcagagcaactgtgtcaaaaacgctgggatgagacacgtggctatcttattaggctaccttattagccctattattaggacatattaaagccctattaccaacctccttttttctattttgccccaaattcttagttattacatttcctgtacagataaaaaatttaaagaactctctttttacttgacacctgctttctctctctccctctctctctctctgtcttttgctctttcttctgtctctgtatctctctctctttcttctgtctctgtctctgtatatatgtatacatatatatgtatacatatatatgtatatatgtatacatatgtatgtatatatatatatgtatatatgtatacatatgtatgtatatatatatgtatacatatatatgtatatatatatgtgtgtgtgtatatatgtatgtgtatatatatatatatctccttcttgccctctctcaacgtttgcattctaacatctttcattcaactcaacatattaatatccacacacaaacttagggtatatctctcccaaagacagtgaggaactttaaataagaaaccagtttatctgaggcaaatagtttattttcctttgtacatttcttctaattaaaaggataatatttataaaacactggacacagtgccaatacatagaaaaagctcagtgctgggtggcatttatgactatcatgttattcttgctttttcttacactaggggaaaataaaatcttttttgcctgtccattcaagaagaactgtgttcataagtgcccagacacatccacgtgatgatccccacctgtccgtggacagaaaacacatttctaggcacagataatgggataaaggtcatcataatggctcataaagaaaagattatgatcacttgagcttaagcaaaaagggaagggaaaacaatagctagtatgtatcaaacacatattttcacatacctgaacacttacaacagccctatggagatacacattattatatttcatcaccaccaaactggcgctcaggaacttggaggacagaattttctgtaaaagtttttatttatggcattcttcagctccttgttccttaggctgaaaatgattgggctaaggaagggggtgaagacagtataggtggtggccatcaaggcgtcactgtacatagaatggaggcccttgggcttgaggtagataaaggaggcaaaactatagtgcgtgaccaccacagtgaggtgggatacacacgtagaaaatgtcttgtgccggccttcggcagagggaatcctcaagatggcagccacaatgaagacataggagaggatgatgaggaataaacagcctatcagggctgtgacacacaccagcatcacacccatgatgacagatgatgtcttgttttcacaggccaacttcaagagggaaagcacatgacagaaaaaatggtggatcacattagacccacagaaagtgaggtggaaaactatcgttgtcaccatcatccccatgactgagccaccagcccaggtacaggccacaagatgggcacagtcacgggggctcatgagcacattgtaacgcagtgggtggcagatggccacatagcgatcatagcccatgaccaggagaaggaaggagtgagtgaagccaaacatgaaggagaagaacatctggttggcacaagccacaaaggtgatggaatgatgggtggaaagcagatcagccagcatgcgaggggtgatggcaacagtgaacagaatctcagagacggagagggtgcacaagaagaggtacatgggtgtgtggagtctgtgttcaatccagattgtggccatgatgagaaggttgcccagcaatgtgaacaggaacatcaggaggtacagcaggaacaagatgggcaggaggtgctgggggaaggctgagaagccaaagaggttaaattcagatatgatgctatagttctgactaggcatggatactgtatctggtgagatcagaaacaaaattaagtgacagtggttaaaacatagactctatcacagaccaaatggcaactcaacagctctatgctattcaacaaccagcagaattttctgggtctcactttcctcatctgtaaaatggaataaataataatagttcttaacattcagcaatgtgacaaagatcaaatgagatcactatattagatgatcaagtcagattttggctactaattgggtttctattaacactgactaacataaagaaaaggttcaatacttggagccattagagaccagcatagatgatcagggtcaggttctcttgataatgtgccagttctagaaaacatgtattttgatcttggggtttaaatcttttttccctgggagtctttgtcttttagttgcttatttaacccatttacatttattttaatactgttttattggtactcatttatgccatctaatttcaaatggtgcatttactattctaaaaaaattgaacagaaaatttgaaaagaaatggctggatacatacatgtcagacaaatatgcaccaaataaaagctgaggttgcaatcttaataataataaaaggtggaatctaaggaaacagtgatcacaatgtctttaataccatatgccactgcagggaaccagagttccttgagacatggcaaatctgtgatctggacatggaagaaagccttggatatcttgtaccagtgtgaaatgaaaccttcactaagtaatgggataatattaaaagactgcaagtactagattgaaaagatgcccactagtcaaaaagaataatcattgtacagaagatggaggaataagctaaatgacaatgtgaggaagctttcagaaaaattcagaaggtggataattccacagaacaattggtctggtctcattgataaaggctcatccaaaagataagagagattcggggacatagcaactggatgcaacataggggaccagttgaatcttcatttccataaccagctgtaagtatttttaaggcaatggagaacattttgattatagtatgaatgaatgattaggtatgagtaatattaaagcattattattgatctaattactaattatttagagacaggtcttgctctgtcccccaggttagagtaggatcgtgattcactgcatcccggaactcctgggctcaagcaatcctctgcctcagcctcctaaatagctgggactacagttgtgtgccacctcacctgtctaattaaaaaaaaattttttccatagagactgggcctcacattcttgcccaaactagtctctaactcctggcctcaagtgatcttcctatgtcatcctcccaaagtgctgggattacaggcatgagccaccatgcccaactaattattttttaaaagtgcaatctggttatttcggctgtgaagaaaaatgttgtttcttgatgcatgctaaaattttgaaatcacacacgctaaaggatagagaataatattcataccatttaaaagaacattatagcaatcagcataaatataatgtctacattactatatatcctggaatattaaggataataatcctggaataataactaaatcaatgacagatagatattatagttagaaagtttaacagagttcagaaatgtaatttattaattattaattgcaatgcaattaataattacaatgcaattaataaatattagctattatatattagactcttcaccagagaataaatattttttcaagcacatggatacttttacaaaaactgacatttcattaagatataaaaaattctttaattccaaagtataaatgttatttaaatgataatgcattaacattaaaaattaatagagaagaaatagcttttcaaatctcatatgcttggaagctaactatataattgaataatcttcaggttcaacagtaaattataaaaattaagaaagctttaga

SEQ ID NO: 1560804 - DNA, 4001 bp, Homo sapiens
tgtaatcccagcatttggggaggccgagatggcaggattgcttgaggccaggagttcaagactagcctgggcaacatcgtgagatcctgtcgctacaaaaaatacaaagttacccttgtggtggcatgcatctgcagtgctagcttctctggaggctgaggtgggagaattgcttgagcccagaagttgacgctgcacttagccatgattggactactgcactccagcctgggcaacagagcaagaccgtgtataaaaccaaccaactaacgaacaaacaaaatggagttagtaatcctatcttccctgtgaagtaaaataactcacatgtgttaagcacctaaagcctgtcattagtcattggggaaatgcaaatcaaaaccccaataagaaaccactgggatgtctacagtaaaaaagtcagggctgggtgtggtgactcacgcctgtgatcccagcactttgggaggctgaggtgggcataatgcctgaggtcaggagttcgagaccagcctggccaacatggtgaaaccccgtctctactacaaatacaaaaattagccaggcatggtggtgtgtgcctgtaatcccagctagtcgggaggctgaggcaggagaatcgcttgaacccaggaggtggaggttgcagtgagccgagattgtgccaacgcactccaacctgggtgacagaacgagactcagtcaaaacaaaaacaaaaacaaaaacaaaagaacaaggagggagaaagagagtgacagagacagagaggtatagaaacagaaagagacagagagaagggaaagagggaagtaggcagagaagaaggaagggggagggagggagggaggaaggatggaaggaaggcaaggaggaggggggagggagggtggactgtaggtcagagaaggagggaggaaaggagggagggaggaaggaaagaaggaaggaagggagggagggaggaaaggagggagggaggaaaggaaaagaaataaaggaggaagactaaagtgttcccattcgctacatctcttgagagaaagtcagccatttcagcagttctgtggaaagagtttggtgaagcaagtcttcttcatggcgaccttcagctccttgttcctgaggctgaagatgatggggctgaggaagggtgtgaggaccgtgtaggtgatgcccatcaaggtgtctccttccggagactggggacctttgggcttcaggtaaatgacggaggcaaagccatagtgcacgaccaccacagtgaggtgagaggcacaggtggagaaggccttgttccgaccttcagcagaagggatcttcaagatggcggccacgatgaaggcataggagaggaggatgaggagaaaacagcccagcagggccgtgatacacaccaagcccacgcctttggccaccaccagcacatcatctccacaggccaacttcaacagaggtggcacgtggcagaagaaatggtggatctccttgtgtccacagaaggcgaggtggaaaatggccgaggtcaccaccatccccatgaccaagccaccagcccaggagcagcccacccggcaggtgcagccccgcaggctcatgagcacgttgtaacgcagggggtggcagatggccacgtagcggtcgtagcccatgacagtgagcaggaaggagtgggtgaagccgaagctgaaggagaagaacatctgactggcacaggccaggaaggcgatggagcgctgggtggacagcaggtcggccagcatgcgcgggatgatggccacggtgtagaggatctcggtgatggagagggcacacaggaagaggtacatgggcatgtggaggctgcgctcgctccagacagtggccatgatgagcaggttgcccagcagcgtgaacaggtacatcagcaggaacagcaggaagagcatcagctggaggtgggggaaggcagagaagccaacgaggatgaattcagacacggaggtgtggtttagcccctgcatggcggccacccctagttggtggagagaggaaagaagacccagtggttaggagcacaggggtgtctagtgactcccacctgggaggacatctgagagcgccttcttcatctgtccaagccatggttactccatgtgcaaaaatatgttatttatttttagttttagtttttgagatggggtctcgctctgtcacccaggctggagtgcagtggtgtgatctcagctcactgcaacctctgcctcctgggttcaagtgattctcctgcctcagcctccagagtagctgggattacaggcatgtgctaccacgccagctgatttttgtatttttagtagagatgggtttcagcatgttggccaggctggtctcgaactcctgacctcaggtgatccaccttcctcagccttccaaagtgttgggattacagtcttgagccaccacgcctggccaaaaatatgttaataataatgtgctgaagtttagcctgggaatgatggctcacacctgtcatctcagcactttgggaggcggaggcagaggggggtcacctgaggccaggagtttgagaccaccctgagtaacatagtgaaactccatctctacaaaataaaaatttaaaaaaaaattagccaggcatggtggtgcatgcctgtggtcccagctacgtcagaggctgaagcagaaggatcacttgagcccaggagcttgagaccagtctgggcaaaatagcaagacccccatgtctacgaagtataagaaaatgtgccacacattgtggtgcatgtctgtggtcctggctagttgagaggctgaggtgggaggatcgattgagcctgggaggtcaaggctgcagtgagctatgactgagccactgcacttcagcctgggtgatagagcgagatgctatctcataaaacaaaaacaaaaacaaaaacaaactgtgtaaaggtttaaataagatcatgcatcttacttgctttgcacaagtcttggcccgtagtaagaacctcacaaatagtaatactgataaaaataataattattattcctatttttaaatctcggtggtctctattcagccacacctgggttggatccccacttcagagctaggggaccgtgggttggtcccttgattgttgtgagccttagttttctcatccctaaaagaaatggataataatcccaaattgacagggttgttatgaggatttaataagattatgctcataatgtacctgccacagggcctggaataaacacttaagaatttaaggttaagggccgggcacagtagctcactcctgtaatcccagcactttgggaggccgaggtgggtggatcacttgaggtcaggagttcaaaaccagcctggccaacatggtgaaaccccgtccctactaaaagcacaaaaattacctgggcatggtgacatgcacctgtaatcccagctacctgagaggctgaggtgggagaattgcttgagccaaggagagagaggttgcagtgacctgagatcacgccactgcactccagcctgggcgacacagtgagaccctgtctcaaaaataaacaaacaaacaaagaatttaagattgagggccggcatggatggtcagactaaagttctcttaatttgtagcaagtgctaataaaagaaagacccaggttttctgagcattctgaaataaaattggaaattactaagatgaggacccttaaaactacctatatatttagaacataaatatcaggttgagttacgtgatattgccacagtaacatatcacataataatctttagaataaaaggaaaattaaaaaatgcgaataaaaaaatgataatgaaaaatagaaataacaactaaatgaaatgaattgtgccctagaacataaagagggaattagctgacaaactggcaaaattccagtaagatctgcagcactggtgggtgaatatggctaattgtaacttattgcatattttcaaaaaagctaa

SEQ ID NO: 1560805 - DNA, 4001 bp, Homo sapiens
ctatctctatctatccatccatctatctatcatctatctgttgatcgattgatcaatcgatcgactgacctacctacctatctcatctatctatctatctatctatctatctatcatctatctacttatatgatctatctatcaatcaatcatctatctgtctgtcaatagatagatctatcgatcggttgacctacctacctacctacctatctatcctatctatctatgtatctatctgtatatctatctatctatctatctatctatctatctatctatctatctatctacatatcttatctatccaccctatctacctatcttatcttatcctctctatctatctgtctgtctatctatctatctatctatctatctatctatctatctatctatctacctatgagtgacagatcttgctcagtttcccaaactgctgaagtgcagtggtgcagtcatagctcactgcaaccttgaactcctgggctcaaatgatctgcctgcctcagcctcctgattagctgagactacaggcgtataccaccatgtcttgctaaagtgattttgtgtgtgtgtgtggagatagggtctctgtatgttgcccaggctggtctcaaactcctggcctcaagtgatccttccaccttggcctcccaaaatgctgggatcacaggcttgagcttccacacctggcctttgtcaatactaaaatgagtgtagctacgtctcttgttttcaactactcttattcacatagcaatcctaaaaggctgatcctccaggagggctaatttcaggccagtttgatccttgctattctgatctttttggggaagataaatcctggggaaaatgcacacctttcctttgggtgctcatacactttgttcatctctttatgacacatttatcacgttgtactggaaggatttattccatgtctctgttcccagctagactctgaactcctccagggtaggggatgggatgcatctctgtgtccctagcagccaacagtgatcctggaacatgataaacatccaataactgttctggcctaggacaggggacggccactttgccgatgagcttccccagggctgccttcatatccttgttccgtatgctgtagataaaggggttgagcatggggatgaacaccccacacattagggcggctgccttgtccttctgggaggagctgggggatgtgggctgtaagtacacagcaaagatggtcccataggacagtgacaccacagtgaggtgtaagccacaggtggagaaggctttccacttgccccgagtagaagggatcttaaagactgtccagaaaatgcggatgtacgagagaaggatgcaggagaatgggctggtgcccacgacaatgccaaaagcaaagatcaccagctcgttggtgtgcgtgtctgagccggagagcttcagcaggggcatgaggtcacagaagaagtgggagatttcagagccggcgcagaaggtcagttgagccatgaggcaggtgtgtatgagagactggaggttggtgatcatccatgatgctcccagcagcagcccacagacaggggagcacatgagaaccaagtaacgctgtgggtggacaatggccacgaagcggtcgatggccattactgccaggagaaagctgtccatggtcccgaacaggtggaaggcatacatctgggtgaggcagcccacaaaggggatggctctgctctgagcctggatgttcgctagcatcttggggacggtggtggaggataatagggtgtcaacgagtgagaggttgaagagaaagaagtacatgggtgtgtggaggtgagagtccgtgatgatggccaggataatgagggcatttccaatgatggtgaccaggtatgtggagaggaacattgtgaagaggagggtctgatgctctggcttttctgagagtccctggaggaagaattctgagatttcggtttgcttttctggttccatgtatggtctgtgactagtgggaacaaaaagggagaaaaaccacacagagccaggtgtcagagatgccattctggtcccagcttcccacggaaacctatactgttctgtgaaaattccatcaaatccatcaaattcctttgtgttcagttaacctcaagccatcttcagtgggcttctgttgctcctcaagccaagtcattcatgcctgagacagtcagggtctcaaggatctaacggagtcgctcatagtcaacttggatgttctctataaacacttttgcttccttcagtggagcaaagcttcatagaaaacaaaaccaagtggcccgcgcctgtaatcccagcactttggaaggctgaggcgggcagattgcttgaggtcaggagttcgagaccagcctggccaacatggtgaatccccgtctctactaaaaatacaaaaaaattaatcaggcgtggtggtgggcgcctgcaatcccagctactctagaggctgaggcaggtgaatagcttgaacccgggaggcaaagtttgcagcgagcagagattgtgccacggctctctagcctgggctatagagcaagattctgtctcaaacaaaaaacaaaaaacaaaaataaaaaaagaaaatcaagcagaatcaaacctcaacaaaaactctatacagtaaagggaacctgaccatcttctgtttttccttctcttcctttcctgtgttctctccctgttttctttttcctttttctttttttgagacagagtcttgctctgtcacccaggctggagttcagtggcacgatctcagctcactacaacctctgcctcctgggttcaagtgattctcgtgcctcagcctcccaagtagcggggattacaggcacgcaccaccatgactggctaatttttgtatttttagtatagacgggctttcaccatgttggccaggctggtctcaactcctgacctcaagtgatctacccgccttggactcccaaggtgctgggattacaggcatgaggcaccgcgcctggccatctccctcttttctttcctcccccctcaaccctccttccccttcatccttccaccaacaatatgtaatctttaacatcagttttgtgttaaaaaccgatgaatggataaagaaaatgtggtaggaatatacaatggaatactatttattcagccatggaaaaaagaggaaattctatcatttgcaaccatatagatgaaactgaaggacattctgttacataaaatagccaggtacagaaagacagataccacatggtctcacttatatgtggaatttaaaatggccaatctcatagaagcagagtagaatggtggttaccaggggctgggggcgggaggtgggtgttagggagatattgatcaaagaatacaaaatttcaattagatgggaggcataattcaagagatctattgtacagcatagtgactatagttaataacaatgcattgtataccagagaaactcagagtcaattttatgttctcaccaccaagaaatgataggtacagatgttctgaggctgataatggggtcatacattgaaaatgtcataagtcagacctggcgtggtggctcattcttataatcccagcactttgggaggccgaggcagggggatcacctgaggtcaggagtttgagaggtcagcctggccaacaaggtgaagccccgtctctactgaaaatacaaaattagctaggcgttgtggtgcatgcctgtaatcccagctacttgggaggctgaggcaggagaatcgcttgaacctgggaggcagaagttgcagtgggctgagattgagccactgtactccagccttggcaacaagagcgaaactctgtctcaaaaaaaaaaatatatatatatatatatatatatatatatatatatatatatatataagtcaaaaatgcattgaacatacctaacctaccaaacatcacagcttagcctagcccaccttcaa

SEQ ID NO: 1560806 - DNA, 4001 bp, Homo sapiens
ggctaaataagtgaagtggattgtctcatggttctgagggtcagaagcccaagatcgacgtgccgttgggattggtttttggtgaagtctttcttccgtggcagatagaccccctttcgctgtgtcctcaaatggcctttccagccaggcttggtggctcacgcctgtaatcccagcactttgggaggccaaggtgggtggatcatttgaggtcaggaggtcgagaacagcctggcccacatggtaaaaccctgtctccaccaaaaatacaaaaattagccgggtatggtgatgggtgcctgtagttccagctagtctggagggtgaggcaggaggatcacttgaacccagaggcggaggttgcagtgagcagagatcatgccattgcactccagcctgggtgacagaatgagactctgtctcaaaaacaaaaaagaaaacaaaaagaaaaacagttaccagaccatcctgagacttcccgtgaaacttctgcggctgggtagtatggcaaaaccctgtctgtacaaaagatacaaaaattagctgagcatggtggtatgtgcctatggtcctagctactcggaaggctgaggtgggaggattgcttcagccagggaggtcaaggctgcaatgagccgtgatcatgccactgcactccagcctgggcaacagaacgagactctgtctcaaaaaacaaaaacaaacaaaaaattcaaagtgaggctcggcgtggtagctcacacctgtaatcctaggatgttaggaggctgagggggaagtactgcttgagcccaggagttccagaccagcctggccaaattagtgagaccctgtctctagtaaaacaatgcacacagagagagaagtttgaagctgcagtgatctatgatcacgccactgcactccagcacgggcaacatagtgagaccccatctctaaataataataataataataaaattcaaagtgcctactcttcaactcatgcaattccagatgttagcccaagactcccagatgtatatattctaccccccagaagttcctgagtcctggtggtcaggaagatgaggtgatctttctgttgaccagcttcctgagagcccctttcaggtctctgttcctcaagctgtagatgaagggattcagcatgggggtgactgctgtgtacatcaccgcagaagctttctccttcacagtggtgaggaccgaggagggacacagatagacgccaatggtggtcccatagaagagagcaaccacagacaggtgggagctgcaggtggagaaggctttcttcctgccgcctgcagaggggaccttcatgatggccacaaggatgcgagcataggaggccaggatgcagacaaagggcgtggctatcaccatccctgccacaatgaggatgaagatcctattcacagaggtgtccgtgcacgaaagtcggaggatgggagtgaggtcgcagaagtagtgaggcacctcatggctgccgcagaaaacgagacgggccatcaggaggatgtgagtgagtgagatgaagcaggaaaacgcccagagggcgccgaccagcaggcgacagaggcgtaggctcatgatcttggcgtagtgcaatgggtggcagatggccacgaaccggtcataagccatcatggcgattatgacgctgtccacgatgccaaagaaatggaagaagtacatctggatcaggcagcagggataagagatggccttgctcccggtttgaaggctcaccagcatcttagggatggtgttggtggccagacagaaatcaaccagggacaggttggccaggaagaagtacatgggggtgtggaggtgggagtctatgctgatggccaggatgatgagcaggttccccacgaccatgaccaggtacatgcagaagaacagggaaaagagaagcgtctcctgctctggcttttctgagagtcccaggaggatgaattgagatgcactggtttggtttcttggttccatgggtgtgattcctctggaagtatggaaaggggaggttataggaatgacagggagatggttttggaaagttagatgcgatcacatcccagttctcatttgggctaattatgagaccagatgtgtatatatatatatgtgtgtgtgtgtgtgtgtgtgtgtgtgtgtatatatagaatatatatgtgtgtgtgtatatatatatatatagagagagagagagagagaatatatgtaaatatattccacacatgtacggtgttgtaactttagagaccctgtctctaaaatagaaatattatatatattattacatattatgtatatatacatatatatatatttttgagacagagtcttgctttgtcacccaggttggagtacagtcgtgcaatctctgctcactgcaacctctgcctcctgggttcaagtgattctcctgcctcagcctcatgagtagctgggactacaggtgcccaccaccacgtccggctaattttttgtacttttagtagaaatggggtttcaccatattggccaggctggtctcgaactcctgacctcgtgatccgcccacctcggcctcccaaagtgctgggattacaggcgtgagccaccacgccaggctaaagatattattttttagagacagggtcttgctgtgtcacccaggagggagtgcagtggtgcaatcatagttcattgcaaccttgaactcctgggctcaagccagcctcctgccacagcctctctagtagcggggtctacaggcacacaccataagtaagcctggcttatttatcttttcttgtgtgtggtggagacaggatcttgctatgttgtccaggctggtcttgaattcctgagcttgagtgatcctcccatctaggccttccaaagtgctacaattgcaggtgtgagctaccgcacttggcctgacaacagcttatatataggttgcactttaaaccatggatgaagtatttatagcaactcttcttcttttttgattaattaaaaaatgttagggccaggcacgatgggtcccatctgtaatcacagcactttgggagggcgaggtgggcagagagcttgaatgcaggtgttcaagagcagcctgagcaacatggcaaaaccccttctctaccaaaaaaaaaaaaaaaaaaaaaaaaaaagccaggcatgatggtggacacctatagttccaagtactcgggaggctgaggtgggaagattgcttgacccttggagcagaggttgcagtgagccaagatcacaccacggtactccagcctggtgacagagcaagactacatctcaataacaacaacaataataatagggttatacaaagcattctttccctcttttctttcttcctgacatggcaaactcaacatataaaaaaataaagtctattttctcccggagccactatgtccatgaatggaatcaccatccttccagatacctgtgtttgaaattttcagtcttcctcctttctacctccaccgtcaaaggcaatccatcaatgagtgttacatcctctacaagtcgaacttccttcctttgtttttttttttccttttgagacggggtcttgctctgttgcctaggctggagtgcagtggcacgatcttggctcactgtaatctctgcttcccaggctcaagcaattctcctgcctcaccctcccaagtagctgggattacaggagcacgccaccatgcccagctcacttttgtatttttagtagaaatggggtttaacccagctgagtatctggacactaaaataaaatagcaacgtgctccttagttcacatccaacagctttattcttagcatgtgtggcaattcttgattaattggaattaaaataaacaatagcacctgtggtgcaaatactatttaaaaaaaaaaaaagaaatggggtttaaccttgttggccaggctggtctcgaacgcctgacatcaggtgatccgcccacacttggcctccca

SEQ ID NO: 1560807 - DNA, 4001 bp, Homo sapiens
tcacacctgtaatcccaggactttgggaggccaagaagggcagattacttgaagtcaggagtttgaggccagcctggtcaacatggtgaaaccccatccatactaaaaatacaaaaattagttaggcatggtggcgcacgcttgtaatcccagctacttgagaggttgaggtgggaagattgcttgaacccgggaggtggaagttgcagtgagccgagactgtaccactgcactccagcctagatgacagaatgagactccatctcaaaaaaaatgggggggggggtacattgttacagaaataatatactgtctgagcacaatggctcacatctgtaatcccagcactttgggaggccgagatgggaggattgcttgagtccaggaattcaatacgagcctgggcaacatcatgagaccccatctctacaaaaaatgaacaaaattagctgggcgtggtggcacatgcctgtagtcccagatactcaagaggctgaggcaggaggaccccttgagcctaggagttctagtctgcggtgagctatgaccatgtcacagcattccagcctgggcgacagagtgagaccccgttacaaaaagaaaaaaaagagagagaaaaaaaatatgctgaatgtgattgggatgattaccattgctttccacaagtccatgagggaaaacatgaacccagctagtcatcagcagggaggaactcggcgtgagcagggaggaactgggcagacacttagccttggacataagcacttagcagctgaattttacacttcaaagtggctcattttatgttacgtgtattctacctcaatttaaaaggcagacattttctcaaaaagttgcaccttgggcaatggctggatatttggccagttgcacaaattggcaattgaatgccaaatgcatactttgggaaggtgggtgggatcgaggaccgctggaatctcaccagcagtttctatgtagtcagcacatttgcctgagtccagctctgctaagcactttgaccaaagccatccacacctccggattcctcagactgtagataagggggttgagtgtaggggtgacaaggctatagaagagggaaaccacgttatcctgctgtggactgtggtaggcgcaaggcaccatgtacatgaacacggcggcaccataaaagagccccactaccgtgatgtgcgaggagcaggtggtgacagccttgtgtctggcctcctctgagcgcatgcttagaacagcctgcaacacgtggccgtaggaggtggcgatgagggaaagagggagcattaggatcagcacccctgaggtggacagcgccatctcgtaggcacaggtatctgcacaggagagcttcagtagggctggcacctcacagaagaagtgatccacaatacgggaggcacagtagggaaaatgcagggtgatggaggtctggatggaggcgttgagcacacctaccacccaggaggagcccatcatcagcagacatacctggcgtctcataagtacaggatactgcaggggctggcacacagcaacataacggtcataagacatgaggaccaacaggacgccctcagccacacccatcagtgtgaggaagaatatttgagctgcaccacctccataggaggtggcaccttctccccgcagaaagtctgatgccatcttggggatggtgaccatgggacagccaatgtcaaacagggagagctggctgagcaggaagtacatgggtgtgtggagccgggagtccacacggatcaagaagagaagaacggtgttgcccagaaggcctatgacaaacatgacagccaccagggagaagaggagctggcgtgatcctgagtgactgaagaggcccaccagaatgaagtctgaggccaccgactgattcacatcccccatgttttacacaatgcactttagctgcaggaagaacagctgaactatggcaagaagcctgcatggggtggcaaataattttcatctcacatgccaatcatcattgattggtagtggcttcctgggatggtgtcttgagaagagtaatgaggctgcagctagaatcagtaggctggagggagaaaacttaatcagttagtgtctatccaaggcatgggatgggaaagaagcagctggcatctctgaatgagacgcttggccacactccaatgaagagctacccactgctccctatagtgaaaaatttgaggttcggctggacgtggtgcctcacgcctgtaatcccagcactttgggaggccgagacaggtggatcacgaggtcaggagttcgagaccagcctgaccaatatggtgaaacctcgtctctactaaaagtacaaaaatcagctgggtgtggtggcactcgcctgtaatcccagctacttaggaggctgacacaggagaattgcttgaacccgggtggtggaggttgcagtgagccgagatcatgccactgcactccagcctgggcaacagagcgagactccatctcaaaaaaaaaaatgcggttcaagttaaagacagccacatagatggtggaatgcttcaatacccctcatcccaggggtccttaaccaaagctgaggtcagataccaaaagggctgggaggtgaaacgggatgatgaaactgaagcaacaagctaagtaagaaaacagagagaagggcttgcttgggtctaaatgcgtggatgagaatctgaagcaaagagaaatctgtgatgagccagcactggaatcaaattgagggaatgcccaaggaaaataaatcattctaccaaatgagcatgtttatcacagcactattcacaataacaaagaaattgaatcaaccggggtgcctatcagtggtggactggatttttttaaatgtagtatatagacaccatggattgctatgcagccataaaaaagaatacaattggctgggcacagtggctcatgcctgtaatcctagcaccttaagaagccaagacaggaggatcacttcagcccaggagttcaagaccagcctgggtgacatgacaagaccccatcttggagcccggggatggtggctcatggctataatcccagcactttgagaggccgaggcgggtggatcacctgaggtcaggagttcgagaccagcctgaccaacatggagaaaccccatctctactaaaaatacaaaattagctgagcgtggtggcatatgcctgtaatcccatctattcgggaggctgaggcagaagaatcgcttgaacccaggaggcggaggttgcagtgagccgagatcgcaccattgcactctggcctgggcaacaagagcaaaactccgtcaaaaaaaaaaaaaccatctctacaaaaaatttaaagttcgacttggtggtgactgcctgtagtctcagctactggggaggctacggcaggaggatcacttgagcctgggaggtcgaggctgcagtgagctatgatcacatcactgcactccagcctgggccaccgagcaagaccttgtcttagaaaaaaaaaaaaaaacctgttcattgcagtgacatggacgcaactggagcccattatcctaagtgaattaaggcagaaacaaaaccaaataccacatgttctcacttatcagtggaagctaatcactgggtacgcaggaatataaataggggaacagcagacactggggacttcagagggaagcaagggttaaaaaactacctattgggcccttttcacaagatggcgccgaaagcaaataaggaagctcctgcccctcctaaagccgaagccaaagtgaaggctttaaaggccaagaaggcagtgttgaaaggtgtccacagccactaaaaaaaagatcccacatgtcacccaccttccagcagcccaagacactgtgactccggaggcagcccaaatatcctcgaaagagcacccccaggagaaacaagcttggccactctgcaatcatcacgttgccgctgaccactgag

SEQ ID NO: 1560808 - DNA, 4001 bp, Homo sapiens
acaaatatacacacttccactcacaagtacagtatcccaaatgagcatctgttaagattgggatgtgtcatatttcacaagaatgttgggaaaaagtaaagtttgaaacttttggctttgttaatatataggattttaatagtatctaatgtttattcatgcttaatatgtctcgaagtgggctatttgatttatatctattttgtcattttccttcataataaccgtgcataataggtataatctcctgtttataaatgtagaaactaaagctcatgaaagctacgtaatgtgcccaaaatcatgattaataagagtcagtagagttgaatccagctctttgttttttactttaaagcctgtggttttaaacattaaccatggaaaatgacatagatggatccaagtaatatactttgtgccaacgtgatgagagcctggatccctctaaattctttctactgcttatgagcagttataccacagatgtctaggacctagaaggcacatttcacattggcaaacttactcttccactcactcctgataatgccctcatggattctgggttgttatagtggtgggaggtgaagtataaacttataatgggaggcgtttgtttttcaacctcttaaaagttgacatatatctccttaccactaagcatatattttttaaattaagatgtgacagttctttttttatgtttttcacaaaatggaccaaataaatttttttttaaatttataagctaggctatattttctctcctttcttctactaaacttagggtcacacaggaaggaacagatgtacacaaatactaatatatttatgcctttctttgttctaagaattagcaaaagaatattttgaaagcataataactttgtatctgtattccaaaatataacacacaagttgttgaaagataaattgaggcaatgtatgtggaagttcctagacaattaataaattatatgggaatggagggcacaattttcatgagctttactaaataacttaccaacttcactatattttgtgtcattatctgagattaatctcacagttatataagatctaaaactttacactagaatgtgcatcccattttctcagctgtcttattgccgtcttcatgtctttgttcctcagtgtgtatataattgggttcaagagaggggtgatcacagaataaaatacagcaaggaatttatctaatgacttgatggggaatggccaggcataaataaagacacatggtccaaagaacaaaagaactactgtaatgtgagcagtcaaagtggacagagctttggacgacttatctaaagggcgatgctggatggtcattaggatgatagtgtatgagatgattagaagaacaaaagaacacacagtgagcacaccactgttagcaatgaccataatatctagcctgtaggtatctgtacaggcaagtttgattaccctaggaaggtcacaataaaaactatcgacctcattgggaccacagaagggtaagtgcacggcaaaggccaactggctcaccgaatggagaaagccaattccccatgcgacagccataatgccgacacatgcgttgccacacataattgtagtgtagtgtaggggtttgcatattgctatatatctgtcaaagcccatggctatgaggatcaccatctcactcccaccaaagaagtgaaggagaaatatctgaacaaggcagcccttgaaagagatgactttgcgctggctgaaaaagtcagtaatcatcttgggggctgtgactgaagacagagacagatcaatgagtgagaggttggctagcaggaagtacatgggagagtgaaggtgggagtcagataccactgttatgacaataagaaggtttccaaacacgattcctccatagaatacaaaaaacaacataaataggaaggtctggagtccctgagaatcagagagacccagaaaaatgaattcagtcaccatagagttattcgtttcactcgttgattcattccaggaaatagcctctgcagttaccttgaagaagagaaggagaaggaagtcagaattattatattcaaattcaaagcctcattttatatcattctgctcactcttacagtgactttctataatctattacttaaagacattcagaattcaacaagatcataattttatctcgcactacttccctggctatgccttataattcagttatctcggcttctcagtgtctccattaatgttaggtttattcctaatataaaataccattatttatgcttgtctctctgccagattaagtctatgccataactctatgtttatctcctttttctttgaactacaaaacagtttgtagcacacatgttatttggtgatattaaagttcttaagagaaaaaaataggccaaaatgaaatgaaagataaaaaatagaaaaaaagaaaaaataatatcacaaatataatacttaaaaattaacagaggataaaagaatagggaattcaaaagtgaagtgagaaaaagtgaggaaaatgcaataaagtttaaatgagagaaagtgtgaaggactttcataggagataaaactggtaagagattttggaatgctttctaaagcatttctgttttattatagagacaagaactactgaaaaattttgaatgattgtttaatttagctctggactcaatgtgaattggaagggagggagcttggaaatgaagccaagtaattattttaagcctaacagtaggtaataactgcaggttgtggttgtgtgagcaggaaaggggtgaatgaagacctgtaagatcccatcgagcaacgtattaaagtagttaagatatgagcttgtgtgctaggaggcctgtgttcaaatcctgggttatctactatgtatctgaatgaccttagacaagtcacctaagtgatttcagtcttacggccacatctggaaaatataggtgataatagcacaactttatagaagttctgtgaggattggatacgaccaggtatataaattttctagcaaatagtaatggtcaatatataatagccattattaaggtactgataacaaaatattttttggcaagatgtggaaaataaaaaaaatgttattccaatgtctttaagtaattgggaacattgtgatggctttaactctgataataattataacaagcactagtataacaatactttacatagagatcccttttaggagcagaaataaatacagaaaaaggtaaaggataatgatgactgtctagacacaaggaggtattgttggggcatctttgtaagttgctatctgccaggtgagagactgaacactgacttctgggcatgagttgagagccatttcaattgtgtatggaggagagaaaataagtactgtttcaagaagttttgcagtgaagagaagtaacaaataaaaggtgtcctgaaagtgaggcatagccatattaacaatctttggattaggtataagagttaatgggcaagtaagatgtaaaagagagaagtggaaattgatcactaacattccacgggagacatgaaggtatagagtttacacttgccatcttttttggaggaatactgttatttgatttttgctgttttttaaagaacagtaattcatagtgcttggaaattccacttttctctttactactctgaatcccatttcttagtcctacacactcaaagcagcacattactgtttttaaagtcctataaaaatttagtgatcttaaatatttttaagaataaagagaagtctaatagtggaataaatcatgaacattcacttcagttctcttctgcttagcactgtaataaatataatcatactaatcattgacagtacaaatgataggatttttattgtgagataatttctgtcctgactggttggttggactgtttcttttgaatcaaagtgtgcaatttagaatagaccttaa

SEQ ID NO: 1560809 - DNA, 4001 bp, Homo sapiens
ttcacatgctaatccaccaggttacttttgagtaacgctgagtccagaaaagcctccaaaaatgtctagttgatggattactctttttatagaaatacgtgttcactgtaatttttgcctttcctccaaaacaacccttggtgttcttccatacatcataggctgcgatgcctgtagctgcttacacattccttccagagcacatataatgtttcctccaagatataagccccaggtctggggtggtggaggtgtggagatccacttttcctgcggccacctaagaccatgcttctgtctgtaagtttacctggtaaattaccctacccaacaaactggcttgtctgccttgtcctttgacttctcagatccttctgcacttgggaactgctttgcatatatagtcctttcatggaataacacatatgtttttgaaggaaagaactgtgaccttcaatcacaagtctctattcccagaggcaacactgggtagaaattcgagctcttgtgtgagtcatcctttgatcatgagagttgaagagtgtttagagtataaaagagacaaaacaactgaagataaagtaaatacatatattgttcacttgtcaacactttgatgcttatgacatttttaaggaagagatgttaggacaatggaaggagtcatatttgtaggcagcactggaaaacattaggcagaagtagcagagtgatgcaaggacattacatacaccatggcactcaatccttcactcagatgaacaaacctagtgacgcgtggacaccaggctcctctacttcaatgagtagatgtaccccaacgaaaacaaatattccatagttatttcatgtatgattgaaaattatattccgtcatatttaaggtcatctctgactctaagaagaacagtgtaagctctataaagtagttgaggaacaaagaagtttaaactccaggaaataaatggaaggggcaagtcttccttccaccatcttattaacaaatcaccatttctggctctggggcttagagctctgaagtcacaggcctttcttgaaaaatagcctttctattgctttcctctgaagaatgttttcatagcaccctttatgtgtttattcctcagactgtagatgaaggggttcagcatgggggtgaccacagtgtacatcactgaggctgcagcacctgtgtgtgaattgtgggtggcagcagaactaaggtacacccctaagcatgtaccataaaataaggagacaactgagaggtgagatgcacaggtggaaaatgccttatacttcccctgagctgatgagattgcacgtatggaggaaactatcttagagtaagagtacaggatcccagtgaggggaccaccgcccagcagcgctactgcaaaatacatcactatgtcattaagaaaggtgtcagaacaggcaaggtggaccacctgattaatttcacagaaaaaatgagggatttccatgtgtgtacaaaagggcagtggcaacaccattaagctttgtaacatggaattcagaacactcatgatccaggatgccagaaccagcagtccacagagttgagggttcataatgaccatgtagtgcagagggtgacagatggccacaaaccggtcataggccatcacggtcagaaggaagttatccaatcctacaaagagtaagaaaaagcacatctgggtgatgcagcctgcataggtgatgactttgttgtgtgtctggatgttcaccagcatcttcgggacagtggtagagacaaaacagatgtctacgaaggacaggttggagaggaagaagtacatgggggtgtggaggtgggagtctgagattgtggccaggatgatgagcaggttcccgagcacagtgaccaggtacatggacaggaacagcccaaagaggaaggcctgcaattctggttcctctgaaattcccaggagaagaaattctaaaattattgtattgttccatgatttcatcttgtgatgtgactaccagagagagagagagagagagagagagagtgaaagaacatgaaacaaacatgcattccaaaactatcagaaatgttatcatttatattccacagtcaagaagttaatatctttttcttaaaaaattatttttaagttgacagataaaattatatgtatttatcacatataacatgatgtgtttttaaaagttttatttagtttcagggttacatatgcaggtttgtaaaacaggtaacatgtcatgggggtttagtgtataggttatttcaatacccagtaataaccatagtacgtaataggtgttcgatccttactctcctcccaccttccaccctcaaataggtcccagtatctattctcttgttttcttttttgagatggagtctcgctctgtcacccaagctggagtgcagtggtgcagtcttaactcattgcaacctctgtctctttgttcaagcgaatcttgtgcctcaacttcccgagtagctgggattacaggtaggcaccaccacgcccatctaatttttgtatttttagtagagacagagttttgccatgttggctaggctggtcttgaactcctgacctcaggtgatccgcctgcctcagcctcccaaagtgctgggattacaggcatgagccatgtacctggactattctcttctttgtgttcacgtgcactcaatgtttagctcccaattattagtaagaacatatggtatttggtttcttgttcctgcattagtttgcttagaataatggcttttagctacacccatgttgctgcgaaggacattatcttgttctttattatggcttcgtaatattccatggtatatatgtaccatattttctttatccagtctaccgttgatgggcgtctaggttgattctatgtctttgtaattgtgaatagtgctgtgatgaatataagtgtggatgtgtccttatggtagaacaatttatatttctttgggtatatacctagtaatgggattggtaggtcaaatggttgttctgttttaaattctttgagaaattgccaagggtctaatatcagaatctataagaaacttaaacaaattaacaagcaaaaaacaaacaaccccattaaaatgtgggcaaaggacacgagcagacacttcaggaaaagacatacatgcggccaacaagcatattaaaaaatgctcaacgtccctaatcattacataaatgcaaattaaaaccacagtgagataccatcttacactagtcagaatggctataattgaaaagtcaaaaaatagcacacactgctgaggttgtggagaaaagggaaaacttatacactgctggtgggaatgtaattagttcagcccctgtggaaagcagtttggtgatttctcaaaggacttaaaacatgatgtgttgaagtacaaatacattgtggaatggcaaaatctagctaattagcatctacatgacgtcaccttgtcatcatttttgtgaggagaacacttgacattcacccttttagtgtcttttgagaatacagtgtatcacggtgaactgttgtcactatgctgtgcagcacatcttttgaagttattcctcctgtctaactggaattttgtgtctattggccaacatctttctaactttccccactccacttcccccagcctccattctacaagaagttaatttctatattgtttgtgaatctggtccccgttaggagatccccttgccatctctgaattccttcccactctcagcctttctctgagggcatctactctacaagtttagggagaaaaatctttcatgcatttggggaatatcaagtgaatttcgacatgttccagatgctgtctagacagtgagtaagtggtgctataaaacagaagtccttgtgttagtttgctgagaatggaacagaaaaccaaacaccacatgttctcacttataagtgggagtcgaacaatgagaacacatggacac

SEQ ID NO: 1560810 - DNA, 4001 bp, Homo sapiens
ggttcaaaccattctcctgcctcagtctcctgcgtagctgggattacaggcatgcgccaccacgcccagctaattttgtatttttggtagagacggggtttctccctgttggtcagcctggtctccaactccctacctcaggtgatccgcccgccttggcctcccaaagtgctgggattacaggcctgagccaccgtgcctgcacttgataggaaatttttaccttcttactctttccagggaattgagcaggcacggtggacactgaactgaatagaggacaggaccctaatgagtaggataaaatgccatgatgacagcactttggggggccgaggcaggcggatcccctgagggtaggagttcgagaccagcctggccaacatggtgaaaccccttccctactaaaaatacaaaaattagccgggcatggtggtacatgcctgtaatcccagctccttgggaggctgaggcaggagaattgcttgaacccaggaggcagaggttgcagtgagctgagatgatgccactgcacttcagcctgggtgacagagcgagactccatctaaaaaaataaatgccatgatgagctaaaatgcacactcgtgtggggtaaagtttacatgaccaggaagaacacttaaggtggtggtggagaaaggaataagctcaaagtgaaaaactgtcttctcagatatttatctaaaataaaattatattaatgaccttatggctgccaggtgcaattgattctgcaggactaatgcaacccacaagtgtaggagaaaaataggaatctccaccttgtttctgaccctagtttgggaaaaacattgggaaagtaggaaaatgacaaaaaaaaaaaaaaaaaaaagattggatatcagagagcggaaagctttataaaggaatacattaaattctatgtcagttgagatcaaagaaattgaaactctgagaaaaaatagaaggagcaaattccactttcacaacctgattcgtgaatcacaatttctgagtatgagacttaaagctctgaaatcacagttatttcttgaaaaatggcccttttattgctttcctctgaaggacattttcagagccctctttatgtctttattcctcagactgtagataaaggggttcagcatgggggtggccacagtgtacatcactgaggctgttgcacttgtgtgtgagttgtgggttgcagcagaagtaaggtacacacctaggcccgtacaacaaaataaagagacaactgagaggtgtgatgcacaggtggaaaatgccttgtacttcccctgagctgatgagattgcacgtatggaggaaactatcttagagtaagagcaaaggatccccacaaggggaccaccagccagcagccctgctgcaaaatacatccccatgtcattaagaaaggtgtcagaacaggcaaggtggatgacctgattaagttcacagaaaaagtgggggatttccaagtctgtgcagaaggacagccacaataccattaagctttgtgacaaggaattcagggcagcaatcatccaggatgccagaaccaggagtccacagagccgagggttcatgatgactgtgtagtgcagaggatgacagatggccacaaaccgatcataggccatcacagccaggagtaagctgtctaaccctccaaaaagtacaaaaaagcacatctgggtgatgcagcctgcataggtgatgactctgctctgtgtctggatgttaatgagcatctttgggattgtagtggagatgaaacagatgtctgcaaaggacaggttggagaggaagaagtacatgggggtgtggaggtgggagtctgagattgtggccaggatgatgagcagattcccgagcacagtgaccaggtacatggacagaaacagcccaaagaggaagggctgcaattctggttcctcagaaagtcccagaagaacaaattctgaaatccctgtgtcattctctggttccatctttttttttctatttatttatttatttatttatttatttatttatttattaacatagacagggtctctcactctgttgccaacgctggtctgaacctcctggactcatgcgatcctcccacttcagcctacaaaagtgctgagattataggcataagccattgtgcccaggcttggttgcatcttttcaatgtgactaccaaaaagagagagaatatgacaatgtaattatgcattacaaacctatcagaaattctctcatttatactccggagtcaagaacttatttttcctttaaaaattatttatttctatggtgacagataaaatggtatgcatttatcatgtataacatcacatgtggaagtatatttacattgtggattggctaaatctagccaattaacattagtattacctcatatagtcatcattcttgtggcgagaacacttaacatccattttcttggcattttccaataattcaatatatcatcatgaactatattcaccatgctgtaaaataaatattttgaagttattccttctatctaattatcatcttgtatcccttgactgacatcacctcaagcctccataccaattgccctggcctctagtaatctccattctacaagaagctgttttctatgttttgtgtgtaaatctggtccctgttagaagatctccttgccatctctgattaggaattcctagaccacgctctctcgctctctctctctctctctctcagcctttccctgagggcatgtattctacagtatcattaaagagaaaaatcattcatgcatttgtggaataaaaaatgagttgatgttcagggtactgtatagataatgagtcaatggtgctataaaacagagtccctacaatcaaataacgggaacaaatacatatatactatgtcagttggtgattagtcctatgaataaaaaggataaaaagtgttacttttaataggtgtacagacaagatcagcagacaagctaaaaactgaacagagagcagaatgaagacagggcgagagtcatcatgtcccttgctggagtctgtgcaaggggaaggaaggctcagtggaagacttcacagaatgtgcttctttcagatgttcaaggtgctcaaggaagccagtgtgtcaggggaatgtacaggaagagagtgatgagagatggtttcagaagatgttgtgggatgaggtggccttgaagctgctgaaacttaaagacacaaggagtccgtctgaccagatgctgttgcatttgcattttattaatttgcctgcgaaggcatctcagtatgtgtaatgcatcccctctttttttcccgccgtgtctttgacttctggcttttctattatgagataccttttggaatacagagcccaaatcccctttctctgcaacctgcttttatgctaaaggtgcgtgcgcgcacgcacacacacacacattgcctacatgcacgcagcacactgtagctccctggagccatgttactcttgtgcttttctcaccctggttacactgttagaaagaaacgaataccaggcaagttgtcaatttcaaattatctttccccacgagaattcagaaatggtctgatagcatgtgagacagccttctcatttctcttctttaattattcatgtggcatctcttctttaattattcagggtctttgggatttgaactctttttgacagtcctatggaattgcactagttctggttctggtcttcctgtaacatgcaatgtccttcctagaccatactattgaatcctggctgggcaccgtggctcacgcctctaattccagcactttgggaggctgaggtgggtagatcaattgtggtcaggagttcgagaccagcctggcctatgtggcgaagccccgtctgtactaaaaatacaaaaattagccaggtgtggaggcaggtggctgtaatcccagctactcggggggctgaggtaggagaatcgc

SEQ ID NO: 1560811 - DNA, 4001 bp, Homo sapiens
acattatagaccatggcaccaaatccatcactccaataaataaacttatatatgggcactaagcttccatacttcaatgagtccatgcacatcataaaaacaagtcttccatagcaattcaatgtatgattgacaattttactccatcatatttaaggtcatctctgactgtaagtccatattaagttaatcaacatatgcaagtttgtctttcagtgggcattgcactcggaacatatttttgataaacaatttttgccttaccgtactatgccagggagtatggcagatactgtggacatggcactgacaaagacatgatgtcctaatgaggacaacacaatctcatgaccagctgcaaaatacacaagtatgttcaggtctacattatcaggaggagcattgaaggtagagacagacataggactgaagaatacaaaagtgaacaaattgtggtctcaggtcatattccactataaatttacatcaattaccccaattgccaagtgtagtctatgccacaggagacatacaactcttccctgtatgagacaaatggaaatctccaaagtgtttctgatccaaagtcggaaataaccttgagaaagtaggaaaacaacaaagagaaaaaactgttggatatcagagagcagaaagcttaataaaaggagttgcttaaattctacaagaccagttgaaatcacaacaaattgaaactcccagaaatataataagtattaatagaaggagcaagttctatttccactatctgattgaagaatgacagttactacctctgaagcttagagccctgcaatcatgggcacttcttgaaaaattgccctttcattgttccccacaacaaatgtattcccagagccctctttatgtctttattcctcagactatagataaaggggttcagcatgggggtgaccacagtgtacatcactgaggctgttgcacttgagtgtgagttgcgggtggcagcagaactaaggtacacccctaggattgcaccataaaataaggagacaactgagaggtgagatgcacaggtggaaaatgccttgtacttcccctgagctgatgagattgcatgtatggaagaaattatcttagagtaagagtaaaggatcccagtcaggggacctccacccagcagcgcaactgtaaaatatatcaccatgtgattaagaaagctatcagaacaagcaagttggatgacctgattaagttcacagaaaaagtgggggatttctaaggctgtgcagaaggacagccgtactaccattaagatttgtagcaaggaatacagagcactcatggtccaggatgctagaaccagcagtccacagaggtgagggttcataatgaccatgtagtgcagggggtgacagatggccacaaaccggtcataggccatcacggacaggaggaagttttcaaatccagcaaagagtatgaaaaaatacatctgcatgaggcaggctatgtaggtgatgactttgttctgtgtctggatgttcatcagcatttttggaatggtggtggaagtaacacaaatgtcagcaaaggacaggttggagaggaagaagtacatgggggtgtggaggtgggagtctgagattgtggccaggatgatgagcaggttcccgagcacagtgaccaggtacatggacaggaacagcccaaagaggaagggttgcagtccaggttcttgtgaaaatcccagaagaagaaattctgaaatttgtgtatcatttcctggttccatttgattgaagtgactatcagagagagagagagaaagagggaaacgagacaggcatgcattgctaacctttcagaaataccatcatttatattttatagccaataaattatcttacattttgtgtatgaatctggttctctttaagggatctccatgtcatctctgattaggaactccttcccactctcagccttaactgaagacagcgtacattctgcagttagaataagaacttctggctgggcacggtggcttatgcctgtaaccccagcactttgggaggtcaaagcaggcggatcacgaggtcaagaggttgagaccatcctggccaacatggtgaaaccctgtctctagtaaaaatacaaaaattagcctggtgtagtggcatgcgcctgtagtcccagctacttgggaggctgaggcaaggagaatctcttgaccccgggaggcagaagttgcagtgagctgagatcatgccactgcactccagcctggtgacagagcgagactccatctcaaaaaaaaaaaaaaaaaaaaaaaaaaaaagaatgagaacttcttctatgaatttgaggaatataaattgaatgttgaccatgttcttgtcactgtctagataatgagtgaacaatgctgagaaacaaaagtccctacaatctaatgatgaagaaagaatataaacaaattaaacaatcgaatataaacaaattaaacaatcacataatatgtcagatgggaacaggcgcttggaaaataaacaaagcaggtaaaaaggagggagggtatgaagtgtttcttttgttttttgtttgtttgtttgctgattattattcaagacctgcaaacaaggtgatgtttgaaaaaagatctcaaggaagacagggcaagattcatgaagttatctgttgaagtgggtgcctggcaggaggaatggcagtacaaaaactttgagggatgtgcttctttcttgttttcttttttgagacagagtctcgctctgttgccgggctggagcgcagtggcgcaatctcagatcactgcaacctccacctcccaggttcaagcgattctcctgcctcagcctcccgagtagctgggattacaggcatgcaccaccacgcccagctaattttgtatttttagtagagacggggtttctccatgttggtcaggctggtcttgaactcccaacctcaggtgatccgctcacctcggcctcccaaagtgctgggattataggcatgagccactgcacctggttgggacgtgcttctttcagatgttcaagtccaacacagaagccagtgtggccagggaatcagtaagacggagagtgatgggacatggtgtcagaggatgttgcagaataaggggacctggctgtcaaaacatcaagggacaaagtgtccatctgtctagatgctgttgcacctgcactttattaactggactagaaaggtgtcacatcaattgaaatgcatcccctctttatttccttctggtgtcttgggttctggcctctgtttcattggtctcctttataataaaatatattgaggccaggtccctcttgctctgaaacctgctgtcactccaaagacatgcagccacacactcactcacacacacatatacacatgcagcacactggccgaagagggcccaggcaggagtgcagtggtgtgatcatagctcactgcagcttcaaccacccaggctcaagccatcctcctgcctcagcctcccaagtagttgggaccacagccatgtgccgccacccttggctgatttctacattttttgtggagaccaggtctgcctatgttgcccaggctggtcttgaactcctggcctcaagtgaaccttccactttggcctcccaaagtgctggaattacaggcatgagctactgcatttggctcaaggaaagcttttaatatcagattcttttttccctacagaatgtagaattggtacaagaaattccagttcacaagtctgtatacacatgtaaacttggacttccattttggtatgactgttttcagccctgtgtttaaagaaacataaaagagctgttcaataaacagagtgagagaaattaaacagaccccagtaaggaaaaagtctaataaactcaggtaatccctcagcaaaaggacaaaaatacattgcaagggtgcaacgggtaggttagcaagaaaggaactgactccaaggagac

SEQ ID NO: 1560812 - DNA, 4001 bp, Homo sapiens
agggagaacatcacctgaagatgaaagcagagattggggtgatgcttctatattgtcaaggaaagccaaagactgccagcaaccggcagaagctaggggtaaggcatggaacagaatctttctcacagccttcaagtggaaccagccctgccaacaacttgatttcaggcgtcatagtctacagaaatgtgagacaatcaattgctattgtttaactcacccaatttgtggcacattgttacagatgccctagaaagttaatacaccgtcttcaaaaattgtcaaaatcaagatgaagcagcatagttgtctggggtaacacctgaggtttgttgtcccacagccatggaagaagactgggatgcggacacaccagagtgaggttaagagcagaagtttaataggtgagagaaagagaagagctctatgtgcagagaggggtcccagagaaaatgggttgccagttccatggtgaaatgcacagggttttataaactagcttgaggaggtgttgtctgatttacataggccataaaagattggttggatcaggtgtgccatttgcatagcatgtggagaagctggctgccccaccctaatcttttattatacagatgggttctttacctgggcagccccatgttgcctgttcctttgctgtacacatggttgacaaagaaaaggaagagggagcctccatgttgaacatgactggtccccagctagcccttttctattggcgcagcagccggcattcactcatgcaagcttccagcttgcttatctatgtctgcagctcgatttttcaggctgttctttgttagaaaagaaatgattttgagggctgctttttgttaacggggaaaccttgccaaggactctgtggccctccctatctacctaaataatttctttctagctcctgtatcaaagacacgataagatatggtaattccagaactaaaagagaatacattgatgtttggatacattcaagaaccaccaaaagtgcctcccaatggtccaagccttgctacttatgaaagtcctgcagtgatgtcaccattaaaaaatgttgccctactgaggagtctccccagggccctcttcatgtccgtgttcctcaggctgtagatgaaggggttcagcatgggggtgaccatggtgtacatcactgaggccaccagacttgtcctagaagatggtgtggctgcagaactgagatagaccccaaagcccgtgccatagaacaaggtgaccactgagaggtgggaaccacaggtggaaaacgctttgtgctttctcccagctgaggaaatcctcagtatagagaaaacaattttatagtaagagaaaaatattccagtgaaggaaatcacacccaggacgccagttgcaaagtatatcaccacgttattaatgaaggtgtcagaacaggcgagcttcaggacttcaagtagatcacaaaaaaagtgtggaatttccatttcggtgcagaaggacagcctcaaaacagtcaaggtctcgagcagggaacccatgacactgatgcaccaggaccccagaaccagcagtccacagagctgggggttcatgatgaccgtatagtgcagggggtgacagacggccacgaagcggtcataggccatcacggtcaagagtaaattgtccaggcatccaaatgaagtgaaaaaaaaaatctgactgagacagcctgcatatgttatgaatttgttctgtgtcagtatattcagtaacatctttgggacagtcgtggaggtaaaacagaggtcagcaaaagacaggttggagaggaagaagtacatgggggtgtggaggtgggagtctgagcatatggccaggatgatgagcaggttcccggtgaaagtgactaggtacatggagaggaacagcccaaagagaatgaactgaatctctgacgttgctgaaaatcccaggaggagaaattcttgggcatgtgtttgatttcctgtttccatggggataaaataactgccacaagagagaaaaaagcaacagtcaattatcaacacactggcaacatggaaatttggttacatttaattttaagtgaaggaatcaattaacaaaagattgcctttttcttgctgtctttttctggggcatctgaaattcttccatccttttctttgctaccatcgggatctggaaatgtagtgttagttccataatacttgtaccctctatagcctggcttctcaaagtgttgtccatgaaccaacaagatcaacaagagtttctttaaatgcagaatccctggtcagacctacggattcagaatctacattttaacaatatcaccaagggtttcacatgcatattagtgatataggagttaagaaaaaatcacttacgcagatagtaaggttatgggagtcctcagtgaggcttttctttttaatgaaaagcagccccaaatcattttctaacaaagagcatcctgtaaaggcgagctgcagacacaaacaagctgggagcttgcacgggtgaatgccggcaggaactaaggactagaagttttcaagatggtggctccatcttcccttctctttgtcagccacgagcagacaagatggcgcagatcaactggaaagtccaattgcaaagtaagattagggtggggccaccagccttccctgagcactatgaaaatgtcatacctgatggaaccaatctgtgagcctgatgtaaatcagacactgcctcctcaaaggggactattaaactctgcgcattcaccaccagcctgtcctttcctctcggagacccttttctctatggagagaggtgtttctctttttcttctcttctccctattaaacctccgcctctgaactcctcgtgtgtgtccgtgttctaaattttcctagtgcatgccaatgaaccccagggtatatactccagacaatgtagcagcttcattaatatttgagtagcaatggtcttggacacttacagcttctagttctcagctcttctcacctttgttctcctccatgtcttccctcattcctcattacctaatatgcatgcaaaacaggagctcaataactatgctttttccccctgctatctgcatggagttgatacttttcacacattgttctcagctattccaacctttgtttataaagccaatgtttcattttttcagtgcaaacatctgacatgtttacaataatttgcattgtttatgtgatcatatgttacattattttacatgttcgttttgtgagtttctgttctgtcactggaaagccagtcagacattatgctttaaaaaaatattttggtaaaatatggttaaaaaattttataggtactgcgtattaaattaatgcgattttaggatatattttgaattttaggtagagaactccaaagtaccaatacttcacagaaacatagataataccgtggcagctgtcataatcaacttgatcagtgtattagtccattctcacgctgctgtaaagaactacccgagactgggtaatttatgaagaaagtggtttagttgattcacagttctgtatgacttgggaggcctcaggaaacttacaattatggtggaaggggaagaggaagcaagcatcctttttcacatggcagcagagagagagagagcgcgcgctaaggcggtagcaccatacttttaaacaaccagatttcatgagaatcccatcacaagacagcactaggggaatggtgctaaaccattagaaactgcccctgtgatccaatcacctcccaccaggcccctccctcaaccttggggattataattcgagatgagatttgggtggggacacagagccaaaccatatcagtcaggaatctggaaaacagtcaaaggtttagagcaacaaagtgaatccttaattttttaaaaaaggtgactgaaaccaggttggacagctttgtggcaatttatcattttcccaccatctttcttggct

SEQ ID NO: 1560813 - DNA, 4001 bp, Homo sapiens
aattagccagacatggtggtgcatgcctgtagttccagctactcagaaggctgaggcaggggaattgcttcaacccgggaggtggaggttgcagtgagctgagatggcgccactgcactccagccagggcgacagagggagactgtctcaaaaacacaaacaaaaacaaaaaacaaaacaaaaaacaaaaacaaaaaacaaaatccaaatcattactaaagataacagagaaaacaccaggttgtattcatacaaagttaagattactggttagaaagtcaaaaagggtgatcctatataactttattagcagtagcaagggcaggaaacgttccaaaggaagatgcaagggaagagatgctttaatatgtataaaagaaggcagggtgcggtggctcattgcctgtaatcccagcactttgggaggccaaggcgggcagattacctgaggtcaggagttccagaccagcctgactaacatggcaaaaccccatctctactaaaaatacaaaaactagctgggcatggtggcgggtgcctgtaatcccagctactcaggaggctgaggcaggagaaccacttgaacccgggaggcggcagttgcagtgagccgagatcgcaccattgcactgcagcctgggtgacagagtgagactccttcttgaaaaaaaaaaaaagaagtggctgggcacggtggctcatgcctgtaatcccagcactttgggaggccgaggcaggtggatcatgaggtcaggagttcgagaccagcctgactaacatggtgacaccccatctctactaaaaataaaaacaattggccgggaattggggcgcatgcctgtaatcccagctgctaaggaggctgaggcaggagaattgcttgaacctgggaggcggaggttgcagtgagccgagatcacgccattgcactccagcctgggcgacagagcaagactccgtctcaaaaaaatgcataaaaacagaagttgaaatattggctgaaagaggccagtctggcctcagtattgtgttcactgcaattcatgagagcttagcaatggtcccctctttgagagacgttgccctgaggaggagtctccccagtgaccccttcatgtccttgttcctcaggctgtagatgaaggggttcagcatgggggtgaccatggtgtacatcaccgaggctgccagacttgtcctagaaggtggtgtaactgcagaactgagatagaccccaaggccagtgccatagaacaagctgaccactgagaggtgggaaccacaggtggaaaaggctttgtgctggcctctggcagatactcttaggacggaggagaaaatctgagaataagagaataggattccacagagaggaaaaacacccaggacaatggtcacaaaatacatcacgatgttattgatgaaggtgtcagaacaggccagcttcaggacttcggaaggatcacaaaaaaagtgcggaatttccatatttgtgcagaaggacagcctcaaaatggtcaaggtctcaagcaaggaacccatgacactgatgcaccaggaccccagaaccagcagtccacagagccgggggttcatgatgaccgtgtagtgcagggggtaacagatggccacgaagcggtcataggccgtcatggtcaggagcaaattgtccaggcatccaaatgcaatgaaaaaaaatatctgagtgaggcagcctgcaaaagtgatcattttgctttgtgtttggatattcaccagcatctttgggacagtcgtggatgtgaaacagatgtcagcaaaggacaggttggagaggaagaagtacatgggggtgtggaggtgggagtctgaactgatggtcaggatgatgagcaggtttccgatgatggtaaccaggtacatggagaggaacagcccatggaggagaagctgcatgtcagagtcctctgcgaatcccaggaggagaaagtttccaacttctgtttggtttcctctttccatggggccgctgggtttgccgagaaggaggaaaaaaaacagccacacaaaatttactccaaataagcattccccagaatgactgcaatatcctttattcaaacccagggaactcaagaaatcatgcattttggctaattattggatttctttgccgacaagttacagttaccatcgctacctggagaagtcatctctacatcattggtccttaaactgtggttcctggaacagccccatcagcatcacctgggaactcattagacatgtgccttatcatgcccacctgaccgactgaatctgatactctgggtatggagccagcattctggtttagtttttgtttgagatggagtctcgctctttcgcccaggctagagtgcagtggcagagtcttggctcactgcaacctctgcctcccgggttcaagtgattctcctgcctcagcctccagagtagctggtattacaggcatgtaccaccacgcccagctaatttttgtagttttagtagagacagggtttcaccatgttggtcaggctggtctcgaactcctgacctcgtgatcctcctgcgttggcctcccaaagtgctgggattacaggcatgagccaccacgcctggccttttaattttaattaattaattttttttttttgagacagagtctcaccctgttgcccaggctggagtgcagtggtgcaatctcagctcactgcaacctctggctcccaggttcaagcaattctcatgcctcagcctcctgagtagctggcactacaggcgcgcaccaccacgctgaggtaatttttttttttttttgtatttttaggagagacacggtttctccatgttggccagactggtctcaaactcctgacctcagatgatccgcccgcctcagcctcccaaagtgctggtattacaggcatgagccaccgtgcctggcctgcattctgggttttaacaagccctctagggaattctgatgcacactcaagtttgaggactattgcttcagcgcttgcctgtatccctaagcaatccttcccaccgcagcatccctggtggctgctcttgccctttctgcctaaggcatggggattaggaaatcaggcaatgagaattccctaattctaggcagattgtcaatcctcagaaggctttttcttctattgtgctgcattcctgtaatttatttttcattttgttttagagacaaggtctggctctgttgcccaggctggagtgcagtggcgccatcctagctcactgcagtctcgaacttctgggctcaagtgatcctcctgcctcagcctcccaagtagctgggattacaggtgcaagccactgtgcccagttgtaatgtctacatgttaaatcctctggatcttggatgccccttctgctaaaaaataataaccactgtttttaatcatcattgtttacatttcatttatattatcaatctccctagctaaactcaacaaaaatggaactttgaaatagaaaagccctagagtttctagatatagaattaaattttatccccattttccatcatctgattccatcagatcaaaatattctgccatacagaaatggctctttaaaacttgtccatgttggacatttacttactttctaagttttcttaaagacaaagaaagtttttgattaactatagttttatattttttatattttcttctcttaggttaatctgtaaatggcctttctcagttgttgttgtttttttttttaattaagacatttccggccgggcgcggtggctcacgcctgtaatcccagcactttcggaggccaaggtgggcggatcacgaggtcaggagttcgagataagcctggccaacatggtgaaactccgtctctaataaaaatacaaaaattagctgggcgtggtggcacacacctgtagtcccagctactagggaggctgaggcagaagaattgcttgaacccaggaggcggaggttgcagtg

SEQ ID NO: 1560814 - DNA, 4001 bp, Homo sapiens
acactaaaaactcagaagtcaccactaaagaactcatccgtgtaatgaaaaaccacatgtaccccaaaaactactgacataaaaataaatttttttaaaaaaagaaaacatggtatgtatctacatatgtctatatctatatagatatcgaggatatatacaatggagtactactcagccataaaaaaggatgaaatcatgtcttttgcagcaacatcgatgggactggaagccattctcttaagtaaggtagtaaagaaacaaagtcaaatgctgcatgatctcacttataattgggagctaaacaatgtatacgcatgggcattataacagaataatggacactggagactgcaaaaggtgagaggggagtgagagtttaaaaactgccttggccgggcgtggtggctcacacctgtaatcccagcactttgagaggccaaggcaggtggatcacaaggtcaggagttcgagaccagcctggccaagatggtgaaaccccgtctctactaaaaggcatgggtggcacacacctgtaatctcagctactcaggaggctgagacagaagaatcacttgaacccgggaggcggaggttgcagtgagccgagatcactccactgcactccagcctgggagacagagtgagactccgtctcaaaaaagaaaaaaaagtgccttatgttcactattcaggtaattggtacgccaaaagctcagacttcacccttatgcaaatgcatgttaagaaatctgcatttgtactctcaaagtataaaaaaatgtttttaattttaaagagtaagaatttcaaaataaaacatttttgccattggtgctcacaaaacttcttagtcctggggccaagggatccatcacaaacaagaggctgccctgctgaggagactccccagggctcccttcacatccttgttcctcaggctgtagatgaaggggttcaacatgggggtgaccacagtgtacatcaccgaggccacggagattttctgggaagagtgagtcaccgcagaagtgaagtggaccccaatgcctgtcccataaaataaagaaacgacggagaggtgagacccacaggtggaaagtgctttttgttttcccccagatgaggacatcttccttatggatgaagcaattcgtgaataagagaaaatgatcccaaggaggggaaaaacgcccagcacacccgtcataaagtatatcaacgtgctgttcaggaaggtatcagagcaggccagctggaggatgtacgtcagttcgcagaaaaaatgtggaatttcaaaatctttacagaagattagatgcatcatcagagaaatatggaggagggatgtcatgacaccaatgagccaggtgacaaaaaccaggaggccacagaggtgggggttcatgatgatcatatagtgcagagggtggcagacagccacaaaccggtcataggccatcacggtcaggagtagcgtgtccagaataggaaaaaacatggagaaatagacctgtgtgaggcagtccatgtaggagatggctttgttctcggtctggatgttcaccagcatcttggggacgatgcaagtgctgaaacagatgtcaacccaggacaggttggagaggaagaagtacatgggggtgtggaggtgggagtcagagctgatggccaggatgatgagcaggtttcccagcaccgtcaccaggtacatggacaggaacagcccaaatatgaacggctgtagttctggatcctcagagagtccgagaaggataaactctaaaaatcctgtttggtttcctgcttccatgtagctgatgtatctacaaaagaagaggtcattagccaggcatggtggtggacacctgtagtcccagctactcgggaggctgagatggaaggatcacttgagcccaggaatttgcaactgcagggagctatgtttacaccactgcactccagcctgggcaatagagggagaactgtctcaaaaaataaaaataaaaaataaaataaaaataaaactatgtatatatgtatttattttaaaatatacatatttatttaaaattatatttatttatttatttaaaaggaagcggtaagagaaacatcagttaacatccaacgggcatccttcatgtaatagaaatgttgtccatactatttacttgtgatttatggactcattttgtctaatctttcatacgtaaatggaattctaaaaaatgaagtctctcatctcaaccacccatatatttaattatttaaaaattaattatattctgtatattcaacgtatactatatatgttatgagatacatatagatagtaaaatggttactgtagtgaaacaaatgaacatatccatcgtcttacatagttacccattttctttatagcaagaacagctacagtctactgatgtagcataaatccggaatactacatactgttattgactataattttcatgggtacactggatctctagactcgtttatcctatatatctgctactttatatccattatcctacatcttcttcattttctcccccagccgcacccctcctctggtaaccactgttttattctctatatttgactttaaaaaaaatattccacatagaagtgaaaaaatgcaatatttttctttctgcatctgacttattctacttaacataatggcctccagattcatccatgttgtggcaaatggcaggatctattcctattttatcaatcagtggaataatattgattgtaaaaattgtgtaaaaatatatatacacacacatacacatacatatatatacacacacatacatatatatacacacaatggaatatatatacacaaatatatacacacacacaaatgtacatatacatatatatcacattttctttagccatttctccatcagcagacacttaggttgtttccatatcttgacttttgcaagtaatgctgcaatgaacatgagcatgcagatatctttacgagtggcaatttcattttctttggatacatatccaggggagggattgctggatcatatttaatttctttttattttaaatttcttttattttaaatttcttctttttgattttattatttttattttttgagaaagagtctcaaaattttaatttctttttcctttttattttttgagacagattctctgtcgcccaggctggagtgcagtggcgtgatctcagctcactgcaacctccacctcccaagtttaagcgattcttgtgcctcagcctcttgagtagctgggattacaggtatgtgccaccacgcctagctaatttttgtattttttgtattttttcttttttttagtagagacagggtttcaccttgttgaccaggctggtcttgaactcctggcctcaagtgatccacccgccttggcctcccaaagtgctggggattacaggcgtaagccaccacacccggcctctatttaattcctttaggaaccctcacactatttcccataatgtctgctccaatctacattaccaccgacagggcacaaggggttcccttttcttctcacccttgccaactcttgtcttttttttttttttttttttttttttttttttttttttgagacggagtcttgctgtcgcccaggctggagtgcagtggcgcaatctcggctcactgcaggctccgccccctggggttcacgccattctcctgcctcagcctcccgagtagctgggactacaggcgcccgccacctcgcccggctaattttttgtacttttagtagagacggggtttcaccgtgttagccaggatggtctcgatctcctgacctcgtgatccgcccgcctcggcctcccaaagtgctgggattacaggcgtgagccaccgcgcccggccaactcttgtctttttaataatagtgaatagttagttaatagttagctaataatagagccaattgttagctaaccgctagtaa

SEQ ID NO: 1560815 - DNA, 4001 bp, Homo sapiens
ccctccaagtagctgggaagacaggtgtgagccactgtgccccgaaaattttatatcactgtttttatggaaagtaggatggcaaagttagaagtgtgggcaaagtgtcagattgttaggatatactctacctccatctcagtctcctcctttgagaaatgcagtgaatgagacaaaatttctcacgaaatgttttcaggattgaataacatcagacatgtaaagcaacaagcactgtcctgatattgtaaacattttatacgactaatctatggttttcattttatttcctatccagaggacaagaaaaaactatactaaggtgaggaacatcaacattcaacaggataatttttgaggaaaccaggtcagcacttgatattgggagtgccatacacatcaaattagaagtctcagaaagagtggtaagaaaactgatcaaagatggaactttatgggaaacatctagggaagaaaagtcaaaaagggcttacagagggagtttttaggagaaactaacacaaaaacaaaagcaaaatcatagttgtttttgattaaaaaaaaaaagaaaagaaagaaacacattggccaggcacggtggctcacgcttgtaatcctagcactttgggaggctgaggcaggcagatcatgaggtcaggagttccagaccagcctgaacagtatggtggaaccctgtctctactaaaaatacaaaaattagctggctgtggtggcacacacctgtaatctcagctacttgagaggctgaggcaggagaaccgcttcaacctgggaggtagaggttgcagtgagccaagattgcaccactgcactctagcctgggcgacagagccagactctgtctcaaaaacaataacaataacaacaacaaacaacccaataacaacaaccaaaaatcccacatcaagcacattttttaaaagagaaaaagagccggatatttaaacccacaacatttgccttaggggtacgcagtgtgtcctcttagttctgaggccctgatttgtcatggacaagagtcggccctgctgaggagtctttccagggcccccttcacatccttgttcctcaggctgtagatgaaggggttcagcatgggggtgaccatggcgtacatcactgaggcggtggagctgctctgggaagaatgggtcacagcagaactcagatagaccccaagtcctgttccatagaacaaggagaccacacagaggtgagatccacaggtggaaaaggctttgtacttgcccttggtggaggacattcccattaaggaggagacaatctgagagtaggagaagaggatcccagctacaggaaacacacccagcagtgccgtggccacatacaagacaatgttattgaggagggtgttagagcaggccaccttgaggacctgagccggttcacagaagaaatgcggaatctcagtgcctgtggagaaggtcaacctcttcatcagtagaatatgaaccagggagaaccagaaaatgatgaaccaagatgccagaaccaggaggccacagaggcaggggttcatgatgaccgtgtagtgcagtgggtggcagatggccacaaaccggtcataggccatcacggccagtaggaaagtatccattccagcaaacatcattaaaaaatacacctgagtgaggcaccccatgtaggagatgtctttgctccgtgcctggatgctcactagcatcttggggactgtggtggagatgaaacagatgtcaacaaaggacaggttggagaggaagaagtacatgggggtgtggaggtgggagtcagagctgacggccagaatgatgagcaggttccccagcaccgtgaccaggtacatggacaggaacagcccaaagaggacgggctgcagttcaggatcatctgagagtcccaggaggagaaattttgataattctgtaaggttttctgcttccatgtagctgttgtgtctgctggggaaggaggaaaaagcaacgtttaatgaacagcaagtggcagctcagcttgtcatcactttacaatatcaccttttgatggacatttgtcacccttcctggagtccttacaaagacaatgaatctctcaggaagtggtatctatttttattctatttgtgtagagttatccagccattctttaatttttagaaatctctctctttggccgggcatggtggctcacgcctgtaatcccagcactttgggaggacaaggtgggcagatcacgaggtcaagagattgagaccatcctggccaatatggtgaaaccctgtctctactaaaaatacaaaaatcagctgggcgttgtggagtgcacctgtaatcccagttactaaggaggctgaggcaggagaatcgcttgaacccaggaggcggaggttgcagtgagccaagatcatggcactgcactccagcctggtgacaaagtgagactccgtctcaaaaaaaaaaaaaaaaaaaaaaaacctctttttttcatttactcaccagttttaattcccccatttgtatctatgaacttaaatcaatttcttctttggtgtgaatcttccaaaataattaaaggtatgtcatgtcttttcctcgataatccccatgcttccttcattctaatagatgtacaatagttattaagttgtggattttcaacccaaacaacctttattctgtgacccagtgcttggaagtgatgtgacagttaactctcagggctttcttccttccttaaaattaaattattgatattactttcttattgaggtttaaaaatgccatatgcacggtaggaatatcaacaaatgatagctatcattactgctactattactattaatcttattaatcttttccttttatgataattacttagatatataactcttccaaggtatagcatagagctgtgatttggaaaatattttctgaaatcagactttttagaataaaattctgatccatgcattagtctgttttcactctgctgataaagacatacctgagactgggcaatttacaacagaaagatgtttaatggacttacagttccacgtggctggggaagccttataatcacggtggaaggcaaggaggagcaagtcacatcttacatggatggtggcaggcaaagagagaaagcttgtgcaaggaaactcccccttatagaaccataagatctcatgagacttactcactatctcaagaacagcatgggaaagacctgtctccatgattcaatttcctcccactgggtccctcccattacacatgggaattcaagatgagatctgccaccccctgcaccccacagtcatcatgaactcctgcctctgtggcctccttgttctggcatcttgatttatcattttctgggtctccctggttcatgttcttctgatgaagaggttgaccttctctataggcactgaaattccacatttcttctgtgacctgcctctggttcactgtgtagggacacagccaaactatgtgaatccaccaacttactactgtataccatagagaaagttatttgaactgtcttagctgcagctacctcacctccatagtaggagtagtaaatactccctatgtgggaatattgaagagtgaaattaaatgagattatccatgtcatttgtctactatgatttctgtgtcatacaatggatatttcacacatatgaacttttgttcttttgcttttttttttgagacagagtctcactctgttgaccaggctggagtgcagtggtgcaatgttggctcactgcaacctctgcctcctgggttcaagtgattcttgtgcctcagcctcccaagtagctgggaccacaggcatgcaccaccatgcccagctaatttttctatttttagtagagatggggtttcaccatgttggccaggttggttttgaactcctgggctcaagtgatccacccaccttggcctcccaatgtgctgagattacaggca

SEQ ID NO: 1560816 - DNA, 4001 bp, Homo sapiens
gcctggctaatttttgtatttttagtaaagatggggtttcactatgttgtccaggctggactccaactcctgacctcaggcgatctgcccacctcagcctcccaaagtattgggattacaggtgtgagccaccgcgcccggccataatgtaaatttctacagtgctgaacaataatgcgttttaagaagatatttgaatgaatcacgttgcctggtgctacattcttttgtaacttacccattgtagctccgtccctttagaaacatcatcacctgaactatttctggtgcttttaaaattcctcaacccacacaggtccaagtaaattttggtaatgacacccaggcctcagtatttgtgaggtccccaggtgatttcaataaaaccaaatgtgaggaccattgatagacatcatcatacgtaagctgcctaaagtgatttcctagatgcgatttggacagaaattacacaggaactgtagaaagggaggtaaatacgaagtacgataagtcctcacttaacatcctccacagaaaattagaaaccacaattcaagcaaaacgatgaaccatgaaaccaatttattcatttctcaccaaaattaaaactaaacaacattgaacaaaatgaacttatttcaggacctgctgcgctttttttttaaagttgcagtttccaaaaacctcttgacaaagttaagtgaggatttcaagtctatcagaaaagattgtgattgcacctggatatcaaggtcattgcacagatactaaaggaggctgtctaggtatattggaatcattcatgatgtgtatgatgaacaaaggataccagaatactcacccattgcaattaaagacaaaacaaagcaagcaatattcacatacgaaacccagagaggaatgaaagccatcaagcaaccaaaataatgtgaccaaggaggcagaatttgcaggcctaggtgttaaattttgctgccatttctatcccatataacaaaaaggatggagatgatgagatttgatgattctgccatgcagcctgcacagggcactttgaatgtccttgttcctcaggctgtagatgaaggggttcagcatgggggtgaccacagtgtacatcactgaagccaccatactcttcctgggggatggtaacacagctgaactgaggtaccctacaagccctgttccataaaataagcaaacaactgccaggtgagagccacaggtggagaaggctttatacttcccatctgatgttggaactctcagaatgggggaaacaattttatagtaagagaaaaggatccctgagatagggagacagccaaatatggcacccatgaaatatatgaccatttcattgatgaaggtgtcggaacacctaaggtggaggagttgagaagggtcacagaagaaattagaaatgtccacatccttgaagcaggtgagctgtaacataatcaaattgtgcaactgggagtccaaaagactaataaaaaaagacaacaagattaagaagccacagaggcgtgggttcatgatgattcggtagtgcagggggtgacagatggccacaaaccggtcataggccatcacactcaggagcatgtcatccatacatgcaaaaaggacaaaaaaagacatctgagtcaggcagccttcataggagatgactctgctgtgagtttgcatgtccacaatcatcttggggaccgtggtggaggtgaaaccgatgtcagccaaggacaggttggagaggaagaagtacatgggggtgtggaggtgggagtcagagctgacagccaggatgatgagcaggttccccagcaccgtgaccaggtacatggacaggaacagcccagcgaggaccggctgcagttctggatcctctgagagtcccaggaggaggaattctgagacacctgtgagattctgtggctctgtgtagctcggacaccttttgaggaaaaaaaaaaagagaattggaaaataggacataagtaaaccagcatctagcactgtgtctatattttggatacaagcaattaagaaattaagttttcacataggattatacaccctcagcaatagttctcagttgtgacaaacccaatttccttagagttacttcataattgattttgtgttattcacctctttctgtatacacttaacttagagacagtctattgaagaatgttaggagagcaaaaacattagagattttagaaatccatgatcacggtaaaatatagcctaatttatcaggaaaaaatatacaacaaaaatattcttgcccctttaagaaaaagattaaatccattgaaaggatactaagaaggagtcagctatgtcttgttttattctaatacaattctacaaattccattgattgaggatatttatcaacactcaatgagatctaggatcatgttgtctcaaaactcaatgaaagttcatagttcatagccagaaaacatctttacataccagttatattctacggtttccatcattcttacgttttctgactttcattcttcatggaagtaagtactcactcaaatatgtgggctttcttttaaaattcacttaattataattcctgtccttgccttaggtggacttggagttttgataagaaagtagcccagggtggtggctcacacctggaatcctagcactttgggaggccaaggcaggaggattgcttgaggatgtgagtttaagaccggcctggaaaacacagcaaaaccccatctttacaaaaaactaaaaaattagacaggcatggtggcgccgccctgtagtcccagctactcaggaggctgagtcaggagaatcgcttgagccctggagttcgaggctgcactgaaccatgatcataccaccgcactctaggcagagtggcagagtgagaccttgactattaaatcaataagtaattaaaaggaaggtttagttaaatgcacataattaccaggacatcactgatagcaaagatgttgatagtgtgcaacgtacctgtggatgacagaacattaatataatgttaaaatgcttttaatttttttttttaagacctgagtctcgaagttttgagcctgtcaccaggctggaatgcagtggcatgatctcagctcactgcagcctccgcctcctgggttcaagcgattcttatgcctcagcttcccgagtagctgggactacaggcgcacgccccaccatgcacagctgatttttgtatttttagtagagatggagtttcaccatgttggccaggctggtctcaaacttctgacctcaagtaatctgcccacctctgcctttcaaagtgctgggattacaggtgtgagccactgtgcctggccaaggtaatgttaaaatactttggcattactttcgttgtggctggaatcatgtgaaactctaaaatgtatcttgatctaaacaataaggtttacctgcccccacttccttctgcatccttttctctttttttatgcctgtaaaaatctctgccatggtctttaagtaattgaatgttgtagatgctattattatgtgtccataatatagacacaaaaaagtgctattttaccttctgcctagtttgtgacacattcctggaaggaatgaaagtacagataggaaagcagtgagtgtgttgaagtcacactgatcacagccagttttgtgaactaaggaagggtctattcaatatgtaacagagattctaatttttggtgtctcctctgtaccaagcaagatacaggctctgggaaatcagagttgaaagaaactcaaatattcctctcacaatcctcagtacttacttatataagggcaaaaattaaatgtcctgtcagagacattgggaaccatagctaggttcctggatatttcagttcaatggtatggagattaaccttggaatattaatagaaaacatgtagaatacacttcactttatgcatccatcacatagggatcacaca

SEQ ID NO: 1560817 - DNA, 4001 bp, Homo sapiens
acctgtgagacgcctcctgcttttcttcctctgagaatatttaccaaccaaatcactgtaacacttgccacaggttaactttttaaacaccgcatgcaaagaaactgagctttgagaatagaattcatttttgacacatgacagagctccaaaagaggcaagatttcaacaacaacaacaaaaaacacacacacacatccatgatgcagactagtcactttaagaaaatcttgaaaggtcgggcgcggtgactcacgcctgtaatcccagcactttgggaggccaaggtgggcagatcactaggtcaggagattgagaccatcctggccaacacggtgaaaccccatctctactaaaaaaatacaaaaaattagcctggcatggtggcgggcgcctgtagtcccagctactcaggaggctgaggcaggggaatggcgtgaacccaggaggcggaggttgcagtgagcggagatcgtgccactgcactccagcctgggtgacagagcgagactctgtcacaaaaaaaaaaaaaaagaaagaaagaaaaagaaaatcttcatgatgcaagagtcaggcactctggcttaccaaggaatcctgtcatgttgattccttttagaagcttcagttcaaagcagagcacaaagatcacaaaaaagaaagtaggtcaggcatagtggctcatgcctgtaatcccagcactttgggaggccgaggtgggtggattacctgaagtcaggagttcgagaccaccctggccaacctggtgaaaccccatctctactaaaaatacaaaaaaaatccaggtgtggtggtgtgtgcctgtaatcccagctactcgggaggccgaggcaggagaattgcatgaacccgggaggcggagtttgcagtgagccgagatcgtgccactgtactccagcctgggcgacagagcgagattctgcctcgaaaaaaaaaaaaaaaagtaaatctcgatgcaagagtcaggcactctggcttaccaaggaatcctgttatgatgatttattttagaagctccaattcaaagcagaggacaaagatcgctaaaaaggaaacagcctaccaataagtttcctcaaagctttcttcatctccttatttctcaggctgtagatgaaggggttcatcatttgagggaccacagtgtacatcactgaagccacagcagtaattcgggaagactcagcaacagcagaactaatgtacaccccaaaagctgtcccatagaacaaggaaaaaacagagaggtgacagccacaggtggaaaacgctttatactttcctcttgctgatggcattctcagaacagaggtgactatttgagaataagagaaaattattccagagagaggaattgcaccaaatacactacttgcaaaatatatgaggatgttgttgatgagggtgtcagaacaggcgagcttgatgacctgaacgacttcacagaagaacaaagggatttcaacgtttttgcagaaggacagctgcaataccatcagactctgaaccagggcatccatagtgctcatgaacatggagagaagaatcagcaagccccagaaatggacattcatgaggactgtgtacctcagtgggtggcaaatggccacatagcggtcgtaggccatgactgcaagaaagcaactttccaagccagcaaaaaccaagacaagacagatctgggtgaggcagcctgtgtaagtgatactctgattctgagcttggatgttcactaggatctttgggactgtggttgtggttaaacagatgtcagtaaaggagagattaaagagaaggaagtacatgggggtgtggaggtgggagtcagagatgacagccaggagaatgagcaggttccccaggatggtgaccaggtacatggacaggaacaggctgaaagggattaacttcagttctgggtcctctgtcactttcatgagaagaaattctgaaacagctgtttggtttctgggtcccatgtttttgatgatcaaaaaatgggataattagacaatcaaatgtgttttctagactgcgggagcaacgtcaacagaggcaaacaccatcttgaaaaggggtagattctaagggaagaaaataaataagtgttgccttttgtattgatattactttactgcttttacaaaacttgaagctaatacagcacagcatcaataattgttaattctggaaatggttaaggggtcatcattttttatttttatttatttattttttaaatttatttatttatttttgagacagagtcttgctctgtggccaggctggagtgcagtggcttgatcctggctcactgcaacctctgcctcctggtttcaagcaattctcctgcctgagcctcccaagtagctgggattaaagatgcttgccacaacacctggctaatttttgtatttttagtagagacggggttttgccatgttggccaggctgctctcaaatgcctggcctcaagtgatctgcccaacttggcttcccaaaatgctgggtttacaggcgtgagccaccacgcccagcctcatctttttttttttgagatggagtttcgctcttgttgcccaggctggagtgcagtggcacaaacttggttcactgcaacctccgcctcccaggttcaagcgattctccttcctcagcctcctgagtagctgggattacaggcatgtgccaccactctgctgttctgattattaaaaatatttggtaatgaaaaaacaaaaaataaataaaataaaacaaagtacataccaggaaaacggctggaagactctgtctggacccccagagacttcacgccagccaacagaaataatacaaagctgtgtcaagaaccaggaaaggagaatcgcttgaacccagggggcggaggttgcagtgagctgagatcatgccattatactccagcctgggcaacggagcaaaactccattaaaaaaaaaaaaaacaccacaggaaagtgaagataaggtgaagtttagcaagctgctcacctcctctcccccacaagactgcaagtaaattacagagaattttataacagtcatcctgttttcaaagaaaatggtaactacagaattcaggatagtgtatttgttgctggaagaaaacaaggtgatttgagtagaaaatcctacaggtaggttctatggtgatgacattaacttatttttaatgccagataggtatatgcggttttatcatgttactattctctcagaattacagatagatttttttttttttcctgagacagtgtctcgttctgtcgcccaggttggagtgcagtggcacgatctcggctcacagcaagctccgcctcccaggttcacgccattctcctgcctcagcctcctgagtagctgggactacagacgcccgccaccacggccggctaattttttgtatttttagtagagacgggtatcactgcgttagccaggatggtctccatatcctgaccttgtgatctgcccacctccgcctcccaaagtgctgggattacaggcgtgagccactgtgctctacactacctacagatagatagattttatgcattactttgtatatgataatgtaacaagtatgattaaagaaagacccttcatattctaaccctaaatatgttttctcatgttctcctaatattaaagttaggagtgtcaggcttcagaggttatcagcatctctccaagtgcttattaaaaattctcatacctcacacatttctcagagatttaacaccagtagttctcgggcaaggccaagaaccttctctatgaggaaaggtctcgggtggttcctctctgtgtctgttctgtggacaccaacagaggaatctcagtcctaggagactctatgagtgctagaataggagctgcgttccagatatgtaagagctttttgttttgttttgggggttttttagagacaggatcttgccatgttgcccaggctggtct

SEQ ID NO: 1560818 - DNA, 4001 bp, Homo sapiens
acaaaaaacctaaactaaacaaaaaaccaaaaatacattttcctgacctatcctcctgaactatctaccttccacaacttttcttcttctgagactaatccattaaaaaaaaatcacttagccaggagcggtggctcacgcctctaatcccagtaatcccagaactttgggaggccgaggcgaatggatcacaaggtcaggagatcgagaccaccctggccagcatgatgaaacctcacctctactaaaagtacaaaaattagccgggtgtggtgtcgtgcacctgtagtcccagctactcagtaggctgaggcgggagaatcgcttgaacctgggaggcagagattacagtgagccgagatcacaccactgcactccagcctggccgacagagcgagactctgtctctaaataaataaataaataacttgggctcagcctctgagtctatggcctgagcaaagaaattgagtctagagaattaaaatcacatgtccatcatcacagatccagacataaaaagcaaagtcagatttcaagccggagtggaaatgtagttggcttttatgtcatctagacattttagaagaacttggtgatgaaagagtcaggcaggctgggcgcattgtctcacgcctgtaatcccagcactttgggaggccgaggcgggtggatcacctgacgtcaggagtttgagaccagcctggccaacatggtgaaactctatctctactaaaaatacaaaaattagccaggcatggtggcaggcgcctgtaatccccactactcaggaggctgaggcaggaggatggcttgaacccggaggcggaagttgcagtgagccgaggtcgtgccattgcactccagcctgggagacagagaaagactccatctcagagaaaaaaacaaaacaaaacaaagagtcaggcattctagctcaccaggaatcctgtcactttgacttactctagaaacctgaatccaaagcaaatggcacaccacagaagagaaggtatcctccctatgaacttcctcaaggttcctttcatgtccttattcctcagactatagataaaggggttcaccatttgagggaacacagaatacatcactgaagccactgcagtcttcctaggtgagtcagtaaccacagaactaatgtacacccccaaacctgccccatagaacaagagaacaatggagaggtgagacccacaggtggaaactgctttgtgctttccacttgctgatggcattctcaaaacacaggaggtgatctgagtgtaagacaaaatgattccagacagaggaacaccaccaaatatgcaagctgcaaaatatatcaggatgttattgatgagggtgtctgaacaggtgagttggatgacctgagccagttcacagaagaagagcgggatttccaggtctgtgcagaaggacagcctcaacaccatcaggctgagaagaagggcattcacaacactagtcaacagagagagaagaatcagcaggccacagaggcgggggttcatgatgactgtgtatctaagggggtgacaaatggccacatagcggtcataggccattgctgcaaggagacaattttccaagccagcaaaaaacaagacaaagcagatctgggtgaggcagcctgagtacgtgatgctccgattctgagcttggatgttcaccagcatctttgggatcgtggttgtgcttaaacaaatgtccaaaaaggagagattggagaggaagaagtacatgggggtgtggaggtgagagtcagagatgacagccaagaggatgagcaggttccccaggatggtgaccaagtacatggacaggaacaggctgaaaaggacgggctgcagttccggatcctctatcagtcccaggagaaggaattttgaaatagctgtttggtttctcgcttccatgctgttgatgatgaatctgatggaaaagataataaaatctgtaagcagcagctgcatcggcatcactcgagaacatgacagaaacgcaaaatcttgctcccctccccagacttcttgctgataaactctggggatgagaaccgacagtttattctttcacaagccttgtagatgtttttgatagatgctgaattttgagaaacagttcaaaacatttacttaggaatggagttttcttaatcaaaaaatgtggaaatctttttttttttttttttttttttgagacagggtctcactctgtccaccaggctggaatgcagtggtgtaatcttagcttattgcaagctccacctccatgttcaagtgattctctggcctcagcctcccaagtagctgtggttacaggtgcacaccaccattcctggctaattttgtgtgtgtgtgtgtgtgtttttagtagagacggcgggggtgggggtctcaccatgttggtcaggctgatctcgaactcctgacctcaagtgatccacctgcctcagcctcccaaagtgctgggattacaggcttgagccaccatgcctggcccaggagtggagttttcttaatcaaaaaatgtggaaatgttttttttttttttttttcgggagatagggtctcactctgtcgcccaggctggagtgcagtggtgtgatcttagctcactgcaagctccacctcccaggttcaagtgagtctccttcctcagcctctcaagtagctagggttacaggtgcacagcaccatatttggctaattaaaaaaaaattttttttttcgtatgtttagtagagacagggtctcaccatgtaggtcaggctggtctcgaactcctgacttcaagtgatccgcctgcctcaggctcccgaagtcctgggattacaggtgtgagccatcacgctcggccaaagaatgtggaaatcttttatctttattctttctgctgttcccttacccatggcagacacttctagtctagtctagtgctctttcctgctaagaccacatgtacctttgggattcttatcagcatagagctccaaacagcgctagagatagacagaaagtcagagttagcatgctaaatattacctatttgtcatctttcacatgtgattttctaagacaatcatccaattttcaatgttacccaaaacaaatgaatatagaaacatactgcaacattgctaacattttgtcagtttgtgtcattcttaaacttttaaaaatgataaaacttgacatttaaaaaattttaaaattcttggtggggcgtggtggctcatgcttgtaatcccagcactttgggaggccgaggcgggcagatcacggggtcaggcaatcgagaccatcctggctaacacggtgaaaccccatgtctactaaaaatacaaaaaattatcggggcgtggtggtgggcgcctgtggtcccagctactcgggaggctgaggcaggagaatggcgtgaacccaggaggcagagcttgcagtgagccgagatcgcgccactgcactccagcctgggcaacagagcgagactccatctcaaaaaacaaacaaacaaatttttaaattctctagtgtgcactgtgaacccaagtgaatattcaaatccttccccttgcttactttcttcctacatttcttttctctctcctcctgttccctccattttcttttctttttttctttttctttttctttttttcgagatggagtcttgctctgtcacccaggttagaatacagtggcgcgatctcggctccctgcaacctccgcctcccgggttcaagctattttcctgcctcgtcctccaaagtagctgggattacaggcgccagccaccgcacccggctaatttttgtatttttagtagagacgggtttcactatcttagccagactggtctggaactcctgaccttgtgatccacctgcctcggcctcccaaagtgctgggattacaggtgtgagccactgcgcctggcctctccattttctttattgaaacaaattattataagacact

SEQ ID NO: 1560819 - DNA, 4001 bp, Homo sapiens
aggtggaggttgcagtaagccgaaattgagccactgcactctagactgggcgacagagcaagactctgtctcaataaataaataaataaataaataaataaataagtttttaaatttttaattaaatttaattttttttaaaaaaagacttagtattggatagaccagtagggtgactatagttcaaaataatccattgtatatttcaaaatacctagaagagaacaattggaatggttggagcataaagataagacaaatatttaaggtgatggatatctaaagtaacaaatccttgcagattatacaaatgtattacactatcacatgcatcctgaaacaatgtacatctcttatgcattgatacaaaaatttaaaaaaagccaggtgtggtggcatgcacctgcagtctcagctactcgtcaggctgagtccagaggatcgctttagcccaggaattcgaggcagcagtgagctgtgatcacaccactgcactccagcctgggcaacaaagtgagagactgtctcaaaaatcaattagtcagtcaatcaatccaaaaagaactcaagtccacgtggtccgattccaaaactatcaccctgaaccatctgatctctggtctcatgtattcaaagacattggtcaggtggggcacagtggctcatgcctgtaatcccagcactttgggaggctgagacgggcagatcacctgaggtcaggagttcgagaccatcctggccaatgtggtgaaaccccgtctctattaaaaatagaaaaattagctgggcttggtggcacgtgcctgtaatcccagctactccggaggctgaagcaggagaatcgcttgaacccaggaggcggaggttgcagtgagccaagattgcgtcactacactccagtctggtcaacagagcgagactccatctcaaaaaacaaacaaacaaacaaaaacaaaaacaaaaacagaaaaccccaaagacattagtcaggctttcaagacttctcattacttctttctccctgacatatcccagcagtgtaagcccaagaagctgagacatcaatggaaagatggtatcctagatattagtttcctcaaagccttcaacatgtccttgtttctcaggctgtaaatgagtgggttcagcatgggggtgaccacggtatacatcactgatgctattgcacccttcctggaggagtgggtagccccagaactaaggtacaccccaaaccctgttccataaaacaaggaaacaacgattaaatgtgacccgcagatggaaaaagctttatactttccaccagctgatggaattttcatgacagaggagacaattcgtgtgtaagagaaaatgatcccagagagaggaacaacacctaacaggctggtcaccaaatacaccaggatgttattgatgaggacatcagaacaggcgagcttgagaatatgagctagttcacagaaaaagtggggaatttccaggtctatgcagaaggtcagctgtagcaccatcaacgtgtgcagcagagcatccaggacactaacgatgaaggacagcagaagcagcagcccacagagtttggggttcatgatgacattgtacctcagtgggtgacagatggccacaaatcgatcataggccatcatgaccagaattccattttccaatccaacaaaaaccaggacaaagcagatttgggtgaggcagcctgtgtaattgatggattgagcctgtgcctggatgttcaccagcatcttgggcatcgtggtggaggtgaaacagatgtcgaccaaggacaggatagagaggaggaagtacatgggggtgtggaggtgggagtcagagttgacggccaggatgatgagcaggttccccagcattgtggccaggtacatggacaggaacagcatgaagaggatgggctgcagctccggatcccctgacaatcccaagagaaagaattctggagtgtctgagaagtttcctgctttcatgttgttgatgagtcttgatcttgtcaatattatcaaaaccaaaccagttataagttatagaccttttttccttccttccttccttctttctttctttcttccttccttccttcctttctttttctttctttctttctttctttctttctctctctccctctctctctttctctttctctctctttctttctttctctctctccctccgtctttctttctttctctttctttctttcttcttactttctttttctttccctccctccctctctccctcctctttctttttctctttctctttctttcttttctctttccttctttctttctttctcctttttctttctttcttcctttcctttctttctctttctttctctctctccctccctccttccctccctctctccctcctctttttctccttccttccttccctccttcccccctctctttctttctctctcttttccttccttccttcctttctctctctctctctctttctttccttccttccttccttcctcccttccttccctccttctttctttccttctttcttctttgcagggtctctctctctctgtcatccatgctggagtgcagtggcatgatcatagctcactgtagcctcatccccctgggctcaagcaatcctcctctctcagcctcccaaatagctgggatgacaggcatgaacccccatgcccagcctgttctttacttccttcctaggtaccctatcagtgtctttctcacccaccaatttccctttctcattacagtttgtgaaaataaaaattaagccctctttatctagcagcataagcccctcccactatttttatttgccttcatctgtctttcatttgtatcacagataatgttaataaagaaaattttaacagtaagccatgcatcagaccctctttccattatttttttcttttctttttttttttgagatggagtctcgctctgctacccaggctggagtgcagtggtgggatctcagctcactgcaacctcttcctccagggtttgagtgatcctcctgcctcagcctcccaagtagctggaactacaggtgtgtgccaacacacctggctgatttttatacttttaacagagatagggtttcaccatgttggccaggctggtcttgaactcctgacttgaagtgatccacccgcctcagcctcctaaagtgctgggattacaggcttgagccactgcacccactcttcctattattactggtgcagcccctggttcaggcaacccctgagccttggcactgattcctggaggagtcctgtgtgagtcagcgccaaacctttcctgttccttctggcttatccagattcttgagaaattgattctggggcccccaaagcaggaagtaaagaattgatgtatgccggcaatgtcaaaacatcagcctgctgttctcataaacccataagttaaggaaattctgtaatgatgactcaggagttggggcaaacatattatagaatcacagcatgtgaacagttgaatggtgcagtgagcccatctcagccctttgcttcacaaattgagttcctggccagacacagcggctcacacctataatcccagcactttgggaggctgaggcagaagggtcgcttgaggccaggagtttgagaccagcctgaacaaagtagcaagacccatctatagtaaacattttttaaaaattaaattaaattaaaaattagccaggcacggtggtacgtgtctgtagtcccagcaacttgggaggctgagttgggaggatcacttgaacccaggagttggaagctgcagtgagctttcatagggtcactgcatgccagcctgggcaacagagcaagactctgcctcttaaaacaaatacacaaacaagctgggcgcggcggctcaagcctgtaatcccagaactttggaaggctgaggcaggcggttcacgaggtcaggagatcaaaaccatcc

SEQ ID NO: 1560820 - DNA, 4001 bp, Homo sapiens
gtctccattgcctctctctctgcccccaaccccagccaggaacccagggagaagaaaggggtgactcacagagggtcagcagctggaggatcagcaccagggccatggtgggcagatacccgctagagctggagccagggcttggtcgcaccctctcccctcccaggaaatgaggcaacatcagaaaaccagacccagatcctcatttacggaagagagtatcgaggtgggggcctgtgggtgactgtgtcatagccctatggcactgtggaaaaattagcagggggttcagtcataacctgtggtgttcatttatttaactctagaaacaaatactagtcaggaggtggaggcaggaggatcgcttgagcccaagagttcaagagcagcctgggcaacagagcgagaccctgtctaaaaaataaataaataaattgtgccactgcactccagcctgggtgatagagtgagaccatgtctttaaatatagatagacagatagaaagatatctgtctgttttaaaaataagaacctattatgtgccagactcttgctgtcattgattgacagatagataaaaatttgcacctattatgtgccaggcccttgctgtgattgaaagatagatagatggatggatggatagatagatagatagatagatagatagatagataaaaattagcacctgttaagtgccaggcccttgctgtgattgattgatggatagataaaaattaacaccaattatgtgccaggcccttgctgtgattaattgatcgattgatagattggttgacagagaaaaattagcacctattatgtgccaggctcttggtgtgatactgtgttagatagatagatagataaaaattagcccctctaggccgggcgcggttgttcacgcctgtaatcccagcactttgggaggccaaggcgggtggatcacctgaggtcgggaagttcgagaccagcctgaccaacatggagaaacccccgtctctcctaaaaaagaaaaattagccggctgtggaggcgcgcgcctgtaatcccagctattcaggaggctgaggcaggagaatcgcttgaactcgggagtcggaggttgctgtgagccgagatcgcgccattgcactccagcctgggcgacagagctagactcaatctcagaagaaaaaaaaaaaaattagaacctattacgtgccagaccctcgctgtgccatgttggcaggcacagagggaactcagactccgttactgctctcaagcagcagctaccagtccgactgaaagaccaagaccaggtcagtttctttttttttgagacggagtctcgctctgtcgcccaggctggagtgcagtggtgtgatctcggctcactgcaagctccgcctcccgggttcacgccattctcctgccttagcctccccagtagctgggactacgggcgcccaccaccacgcccggctaatttgtgttgtatttttaagtagagacagggtttcaccatgttagccaggatggtctagatctcctgacctcgtgatccgcccgcctcggcctcccaaagtgctgggattacaggcgtgagccaccgcgcctggcccagaccaggtcagtttcttaagtgatctgagctataatggcggtaacagagcactgtgagagcccgcagaaagctcctaacccatctgggatgagacctagcgcttccaggacgagccgatgttgagctgagacctcgaaggacaggttagtcattcaccttctcccgggctcagtttcttcgtctgtaaaatgggctttcatacataaactataaaatggggactattttgttccgccttaggtgggtcgcagcaggaggactagtcactccggagcgacttctaggctgagactaaggagattccacgcaggtccgcaaagtcaggcttgcgcttgctcctgacaccacttcctttacctccacggctccatctttgttctgcgcgagtgcgcacgcgcaggctccgaaagcgggccgtcgcacagagggaccacaactcccagagtgctccgcgtccttgctttcgcctctacttgtgctccagggcgcacgcgcagccctgggagcgggttctcgcgcatagggaccacaactcccagggtgctccgcgtcctcgccgctgtcgccgccgcggagacaaagatggctgcgagtaagtgcaggtgccggtggcgcacggggctcgggtagttctgggaacctctgggcggtcctgggactgaggtgcggcagggcaggggtggaagcgatggggtccgtgctggaggggaacgcagaagtcacgagggggctcctccagggcaggggtggcacgagagggttagaggtcaccgggggcagctacttgcaggggtgacgcttcttgccaccccttcaggagtcggcgccttcctcaagaatgcctgggacaaggagccagtgctggtcgtgtccttcgtcgtcgggggcctcggtgcgtgagtgctccaggcgcaaacttgcatcgtccacccccgtccccctacatccctccatcttgtacccctaaagccctatcgccgccctcgggtcccctctagtgtgtctgcacccccacggcatccccttatctatccccatacccattataacctctccaccatcgccccccgcgttcctctccacctacccaatacgctcttaacccctctaaatgagacgttctcaaccctgcttatgccttaacacctgagcaccaaaaaaaagtccagatcctcctcctccttttcatctttcctctcccccattctgaattgagttggcttgggtggaggtgggactggggaatctgtgtcttgtgaaaatccccgtatgatcccaatgtgccttgctgattgaaaatctctgccctctgccctggaactgccctactcacactttaattagcaccggagttcctgcagggatgggggcgggggattgttaaaatgtagcttttttttttgcgatggagtctcactctcacccaggctgaagtgcagtggcgcgatcccggctcactgcaacctcggcctcctgggttcaagggattctcctgcctcagcctcccgagtagctgggattacaggcgcccagctaattttttgtttttgtttttgagactgagtctcgctctgtcgcccaggctggagtgcagtggcgcgatctcggttcagtgcaagccccgccttccgggttcacgccattctcctgcctcagcctcccgagtagctgggactacaggcgcccgcccccatgcccggctaattttttgtatgttcaatagagacggggtttcaccgtgttagccaggatggtctcgatctcctaacctcgtgatcctcccaactcggtctcccaaagtgctgggattacaggcgtgagccaccgcgcccggccagcttttttttttttttttttttgagatggcgtctcgctctgtcttccaggctacagtgcaatggtttgatcatggctcactgcaacctccgcctctagggttcaagtgattctcctgcctccgcctcccaagtagctgggattacaggcgagcaccaccacgcccggctaatttttgtatttttagtagagacaaggtttcaccatgttggccaggctggtcttgaactcctgaccgcaagtgatctgccttcccaaagtgctgggattacaggggtgagccactgcgcccggccaaactgtaggttctgattctgtaggtctggggtggggcatgggattctgcatttttgaagagttcccaggtcttgtcagtactgctggtccaccagccaggcactaggttaaggttctgaacacttattcagtatggcagccaccagccacaactggccactgagcatttgaagtggtgctggtatgaattgaggtggtataagacactggatttcaaaaacttagtataacagagtgtgtaaactaccaataatcttt

SEQ ID NO: 1560821 - DNA, 4001 bp, Homo sapiens
ctttcgatctggagcctgaatcgtataaccggcatccgtctgcactctgcattccgtgacaggcccctattttggtgccaccttacacccacccactggggtccgagagacatcatgtcttgattctccataccccacatacacaaaccatggacactccacagcccagcacctctctccatttccttccatccccacctggggcccagcaacttttccctgtccctgccactgctcaccagtgtgagtcctcatgtggcgcttgagatcgaaggcgtcatgaaagcccttgccacaacagcggcacaggtggcggcgcacggggctgtggcacttgaggtgccttgtcagcatgcgctgcagagggaaggccttagggcagagcgggcagcccagcgtcccagggcccctgggagcagaggtcaggttgccctgtgtgggctgctggagggatgcaggagttattagcctctctggctggaccccatccaccctttgttactctgcaaatgagtatttacagagtgtcctgagccaccacggaggattaggaaggcaggtgggagacagtgattagtgtgtgtgcctgtcactctccagggccttccctcactatcccatggtccttactttctctatgccaagtcccatcttctgatgtgacatacacattttttttttttaaagacagagtcttgctctgtcgcccaggcaggagtgaagtggtatgatgtcaggtcactgcaacctccgcctcccgggttcaagcgattctagtgcctcagcctccccacgattacacgattgtaggcatgcgccacatgcccagttaatttttttattttttgtagagatggggtttcaccatgttggccaggctggtcttgaattcctgacctcaagcaatccacccaccttggcctcacaaagtgctgggattacaggcatgagccactatgcccggtctatttttctaattttattgttttttttgaggggggatggagtctagatctgtttcccaggctggagtgcagtggcgcagactcggctcactgcatcctctgccctgcctcctaggttcaactgattctcctgcctcagcctcctgaggagctgggattacaggcacgtgccaccatgtctggctaatgtttgtaattttagtagagacaaggtttcaacatgttggccagcctggtctcgaactcatgacctcaagtgattcacccgcctcggcctcccaaagtgctggaattacaggctgactaattttattgtctatacatgcagccccaaccagaatataagctccataaaattgtggatttttgtcttattcccgctgaatataacagcccatgcctagaacagtgccttgctttcatgaatatattacattccggctggcgctttccttcctccaatgcatgcacagctgaaaaagcccttatctcccatcgcactcctgttgccttgtcccatgttctgacataaagcggatcatccacatgtggggatgaatcttgtgccccgctggaagagatccctgtggctgccggccctggtgcctggggtgagacctaacagtagagagctcactactaggaaaggagaggcattcccaacacagagaagtaggggcggacaggtcccgaggctggagggcgtgtgcagatgggtcgggggagcaaggggctgtcagcttcattaaggctgagagcaggcaggagcgaaacagctggctttgctagccagttacacactcaccgctgtccacggatccctgacactggacgactgttgtgccggtggcccccccaggctgctgcagtctgaggagaaaagccagatggtgacactgcgtctctcctgccccttacctccaggcacagtgaggggcccacctgggatataggcatctccccggagctggtcaggcagatggccccagttggggggctgtggacgccgactcctgaccaggaaggcgcggggcatgccctccggaaggctctccacacacaggggctgcttccacctgctgtcagacctcagccccaggatgactatccctggtgggaaaggaggggaagcctctgaggaacctcattctcttcatgcaaatttcctggctggccctgggagtggactaagctggctcaggttacccctgcctggggacctgcccatcttctcccaggttttggagggaaccatccagcctccaggggtggacaagcactaggaccaccaagcagagccaggcaaggggagatgggcctggggagcttttgaggataggaagaagaaacaaggccccagggggactgtctcccaggggttgagggtctgtttgccaggcaaatcagtcaccaggggacatccagcagcctgcctggttattcaaatcacagcagctgtctgaggacactgaaggggccccctgctgtgattgccctgctctgtagggtgcagggaggacagcagatctggataaatcagggcaaaatgaggatccaggctgtgcatcctcaggtaggatgccccacctctctgatcttcagattcccagggctaacattcagccagaagcactgttcaggtgtagcaggcactaaaatactagtttgttaataatctagcccctagttactgcctgggacaacactcttcctccctcccacagtctggaaagtaaaagggggtctcctatttttttttctttttttgagacggagtttcactcttgttgcccaggctggagtgcagtggcaccatcttggctcactggaacctccacctcccgggttcaaacgattctcctgcctcagcctcctgagtagctgggactacaggcatgcaccaccacaccgggctaatttttgtatttttggtagagacagagtttcaccatgttggccaggctagtcttgaactcctgacgtcaagtgatccgcctgccttggcctcccaaagtgctgggattacaggcatgagccaccgcacctggcccaaagggggtctcttgacacagccaggggctcccaggaccctaccccggcacactggccaagctgttttacacttgattcttagccagaagactaagaagcaatccaagctctgttttttaattttttttttttgaggcggagttttgctcgttgcccaggctggagtgcaatggcgtgatcttggctcctctatgacctccgcctcctgggttcaagtgagtctcctgcctcagccttccaagtagctgggattacaggggcacaccactgcacccagctgattttttgtgttttttgtagagatggggtttcaccatgttggccaggctggtctcaaactcctaaatgcaggtgatccgcccggctcagcctcccaaagtgctgggattacaggcgtgagccaccgcgcccaacctgtttttattttttttgttttgttttgttttgttttttgagacagattctcactctgttgcccaggctggagtgcagtggtacgatctccacacactgcagcctccgtctcctgggttcaagcgattctgctgcctcagtcccccaagtagctgggactacaggtgcgcaccaccacacccggctaatttttgtatttttagtagagatagggtttcaccatgttgggcaggctggtctcaaactcctgacctcgagtgatccacctgcctcaacctcccaaagtgctgggattacaggcgtgagccattgcgcctggcaactaaacaattttctaagctccagacctagcttactgaaaatgatcgcgtaagtccatgaaggaggcacaccagtgacagcccagaatgaccaagacagtgagaggcaagtgaggcagagacccagccatgatggggaaaagaggggtacctggggacccgaacaggctcctgatccaggctacgggtacagggatggcttcctggataagcgctgaaaggtttcagatgaaaggggagggtgttctag

SEQ ID NO: 1560822 - DNA, 4001 bp, Homo sapiens
cctccctggagggggaccgggctccactcctttatgtggacaggattgaggctcagagccagggttatgcattgggccccaatggaccagcttaggcgggccaggcagtcttggagctcaaggtccactggtaacacagacagcggccaccctactcccccaccacacctggccccactagaggcctcctccccaaagtccagccccagcaaggcctgccggctccacttcagatctgtgccgtccaaagccccgtgggggtccagcccccactctgccctgaccttggcacccgccgccgcccaaagcctcttctccccgtggccaccagagagcacccgcgagcgctggagtcctgccccatccttttgcttccaggtgctcacacttggccagggagttgccgccaaaaagccagactcaccccacaaggtcccccaagagcgctcccgcccgccataccccccagtgccaccctctgtgctccgcgactcactccctcgcaccagcccacccaggcttcctggctgctcttgcagacttgtgccttggtaccttcgcacccagacttttttttttgagacagagtctcactctcatcacccaggctggagtgcaatgatgtgacttcagctcactgcaacctctgcctcccgggttcaagtgattctcctgcctcagcttcctgagtatttgggactacaggcacccaccaccacgcctggtttaattttaaattttgcatttttagtagagatggggtttccccatgttggccaagaggtctcgaattcctgacctcagatctgcccgcctcagcctcccaaagtgctgagattacaagtgtgagccaccgtgcccagccacacccagacattcttgaggctcctcttcccacgtccgtggtcctgcctgcgagaggccccaaggccaccctaaccactgttgacagcagccctcgtgcctccactctcccttccctgcgttattttcccccataccctgcgccacctgatgacggtgagaaaaatctccctccttcgggaggatgggggggcctgcttacccattactggtgccagtgctcaccacagtgcccagggcacagcagcacaggggcactcactccttgtgcaccccacccctgcctctgcaggctggggacaggcttctccggaggcgcctccctgctcccaacgccagcctgcttaaggaggaagtgtcgtctagacgtggcttttttttggagacaggatttcactgtcaccgaggctgaggtgcagtggtgcaatcacagctcagtgcagtctcgacctcctggggtcaagtgatccccctgcctcagcctcccgagtagctggaatcacaggctcgcatcaccacacccagccttgacctaggctttttttttttgagatggagtttcgctcattgcccaagctggagtgcaatggtgcaatctcggctcatggcaacctccgcctcccgggtttaagtgattctcttgtctcagcctcccgagtagctgggattacaggcatgtgccaccaggcccagctaatttttttatttttagtagagacggggtttctccttgttggtcagggtggtctcgaacccctgacctcgtgttccacccccctcgacctcccaaagtgctgggattacaggcgtgagccaccgtgcccagccccagacctaggtgttttaccaatacccactacccccacctcctgacaatctgcagacccccagagacagccaacatgccttctccttacccgagacgttggctgccatgctcccgtgccgatcctcagcctgtgtctgctacccagttccccagcccctcccccagtcaccagtggcttagtgggccctgccccagccccatccccagttactggcccagccagcagagcaggccagcgtgcctttccacccacgtttccttcctcattgtgccacaaccctcctgaggttcaagctcatctgctgaaagtgtgacctgtctgcttgcacggctctttggtgggactggggggaggggccactcatggctgctgctgccaccaatgaaaccaaccccgtgcagggtaggggagagacccagcttccaggaagaaaccaggtgggagggactctcgggtgtggccggcccaggactctctgggttgctttgtatggctccagaatcccccatcccaaacgctgacgtggacccctggccaattcagttctttactggagtggaagggctggggacacaactcctttatgaaaggaaaccgagggccacatctcgggccccaatctggggcgttcaatccagccgctgctccggtgcggcttgggctcaggccactctcttccctgggcggccccggccccggcctcgcccaccatcccgggaagcccctctgggcccccgcctggcctgggctccctgggacttgtccttggtcttgggaaacttctggtcacaaaggcgacccctgcctcgatccatttcccaccgcttccgcttccgccctggagacttggcaagccgtttctgcttggcctcggggaacaggtctgtggggagagacagtgtcagggcccccagagacaaggacaggctctgggtgccctgctgcagaccccactccataccctcactgggcgcctcgcccaccgcctggcagaaatactcgatgtcatcatcttcctgttcatcatcgtcctcacccaactccaggctcgccgtccttgaagggatcccagaggcctcttcatcactacccccgacccgtgccttcttcatgccctccaggctcttctttctggaggagggcgtgggggtcaacatagccgcccatcccagggacccccccttggccctgcccttcccagctctgcctggacctgtgggcctcccgctgctcctgcttgcgctgcacattctgggcctgctgggcctgcctctgcgccttcagccgcagcttcttctccttggcttccaggatggcctgcagctcctcctccgtcttgctcactgagccaagagacgcgggtcaccaagatccgggtgcagctccacacccatgaccccccacccccggcggccccggcctcaccaaaactgtggaacatcactttgccctccccgacgccctcctggaccttgatgagctgcagtgtcatccgcgggccgatctgaggggacgaggaagaagcgtcagcccaccgttgggactggtggagcccgggggtccccctgccctgggcctcacctcggtgagccgcactgcactctgctgggcccgcatgttgccacggccagcgacagcctgaggcagctctgtgatgttgtggtcgccgtcaggctctgcctcgctctccgacagccccgcgcccctgtgtgtaggacataacagggctcagtgggggagctcaggctcccggtcctgttctggggtccccgggccgcagtggcctcccgccctatgccctcctcacgtggccagcagctcgctgatgtcctgcaggcggctcatgttggggaacttctcctggagcagcttcttcatcccgcgactcgcgcccacaggaacaactttgatgctactgcaggaacatgagtggacggcaagggggtggtcagggggcacgtgatggggctggcggtgcccatctcacccttcccacagtgcgtcagggcgtttactttggacagagcaatcacagcgtctcagcagaagtgctgtcatcagccgcatgtggaggcccccacccggcaccccctcgtctcccatcctgctgggacactcactagtggcggaagtccagctcctgggagtcggggttgtagtcgatgaggaggcagcgcttgatggtgttcaggttcacctggaaggggaggaagagagcatagtccagtagactcatggcaaagtttggggaagtgggggctttgggggatacacacactgttcgtggactgtggcactggctagaaa

SEQ ID NO: 1560823 - DNA, 4001 bp, Homo sapiens
atcctaggaatgaagaaaaaggtccttaggggccactggacacacctaatatctccaccttccctctcttcctgttagtaacttacttgacctcaggcttctcattggagatgccataacggttgaactcagtggagatgtactctgtctttcgcatccatggcaccaccttcgcgtgctgctgggatctggggtgggaaatcaggtatctcaggaccccactgccctcctgcttgtagggcccacctgagccagtctccagtacccatttgctacccactcacctcttggagctggtgggggcctgaatctcctcttccaaaagtttctcatcagctggatctagaagaactagaggagagcggggggcaggaggaccatgagggaggcccaggcctgagcctttgctgacctagagcagaccctccctgtctccccacacaccattggggtcgatgcggtaggtgtcaggattgatgagatcgatggtgacccccaggtctggctcagtcaggaggtcatgtttgtgctgtttctccaaggaagtggctttgtactggacgaacctgggtggggaaacacctattgtggtgtttggattccagcttcacccctcacagccctgcttcccagaggcggagcttctctggggaggaactcagaatgaagtgtcccccatggcagagtctgaaagctggctccccagtgggaagggacttggacactgcttgctccattaacaattgagcagctactactatgtgctagggtaggtactgtgctaggccctgagcagacagcagccaacgagacaagcagtccctgccttcaaggaactcatacctgagtagttttcccattccttagtctcacctgttctggtcgaaggggtaggtgatgaacttggggtcgaaggggatatcagggaggctattgcagtacttgactcggcagaccactccagacctaggaacattagtggctcaaaagtgggcccccgctgccccacctctgctcccagccccactgccccaccgctcctgggaaagcacagtggggctcacctctcaggcagagtccggtgggaattgggcctagtggagaagaaagaaacagtgataggtggagaggacgggattgacaggagaatgaaaaaggcttccccaacctttcaaaaggtaggaggggtgacaaatgctggtttctttgggtggtggtgtggggagtgtccaaatgctttaatggaaggagacaaatgttcaatttatttaggaagaaatgcccccaaaagctttaatgaacaaggccaagtgctcaatcccttttgcaggagatggcttcaagtgctttaataaagaaccatgtactcaatcgtcttcggaagaggggtctccaaacggttgactggagggatcccttctggagggagtctccaaaagcctaatccctgaactgcacggcggggaggaggggaacacctgaatctcagaaggaacccgcccccttcgtcaaaggtgagcgcttcatgacgtcacgggcagacctgggggctggtgacgttgttcagcagaaaccctctcccgatcccccgccttgctgcaacagaaaagcgtggcgcctacctgtggccatcctcccgctgggcctgggtctggatggtgggcgccatagcgacgaggcgacggcagcccggacggggtcctagcgggaccgaagggggacgcagaggggcgtgccgacttcaggggacgcctgatccgaggaaggcccagcttggcgccgctccccgcggaaagtgggttgagatgaggtgggcgggcgagaagagctccagcgagactcaggtgaacgcgcaggcagcaccggggacggactcgaagctccggttccaccaactgccgccaagacgctgaggacccaacgggtctcctcaggccgcgacgccttcggggaaatgaagtccggctcggaaccacacacggattggcgagcgtctgggtgaagggcggagcgagggagagaggtgcttctgtgattggtggagagatatctcagtctggacgcagatttgagagtgacgtaacgttggggcacctccttcccctccattggcttaattgcctagggggcgggactaactagcaaacggggactagaaatagggatgctgaaaagcaacggggagagacgcagtcgtaacgcacttccggcggtctacgcgaggaagatggctgcatcccagcagcaagcttcagcggcttcctcagctgctggtgtatcgggtcctagttcggctggcggcccgggtccccagcagcagccgcaaccgccagcacaactggtgggccctgcccagagcggcctcctgcagcaacagcaacaggacttcgatcctgtgcagcgttataagatgctcatcccgcagctgaaggagagtctacaggtgattggccttaagcagcgagaagcaaactggatttggtagtctagaggggcaggccgagggccaggttagtcggagagagcgctaagcagaaagaggaatagaacctgctgttttggcctggctggtgcacgcctgtgttcccagcactttgggaggccgaggcgggcggatcacttgaggtcaggagttcaagaccagcctggtgaaacctcgtctctactaaaaatacaaaaattagccgggcatggtggcgcgcgcctgtaattacagctactcgggaagctgaggcaggagaatcgcttgaacccaggaggcggaggttgcagtgagccgacatcgtgccattgcactccagcctgggcaacagagcgagactccgtcaaaaaaataaataaataaataaataaaactgttgttttctgcgagacctaagcgaagctcggcagagatgggatcagcgctgatgctgaggctgggactggccggagcttgagtgaggggttgtttaaaggagaaactgggctctggtcgttaaagcctgaggagagtactggcttatacggagattctgcccttgattgataggtgagggaggacccttaggttattggcgagaagctcaggtgagagcgggcctctgggaggatggagtggtgacagctataggaatggaaacgaatattactttggaaagtcaggagggaaggtgccagttgaaaagaaaacctgagactgagtgatctcaagaaagagtgtagatctgccagaggtattcccttttgtttttccatttcccacgtgttttgtttttgttttgactagaccttgatgaaggttgcggcccaaaacttgattcagaacactaacatcgacaatggacagtgagtgcagccccctttaccaggatattctattgccttcccagtctttgaaattcatctttccttctcctgctccccgcccacctcaccttctatatttacttttttttttttttttttttgagacagggtctccctctgtcacccaggctggactacagtggcacgatcttggctcattgcagccttgaacacctgagttaggagatcctcttgcctcagcctcccaagtagccaggactacagacatggctacagactacagatgcctggctaatttgtaagatttttttatagagacggagtcttgctatgtttcccaggctggtctcaaactcctggcctctagccatcccctcagcctcacgaatcacttctcctattttattttatttttgttgttgttttgtagagacagggtcttgccacgttgtccaggctggtctcaaactcctgggttcaaacagtccttccaccttggcctcccaaagtgctgggatgacaggcatgaaccatcatgcccagccttttccttttctttctttctttctttcttttcttttttttttttttttttttttttttttttttgagacagagtcttgctctgtcgcccaggctggagtgcagtggtgtagtctcagctcactgcaacctctgcctcccgggttcaa

SEQ ID NO: 1560824 - DNA, 4001 bp, Homo sapiens
caaagtggtgggattacaggcgtgagcccatggtgcccagcctatttattttttgagacggagttttgctcttgttgcccaggctggagtgcagtagtgcgatctcggctcattgcaatctctgcttcccaggttctggcgattctcctgcctcagcctgccaagtagctgggactataggcatgtgccaccatgcccagctaatttttgtatttttagtagagacaggatttcgccatgttggccagggtggtctcgaactcctggcctcaggtcatccgcctgccttggcctcccaaagtgctgggattacaggcgtaagccaccacaccctgcctagagtctctcactttaaaccaagccccaggctctgttgctcatgctgaggtgggcggactgcttgagcccaggagttcaagaccaacctgcgcaacagggcaaaaccccatctctacaaaaattacaaaaattagccaggtgcatggtgatgtgcacctgtagtcccagctactcggagactaaggtgggaggatcacttgagcccaggaggcagaggttgcagtgaacagagatcataccactgcacgccagcctgggtgacagagcaagaccctgtctcaaaaaccaaccaaccaaccaaccaaccaacaaaacaaaccaagccccatagaagcaagactcacttcatgaaaatccagtctgcttgagccatgcattgaatcaatggcattacagttgaaacttattttgatgaaacccattacagttggacatgctttgtggaaagatattattatgattgagtcctctttgtggagtgccattagagttgcccttcgcttcctgtaaagtgactatagctttgtgtaaacccaacagggctgcgcactacttaaagcaaacaagaaagagcctcactttaggcaagcctatggcaggaaagcctcattttaggtcttagtacattatacacaaatccaatctgataaaaccaaggcatacatttctttctcaatagaatgttgcaccttacaccaagattctcagagcctcgggctgcctgaggccaatctgggtactctcataatacctcacctggcctgggttctggtccagatgtgtcagcatggacacagggctggatggggcagggggagagggactgccctcacctcgcactggtgcatgagctggaccaaggagtccccgatgaagacgacttcgggttccttatctttgctgtcagccacgaaccgatggtgctgcgggagcgcgcgagagggagtcaatggcatgcacgctccagggcccgccccgccctgctcccttaggcagcgcctcctcaactgccctcagtttcccaatcaggtagtgagagtggcacgaaccagccgttctcctgagccaccccccgcgcccccggactcctcaatatcccaggtgggaacgctcaccagggacatccagcgcccgtcgccctgtacgtcctgcaccggcgtgggcttgctggctgggttctcctctccactcatcttggcgccgcagctcctgcaggatgagcgagtcgggtcggcccgggagtgttccgaacggagctggctccgccacgcccactcctacccctcgcggcaacaaaggaccgtcccaacgctagcacacccgcggaggacgaaggccgatacagggcgccgcctcctctccagggacggaagccttcacttaggaggtaggtggaatcaggaaccttcgcttcccccacgacggccgcacagtgggctcgcccggcgcttcccgctcgggccgctgactcccaggccgcgcacccggcacggggtggggggagggagaggcgagaccatccagctcccgaggcggggaggagggagaaaccacccaccggtcacggggaggggcgaactacctgaagagtcgagagtgggcggggaaaatctagccctctgtctagcaaatgggaagaaaccatttgctgtacagagtgaaatgtgcggaagggaccacctactgttgcgggggggggggtgacccattcacgtggtggggggaggggagcgagtggacgagtccattcttatattcccttgaaggggtggctcgaatgcacctggctgggggggacgctcctattttctactgatgtgggggacagaaaaggaagatgacaaaatgtgaaaattcgaggctcccttctaaggagccactctaaggccgcgccagggctttagtgagcctatctactcgtgggcttcccctactcaaaacaccgtgggtgtgtgtgtgtgtgtgtgtgtgtgtgtgtgtgtgtgtgtgttgaaatctaaagtacatatctttgcattcaagacatcacaggacccctactcaaaacaccgtgtgtgtgtgcgcgcgcgtggcataacatataaactacatatctttgcattcaagacaccataggacctgcttggagggtagaagaaggtgcagaaagagaaaggaaattagagacgcctccagggctcaggtccagtctggcgtccctccggcagatcatcttgcagatctgcagcctctacactctctctaaacccacaggccaactgggtatgtctgagctctgaaacctacatccatagccaaggccacctagggtcgcgcctctcccccaacgctgccccaaattaatctcagacctcagtgtcttctcagatctccctcttctctgggaccaggtggggggctcactccctgctaaacgtcctggtcatgttcttgtagcctcactccaggtgggaccttcccatgtattcattccttcgaggtggattgatactgagacagagatgagtgttattcattgtgtttatgttttcaatccactttcctggaactgggccgggcacacagtggttattccacaagtgcttgctgaatgagtagtaaatgagtgggtcagctcctgaccttgtcccaatgtgtttagggagacagatccagacacagaggtgtaggggtgtcaaagttgtgtttgagggagagacagggacctctggggaggaagaggagaaggactctgaggactatgggtttcctaggagtagtatctcagctgggtctgaaagataatgaagaatgggcaagcagaaagaaaagacacaggtaatcactttcttattaggtttggggaatatcgtggaatagcttgattttaaagtctgagggaggccagcatggaggctcatgcctgtaatcccagcactttgggaggctgacatggtcggatcacttgaggtcaaccagcctggccaacatggcgaaaccacgtgtctactaaatatacaaaaaaaaaaaaaaaattagctaggcatggcagcacacgcccgtagtcccagctacttgggaaggctgaggcaggacaattgcttgagtctgggaggcagaggttgcagtgagctgagatcgcgccactgcagcccagcctgggcaacagtggcccagcttgggtgacacagcgagactctgtcttaattacaaaaataaacaaacaaataaagtctgagggagccaggtgcagtgatgcatgcctgtagtcccagctactggggaggctgaggtgcgaggatcgcttgaacccagaagtttgagaccagcctgggtaacacagtgagaccctgtctaaaaaaaaaaaaaaaaaaaggctgggcgcggtggctcacgcctgtaatcccagcactttgggaggccgaggtgggcagatcacgaggtcaggatcgagaccatcctggctaacacggtgaaaccccgtctctactaaaaatacaaaaaattagcggggcgtggtggcaggcgcctgttgtcccagctacttgggaggctgaggcaggagaatagcgtgaacctgggaggcagagcttgcagtgagccgagatggcaccagtgcacttcagcctgggagacagagcgagacgccgtctcaaaaaaaaaaaaaaaaaaaaaaagggcaa

SEQ ID NO: 1560825 - DNA, 4001 bp, Homo sapiens
gagcccatggtgcccagcctatttattttttgagacggagttttgctcttgttgcccaggctggagtgcagtagtgcgatctcggctcattgcaatctctgcttcccaggttctggcgattctcctgcctcagcctgccaagtagctgggactataggcatgtgccaccatgcccagctaatttttgtatttttagtagagacaggatttcgccatgttggccagggtggtctcgaactcctggcctcaggtcatccgcctgccttggcctcccaaagtgctgggattacaggcgtaagccaccacaccctgcctagagtctctcactttaaaccaagccccaggctctgttgctcatgctgaggtgggcggactgcttgagcccaggagttcaagaccaacctgcgcaacagggcaaaaccccatctctacaaaaattacaaaaattagccaggtgcatggtgatgtgcacctgtagtcccagctactcggagactaaggtgggaggatcacttgagcccaggaggcagaggttgcagtgaacagagatcataccactgcacgccagcctgggtgacagagcaagaccctgtctcaaaaaccaaccaaccaaccaaccaaccaacaaaacaaaccaagccccatagaagcaagactcacttcatgaaaatccagtctgcttgagccatgcattgaatcaatggcattacagttgaaacttattttgatgaaacccattacagttggacatgctttgtggaaagatattattatgattgagtcctctttgtggagtgccattagagttgcccttcgcttcctgtaaagtgactatagctttgtgtaaacccaacagggctgcgcactacttaaagcaaacaagaaagagcctcactttaggcaagcctatggcaggaaagcctcattttaggtcttagtacattatacacaaatccaatctgataaaaccaaggcatacatttctttctcaatagaatgttgcaccttacaccaagattctcagagcctcgggctgcctgaggccaatctgggtactctcataatacctcacctggcctgggttctggtccagatgtgtcagcatggacacagggctggatggggcagggggagagggactgccctcacctcgcactggtgcatgagctggaccaaggagtccccgatgaagacgacttcgggttccttatctttgctgtcagccacgaaccgatggtgctgcgggagcgcgcgagagggagtcaatggcatgcacgctccagggcccgccccgccctgctcccttaggcagcgcctcctcaactgccctcagtttcccaatcaggtagtgagagtggcacgaaccagccgttctcctgagccaccccccgcgcccccggactcctcaatatcccaggtgggaacgctcaccagggacatccagcgcccgtcgccctgtacgtcctgcaccggcgtgggcttgctggctgggttctcctctccactcatcttggcgccgcagctcctgcaggatgagcgagtcgggtcggcccgggagtgttccgaacggagctggctccgccacgcccactcctacccctcgcggcaacaaaggaccgtcccaacgctagcacacccgcggaggacgaaggccgatacagggcgccgcctcctctccagggacggaagccttcacttaggaggtaggtggaatcaggaaccttcgcttcccccacgacggccgcacagtgggctcgcccggcgcttcccgctcgggccgctgactcccaggccgcgcacccggcacggggtggggggagggagaggcgagaccatccagctcccgaggcggggaggagggagaaaccacccaccggtcacggggaggggcgaactacctgaagagtcgagagtgggcggggaaaatctagccctctgtctagcaaatgggaagaaaccatttgctgtacagagtgaaatgtgcggaagggaccacctactgttgcgggggggggggtgacccattcacgtggtggggggaggggagcgagtggacgagtccattcttatattcccttgaaggggtggctcgaatgcacctggctgggggggacgctcctattttctactgatgtgggggacagaaaaggaagatgacaaaatgtgaaaattcgaggctcccttctaaggagccactctaaggccgcgccagggctttagtgagcctatctactcgtgggcttcccctactcaaaacaccgtgggtgtgtgtgtgtgtgtgtgtgtgtgtgtgtgtgtgtgtgtgttgaaatctaaagtacatatctttgcattcaagacatcacaggacccctactcaaaacaccgtgtgtgtgtgcgcgcgcgtggcataacatataaactacatatctttgcattcaagacaccataggacctgcttggagggtagaagaaggtgcagaaagagaaaggaaattagagacgcctccagggctcaggtccagtctggcgtccctccggcagatcatcttgcagatctgcagcctctacactctctctaaacccacaggccaactgggtatgtctgagctctgaaacctacatccatagccaaggccacctagggtcgcgcctctcccccaacgctgccccaaattaatctcagacctcagtgtcttctcagatctccctcttctctgggaccaggtggggggctcactccctgctaaacgtcctggtcatgttcttgtagcctcactccaggtgggaccttcccatgtattcattccttcgaggtggattgatactgagacagagatgagtgttattcattgtgtttatgttttcaatccactttcctggaactgggccgggcacacagtggttattccacaagtgcttgctgaatgagtagtaaatgagtgggtcagctcctgaccttgtcccaatgtgtttagggagacagatccagacacagaggtgtaggggtgtcaaagttgtgtttgagggagagacagggacctctggggaggaagaggagaaggactctgaggactatgggtttcctaggagtagtatctcagctgggtctgaaagataatgaagaatgggcaagcagaaagaaaagacacaggtaatcactttcttattaggtttggggaatatcgtggaatagcttgattttaaagtctgagggaggccagcatggaggctcatgcctgtaatcccagcactttgggaggctgacatggtcggatcacttgaggtcaaccagcctggccaacatggcgaaaccacgtgtctactaaatatacaaaaaaaaaaaaaaaattagctaggcatggcagcacacgcccgtagtcccagctacttgggaaggctgaggcaggacaattgcttgagtctgggaggcagaggttgcagtgagctgagatcgcgccactgcagcccagcctgggcaacagtggcccagcttgggtgacacagcgagactctgtcttaattacaaaaataaacaaacaaataaagtctgagggagccaggtgcagtgatgcatgcctgtagtcccagctactggggaggctgaggtgcgaggatcgcttgaacccagaagtttgagaccagcctgggtaacacagtgagaccctgtctaaaaaaaaaaaaaaaaaaaggctgggcgcggtggctcacgcctgtaatcccagcactttgggaggccgaggtgggcagatcacgaggtcaggatcgagaccatcctggctaacacggtgaaaccccgtctctactaaaaatacaaaaaattagcggggcgtggtggcaggcgcctgttgtcccagctacttgggaggctgaggcaggagaatagcgtgaacctgggaggcagagcttgcagtgagccgagatggcaccagtgcacttcagcctgggagacagagcgagacgccgtctcaaaaaaaaaaaaaaaaaaaaaaagggcaagtgcctgtagtcccagttagttg

SEQ ID NO: 1560826 - DNA, 4001 bp, Homo sapiens
gtagctgggactacaggtgtacgccaccacgtccagctaattttttgtatttttagtagagatggggtttcaccatgtgggccagactggtctcgaactcctgacctcaggtgatccacctgcctcggcctcccaaagtggtgggattacaggcgtgagcccatggtgcccagcctatttattttttgagacggagttttgctcttgttgcccaggctggagtgcagtagtgcgatctcggctcattgcaatctctgcttcccaggttctggcgattctcctgcctcagcctgccaagtagctgggactataggcatgtgccaccatgcccagctaatttttgtatttttagtagagacaggatttcgccatgttggccagggtggtctcgaactcctggcctcaggtcatccgcctgccttggcctcccaaagtgctgggattacaggcgtaagccaccacaccctgcctagagtctctcactttaaaccaagccccaggctctgttgctcatgctgaggtgggcggactgcttgagcccaggagttcaagaccaacctgcgcaacagggcaaaaccccatctctacaaaaattacaaaaattagccaggtgcatggtgatgtgcacctgtagtcccagctactcggagactaaggtgggaggatcacttgagcccaggaggcagaggttgcagtgaacagagatcataccactgcacgccagcctgggtgacagagcaagaccctgtctcaaaaaccaaccaaccaaccaaccaaccaacaaaacaaaccaagccccatagaagcaagactcacttcatgaaaatccagtctgcttgagccatgcattgaatcaatggcattacagttgaaacttattttgatgaaacccattacagttggacatgctttgtggaaagatattattatgattgagtcctctttgtggagtgccattagagttgcccttcgcttcctgtaaagtgactatagctttgtgtaaacccaacagggctgcgcactacttaaagcaaacaagaaagagcctcactttaggcaagcctatggcaggaaagcctcattttaggtcttagtacattatacacaaatccaatctgataaaaccaaggcatacatttctttctcaatagaatgttgcaccttacaccaagattctcagagcctcgggctgcctgaggccaatctgggtactctcataatacctcacctggcctgggttctggtccagatgtgtcagcatggacacagggctggatggggcagggggagagggactgccctcacctcgcactggtgcatgagctggaccaaggagtccccgatgaagacgacttcgggttccttatctttgctgtcagccacgaaccgatggtgctgcgggagcgcgcgagagggagtcaatggcatgcacgctccagggcccgccccgccctgctcccttaggcagcgcctcctcaactgccctcagtttcccaatcaggtagtgagagtggcacgaaccagccgttctcctgagccaccccccgcgcccccggactcctcaatatcccaggtgggaacgctcaccagggacatccagcgcccgtcgccctgtacgtcctgcaccggcgtgggcttgctggctgggttctcctctccactcatcttggcgccgcagctcctgcaggatgagcgagtcgggtcggcccgggagtgttccgaacggagctggctccgccacgcccactcctacccctcgcggcaacaaaggaccgtcccaacgctagcacacccgcggaggacgaaggccgatacagggcgccgcctcctctccagggacggaagccttcacttaggaggtaggtggaatcaggaaccttcgcttcccccacgacggccgcacagtgggctcgcccggcgcttcccgctcgggccgctgactcccaggccgcgcacccggcacggggtggggggagggagaggcgagaccatccagctcccgaggcggggaggagggagaaaccacccaccggtcacggggaggggcgaactacctgaagagtcgagagtgggcggggaaaatctagccctctgtctagcaaatgggaagaaaccatttgctgtacagagtgaaatgtgcggaagggaccacctactgttgcgggggggggggtgacccattcacgtggtggggggaggggagcgagtggacgagtccattcttatattcccttgaaggggtggctcgaatgcacctggctgggggggacgctcctattttctactgatgtgggggacagaaaaggaagatgacaaaatgtgaaaattcgaggctcccttctaaggagccactctaaggccgcgccagggctttagtgagcctatctactcgtgggcttcccctactcaaaacaccgtgggtgtgtgtgtgtgtgtgtgtgtgtgtgtgtgtgtgtgtgtgttgaaatctaaagtacatatctttgcattcaagacatcacaggacccctactcaaaacaccgtgtgtgtgtgcgcgcgcgtggcataacatataaactacatatctttgcattcaagacaccataggacctgcttggagggtagaagaaggtgcagaaagagaaaggaaattagagacgcctccagggctcaggtccagtctggcgtccctccggcagatcatcttgcagatctgcagcctctacactctctctaaacccacaggccaactgggtatgtctgagctctgaaacctacatccatagccaaggccacctagggtcgcgcctctcccccaacgctgccccaaattaatctcagacctcagtgtcttctcagatctccctcttctctgggaccaggtggggggctcactccctgctaaacgtcctggtcatgttcttgtagcctcactccaggtgggaccttcccatgtattcattccttcgaggtggattgatactgagacagagatgagtgttattcattgtgtttatgttttcaatccactttcctggaactgggccgggcacacagtggttattccacaagtgcttgctgaatgagtagtaaatgagtgggtcagctcctgaccttgtcccaatgtgtttagggagacagatccagacacagaggtgtaggggtgtcaaagttgtgtttgagggagagacagggacctctggggaggaagaggagaaggactctgaggactatgggtttcctaggagtagtatctcagctgggtctgaaagataatgaagaatgggcaagcagaaagaaaagacacaggtaatcactttcttattaggtttggggaatatcgtggaatagcttgattttaaagtctgagggaggccagcatggaggctcatgcctgtaatcccagcactttgggaggctgacatggtcggatcacttgaggtcaaccagcctggccaacatggcgaaaccacgtgtctactaaatatacaaaaaaaaaaaaaaaattagctaggcatggcagcacacgcccgtagtcccagctacttgggaaggctgaggcaggacaattgcttgagtctgggaggcagaggttgcagtgagctgagatcgcgccactgcagcccagcctgggcaacagtggcccagcttgggtgacacagcgagactctgtcttaattacaaaaataaacaaacaaataaagtctgagggagccaggtgcagtgatgcatgcctgtagtcccagctactggggaggctgaggtgcgaggatcgcttgaacccagaagtttgagaccagcctgggtaacacagtgagaccctgtctaaaaaaaaaaaaaaaaaaaggctgggcgcggtggctcacgcctgtaatcccagcactttgggaggccgaggtgggcagatcacgaggtcaggatcgagaccatcctggctaacacggtgaaaccccgtctctactaaaaatacaaaaaattagcggggcgtggtggcaggcgcctgttgtcccagctacttggg

SEQ ID NO: 1560827 - DNA, 4001 bp, Homo sapiens
gcactctcccggctctctgaagatgccctcgcaagccacatcaccgtttgcagagacgcagtcttgtgtcactggcttgggggctggttccactctgctcccaccagggaactgagtgccctctgaggctaggggctctgtggatctcgtcccctgccacactcccagcacccggcacagtgcccaacagtcaacccccagcaatgtcacatcctctgcaggccaggcagggcttcagtggggaccgaggcaaggaaccccacagagcaattccaccatgcaccctaataattaaggtaaggagggaggtaagggctggtcagatgagagaaaaagagcctgcagcaaggcgagccagggtggtcccgggccagctgagagtgagcgacccgtcagtgagagagggcagggtggggaaaggattcccagcagaaggaacaggaaggtcaaagaccgggcgggaggcatgggcctggagttggagaacagtaaaggggctggggagaaatgggcagagccataagaagtgaggtgggagtgactaaggaccacagtgagagcttagggttttaagaacagtgaacaccccgctctgcccagggtaccacccagggacactctccccagtcagaagcccgtcggactcccttgctcggactccagaccacctacaaacaccctactcccataggctcacaggaatcttccctgccagatcacacccttccaaggaaaccaagcagacaatccgatccgcccagggagtggcccagccctgcccagccccctgcttccaggagagacctaatggctggcagcggacaatgtggcgaccaggggcaggagccctggaatcacccaggcccagcttcgattctaactctgccttcagcagaagcttctgagcctcatttttcccgtctgtaaagtaggttcatcttgagcactcacttcacaagattgcagcaggagtgaaatacgaccgggcacacagggcgtggagcacagtgtgagccctcattaaacattaaccgacattatgatgatttgagaggcggtcggccagagcagggctctgggccagaactccggagttagaatcccagcgcacaacttatgcatcgggtgaccttgtgcaaatcacttaacctcttaataccaggttaagaccccctaagactatagtgaggactgaataagctcatacaagtaaagcgttaaaaagagggtctagcccatagtgtttcatgagtgtttgccattattatttgtgggagggttcccccttctcctgtcaccaggaagcatctctgacccggcccccccccccccccccgtcccccgcaatacgccctccttgggttttaatttttgactctgggaaacagctgccccgctgtcagattctcacctttgtaccttctaggcacgccccagctttgaacccctaaaagacgcccccgaacctaaaactcattcatctgctccgctaggggcagctttaaacctccaacctggcgcccctggggctgtgacctctgaccctcgtgggggcagccttccctcaaattattaactttgaccctgccttttttgagactcgcccagaacccctcgaacgcgcccccacttcgaatttcaaactttgcactccccttcgccacgcccccttcgctggtttgatctccgacctccactacaactccctccagtctgcgttaacccccgacccctcggacgcgacccttccctccaccagtgacctttgaccccggcggccccgcccccctcctcgcggaaacgccgtcccgccgccagcgcccggcccaccgcaagcccctggccggaccccttatcctaccggctcggcgccgcagtcgctcgcggcctaactgctcgacctggaactccgcgccctcgcgcctccctcagctctcttgcaccgccaccaccgcggacactcccgccgccatgttgaatccccaacgaacatccggggctttcccccctcaccgcccaccagtccccatagcaacgaggctgaccgggcagtgggcagggccagtgcgggggcggagtcgggcgcctctcagggcccgctccagcctccgattggtacagagcgtccaatcggagaccttcgggcagaaaatgccaagcggggattggaaattttggaaaaggtgcgggaaggctggctcccggcccactgaggtccttaaaggggaaatgactgttttcgtgtgataccgattttctaacttcccccccagaaggagttaggggctgggagaaagtaatgagttaatgggcagaaacagttcttaagcacttactaggaggcaggcaccgggataagtgttttacttgcattttctcgctgcatatacaaccctgtggtataatatcattaatacccattttacagataaagaaacagaggttcagagggtgaaatagctggcttagcatcatagaaagaaggtaatgagttttgaacgctggtctgtctgagcccgggaacctgagactgtttgctcttcaatttttaaataagtttttacgaagtaattggtcaaaatattgaaaacaaacagcagacatcttctttaaaaatttttttaaattttatttttacttatttatttgtcttgagatagagtttcgctcttgttgcccaggctggagtgcaatggcgcgatctcagctcactgcaacctccgcctcccgggttcaagagattctcctgcctcagcctcctgagtagctggaattacaggcgtccaccaccacacccagctaattttttgtatttttagtagagacagcgtttcaccatgttggccaggtcgaactcctgacctcaggtgatctatccgcctcggcctcccagagtgctgggattacacgtgtgagccaccaagctggcctttttcttttatttttaaagagagagttttgttgtgttggccaggctggtctcgaactcctgggctcaaactatactcctgcctcggcctcccaaagtgctgggattgcaggcgtgagccactgcgcccggccagacatctctcctcctggatcttattcactggactccagccttcatgctgttcctgaactcttgtcaggtgcgctctcacctcacagtctttgcactggttgttcctctgcctggaacatactcttcccccaggtatccttatctctccctcccttttttcagggctttacacagatgtcactttctctgtgaactaattccctcgctcaccctaaggaaagcagcaaacatccctctcacatactaccaaactctgtctgctttgttcttatttctcactcctaattgtagttattgcttgttggttgtctcctctgctggaatgtcagccccatgacaacatggatttctgtctttgttcactgctgcattcccagtgccccagcactgttggcatgtagatgctcagtaaacattggtggaagggctgtttgaatgcgtggtaattccaccccttcagagatactcttaaatgtttggtgcttctcctctgccccagaacagccacatagtaggcatttaattaatttctactaatgtcggtggcaacaatgaatgaatgattgaatgatgagttaatttttctttatgtttacctatcttttttctttttatttgttcattcgtttttttttttgtttgttttgttttttgtttttttttttttttttagataggggtcttactctgtcgcccaggcgggattgcagtctgaaactcctgggctcaagtgatccttccaacctagcctctcaagtagctgggactataggcataagccaccacaccggctaattttctttctttctttctttttctttctttctttctctttctttccttccttccttccttccttctttctttcctctttctttcgacagaatctcactttgtcacccaggctggagtgtagtagcatgatcttggctcactg

SEQ ID NO: 1560828 - DNA, 4001 bp, Homo sapiens
aagcccgccggggagaagaacgagggggcaggtgtccaaggccgggcggcaccagatgggcctgtccccacccattgtcagcccgggaaccggggagagagtcgtcctcgaatggcggctcacagcagccggttaacactgggtgcctgtcccatgtctgcatccccaaaagcaatgatgacccaatgggggacctgtgggccaccctctgacccaggacggagaaaccgtggagcagagcaggaggcaccgaggccccccggccccaggtgctgtgtgatggagggggggtggggggggggcagcagctcctctctgggcctcagtatcccccgtgggaaaggaaggggtggcaggaaggaaacaatgggcccgacccggagtgttcgctgacacccctcctctgggagggagatctccgtcgtcctcctaggcagccccctccccacagccacaccctgcccaggcctggctgtcagaggcccagaggctcctccggggcctggcgagcagggcagataaacaaggctggggggtgggggtgtggagcaggcaagtctgggccctggctcccctgagcccctggctgagctcccggggcggggtgacggggagaggggtcaggcctttgtctgggttttcaaaagcagaggacactgggtgtctcgctttcccagggagggagggaggcagcggcccccacccagccgcgggcgtggcgggtcacgggtgaatccccggggaaagttggcggcttagaaaacacgcccagtgggaagggcagggggccacaggcggcctccagatccggtcttcggtcctcgggctggggtggggacccgggcctcagcagggcagctggctcccctgtcctgaagtgggcaggtgggtgaccccaggaggagcctcctgacccctgcccgtgcagtgcccacctgtgggagtgaggggcagaggggcacccgagcaccgggaggaggggaccggtgtccgaaatgaccacgcgccctcgctcggtgcctccactggccaccccccccccacacacacaggcgcagccatgcgggggtccagggatcccagcccagggccagcccactcctgtagctacaccagtggagccccagctccgagacacttccccgagagggtatcccacccaggcgccccgctggaaaacgccggttcctctcccttctcacacaccccagagacccgggaagccgagggcagcccctctccctccagcggtaactcgggacctgcgcagtggcggggggctcaggacacccctggaggcccttgggaagggcgggggtggggggcaccggcccgcgcgcgcgtccagggcgccaggagccgtgcgctcagactggggcgggggaagggtgcgtgagcgcgaggccggaccggtgcaatctggggaggggtcgctccatctccccggggccacccacaggtggccgagagccgaggctcgccctggagacgcgggcggggcgcgggcggagacgcgagcctccccctccccgcgtcctggactggcccgagccgccgctgcccgggtccccacgcgccggtgggtgggcagccggggtccgggagcggggaggcctcccggcaggcgcggcccagcccgagtctcttcccggctgcgctgcggccccagcagccccgcgccgcctcctgctcctcgcgggggcagcgacgcccccaatggggcgcgagagagggggcctcccccctccccggctcccggagctccgggcccccagccccgcggcccgagcgcgcctactcactccatctccccgccgaggtccgggtgggtccgcggtgccgggcgggggcgggcgcgggtggcgcgcgggggaggggaggggagggggacgcggcctggcgggggccggggcgggctaaggcctggcggccggggctgcgcggcgcgggggcggcggcaccggctcgggcatcgccccgcgcaaagctgctgtttattgtccgggcggcggcgggcgcggggggtgggctgggcgcgcgcgtctccggcgcgctcccctctccctcccgcccgccccgctccccgccccgctcccctcccacctccccgcgctgcgagcgggcgctgcgcctcctgccggctgcgccgccgccgccccccgccccgcgcgccccgccccggggcacccctgagaagggcctaggtctgggcgcggtgctgggacccggctgtcaccaagtcccgcccctccccagctcctgggccagagccgggaccctcgcgaagtcagacaagcaaaggcctttctcgagagcccagacgccgagagggacacacatttcagggcgagcgaggggataggggggtcctggggaggccgctgcgaggagctgacagctccctgcacccccggccccgctcgcagggtccccaggcctcctttgccggagtatctggtggagggcgctgtgcctgcaaaggccgggggttggggtggagacaaccgcaggtgctgatctgtctgtgccctggctgggagctgagcctggtccccggggctggaatttaatcggccccagggcccccatggcacactcactaaaggcccagcgaccagacgaccagagtgagtgagagggacggtggagaatcagggagagctcaggctttgtcctcagagcactggggagccacagcaggagacaggcaggacctgtcttccccaacatgtaggccttgggcccagcttcctggtttcccgtgagaacactgcagaccagccccagcacacctactcatgggggtccagggtgggcaggaaggaaagattcttccaaacttcttagttttcttataaaacggttctcctctgccgatgtttgctgaatggctgtagatttaaaggaaagtagccccggatgagctgtggagaaagatacggcaggatgtaccccaggctgaagaaggccgtcaacaccttttctttattcctccctttttacaatgaatgtgtattcattttagcatttaagacaataagataaattagcaaaggttaacaaagctaagatcctaaagaatatcaggggtcccgggtctgtctgattcccagctcacccatctccaagctgtgtgaccctgggtctgtttctcaacctctcggagccttattcccccccacccccctgcccccacccttaaggctgtgggagggttaactgagtgagcacacacaaagggcttggcacagggcccagcacacactagctcagggtttggcaaactttttctgtaaagggccagagagtaaatattttcagcattgcaggccacagtctctgcggcaatgactctgctctgccatcgcagagtgaaagtagccagagacaatatgtaaaaccatgggcatggctctgtgcccataaaactttatttacaaaaacaggcagtgggccagagcttatcccagggccgtagtgtactgacccctgcactaggcacccaataaaactttatttacaaaaacaggcagagggccagagctgatccgagggccgtagtgtactgacccctgcactaggcacccaataaaactgacctgtgagtcgtttcttcacttccccttggcctctgtgttcttttagtccaaagtgatttattgaacacctactgtgtgcctggcaccgttagtcacctgtgatgcagaagttccatttttgcggccaggcgccgtggctcacgcctataatcccagcactttgggaggctgaggctggtggatcacgaggtcaaaagtttgagaccaggccgggcgcggtggctcacgcctgtaatcccagcactttgggaggctgaggctggtggatcatgaggtcaaaagttagagaccagcctggccaacatggcaaaaccacttctttttttggctggggtggacggagtttcgctcttgttgcccaggctggagtgcaatggcgcgatctcggctcactgcaacctc

SEQ ID NO: 1560829 - DNA, 4001 bp, Homo sapiens
gaccaccccacttcgtccctcccaggctgggaaagacataccccgccccggccaagctggaaccaacgcccccaactgcccgctcccccccaaaaattggacagaggctcctatcgtcccccaaaccgacttgcacagacaccccccactccattccccaggctaggcaggcgcccccgcccgcccccaaccttgagacgctccacgcggagtttctcctcctccacctcccggcgcgcggcgcggatctcctcctgcagccgccgcttctcctgcgcacagaggacccggagctgcccgccggccgggcgcggcctccaccacctcctcttccctccctttcccctccctcctccgcggggctcaccggagctcccggggctcccgaggcagcgagcccggcgggggtggcccagcgcgggtctgcacccagggcggggagggggctgcggaggcgctgactcagcggcgggcggagtggggggggcggggcgggggcggggccggccgcgcccgggatgctgcggaggcctcgcccgcgcccaatgggggtctgtggatggggggtgtagggggtggggccttgggacagctatcgggggaggggcagagctggggagctccgagatacgaggttaagagaaatggggatcaaagggagggtgcggccgtacgcggtggctcacgcctgtaatcccaggactttgggagaccgaggcggacagatcgcttgaggtcaggagttctagcctaccctggccaacatggtgaaaacccggctctactaaaaatacaaaaattagctgggcgtggtagcaggcgcctgtaatcccagctaccggggaggctgaggcgggagaatctcttgaactcgggaggcgcaggttgcagtgagcggagatcgcgccactgcactccagcctgggcgacagagcgagactccgtctcaaaaaaagaaaaaaggaggggagggtgctagtgagatgggggtccgaaatggggatgcagccatgggagcccagagtaatggagtgtagacatggaatctagagagatggggtgcagaggtgggggtgcagagagatggggtacagaagtggggtacagtgagatggggtacagaagtggggtgcagataggtggggtatagaagttgagtgcgaagagatagggtacagaagtggggtatagagagatggggtgcagggagatggggttccatagatggggaataaaaaggagggtgctagtgagatggggatccaaaatgggggtgcagccatgggggtccggagagatggggtgcagagatggggatcaaaaggaggatgctagtgagtagtgagatgggagtgcagccacggggtccagagatactgaggtgtagaggtggggatcagggagatgggatacagagataggggtcagaaatatggggtacagaggtggaggtatggatagatggggtatgtaagtgcgtgcggaaagttggggttcagggagatggaggagggaaggatgcaggacagagataggatcagagtggtagagacccagagatgggggagtccagagagacgaggaagtcagggatgaaagttcccaaggaaggactgtcaggatgggggctccgaggtagggagatttgagagatagcggtctgataaaaggcggtccgagagatgcggctcaggcatggggtttttgggaggctggggttcaggaatgaggcatagccgatgcaggctctggaagtgtgggggccacagctccccattctgagggtggtagtgaccagacaggaactggggggcagagggggctggagaattggtgtggggagccctgggcggggctggagctgagggcgctctccgcagagatgacggagagacgagaagggagcatggtggaaagtttgggggtgcccagggcgcggggagggcgtcacttacagcgatgacttctagccgctgccggtagagggagctctccgccatgggcctgttgggagagggcaggggcttcgaggggctcccatcttgaacgcccccctcttggccaagatccctgagcagtatggaaattgccccgagcccagcactttgcctctgtttcccctttgcacctgggaagagtctgggcggggggcgagggtcttgggaggggaactgagcagtgaccacgactggtgaggctaaagccctccctaaatctggctttgtctctctcagcctcagtttcctcatctgtaagatgggcaggaatagcttgaccaccctgtccttgccacccccgatctcagaggacgcttgcaaggagctattcatgcagggaaaagcttagggtacagtgctacaaaaatagtcccattgtttatgaataatcataatttatataattccatgatgaataatatgtatgattaattataataaccatctccagtccaacctgcagaaactctcaaatgccaccaggcccctaacaggctgtgtgcctctttctcttcccagtcccacaccctctctggacctcagctcctacccagaatttctcaagcgctgggggggcaagcgagtctgtggccctcccactgttgccatggtaaccccagagctgcctcctccacctgctaacccccctccctggggacaaggatcactgggtcactctgcctaggactggactctgagctgggaggagggggacttgccatttaaggtttaactcgagattcccctgtcattgtcttcctcaaaacatctctacttctcagcctccagagtggcctctggacccacttaggctcccgtggaagctggagggtgactgtcatactgcaggatgattagggacagtcagtgtcacaccaaccttatcaacacagacatgcattgggcacccctgactatgttgctatgttgaccacgtgtcacaggccagtatctagaaagcgatgtctctctgcctgtcatctccaccggcatggacgggcgctgatcaaaccctcaaacatttattaatttgaacagtcaccctactgggtaagcctcattgcctgaactccagctaggaccttccagatcttctgtggccacaacgtgaaggctattagcacttatagtgctatatatatgatatatatatactatatatagcatatagtgttctaagtgccccacggggtttccgctaggttcccacagccacctctgcctccccctccctgcctctatcatgacacagtggagtcaactctttgctgagttgacattccagctaagaacaaaatcagccaaccattagctagcccgtaacacgtgccaggtgcaatgtaattcactgaatcctcccaacgactctaggaggtaagctatatgaatgtgtccattttatggatgggaaaactgaggttctgagaagtggcagcagtgtccaaggtcatggagccaagatcagaacttgaagctatcagatccaaaatactgagaacacagctggcgaggggggtgggggtgcaggtctaggaatccccatcaaggtagctaagagagcagcctggagaccctgaatgctgtttggggcaaggaattgaagtcatgctctttctttttttgagtcggagtctcgctctgtcacccaggctggagtgcaatggctcaatctcagctcactgcaacccccgcttcctgggttcaagtgattctcctgcctcagcctcctgagtagctgagattacaggcgtgcaccaccaagcccggctaatttttgtatttttagtacagatggggtttcaccatactggccaggctggtctcgaactcctgacctcaggtgatctgcccgcctcggcctcccaaagtgctgggattacaggcgtgagccaccgtgcccggccacgaagtcatgctttgcaagatatcccaaaggaagcccagattctgtgcttataggtttgcccctgggggagggctgaagtcccgtggtctcctgtacca

SEQ ID NO: 1560830 - DNA, 4001 bp, Homo sapiens
gcccaggctggagtgtagtggccaatcatggctcactgcagccttgaactcctgggctcaagcgatcctcccacctcagtctcccaagtagctgggactataggtgcatgccaccacacctgtctaagattttttctttttccctaagaggcagaggtctcactatgtttcctaggctggtcccaaactcatgagctcaagtgatccttccgcctcagcctcccaaactgctaagactacaggtgtgagcccccacactcagcctcagttctgcccctttacaggtagcaactcatttacacctcaccatgaggttgtactaatattaccccattatccagatgaggagactgaggacagagaggttaagccacttgcccaagattaggcagcaggtacatagcaaagctgggattctaacccacgtggtctgggtgccaatggtccagagtccaagctcttactcccacagtggaaggatcctaatcaaagatcgggaggcagtcagcctcgtggggaagaggagaagagggatggagaaggggctgggtaacccagctctgttatcattcatccactggttccttccacaactggctctgaggcctaccgtgcatgaacgaacaaacgtgccaggtcccggaaacacaacagagatgcaatgaacaaggacagcagcggtccccttttgagagcaggggagcactctctgtgggctgagcaccatgatcattccccacacttccaggtgttccacagcctgtacttcctattccacagaggtggatgatggaggctcaggaggaatgagccacccgcctaggggctcacagtgtgggattcctgagccctcaaacaacgaagcaccgctgggcctctctggtagaggcatagaaatgagtcagggacacttacctgggtaagacagatggacttgctctggggcagcgctgggagcccccagggacccctggactcccaaggagaatagcaggagtagacagtaacaggaccagtagccaggaagggggtgcatggtggtggggtggtgatggcagaccggggaaaagcagggggactgaggagatcagctccccacaggtacagcaggaagggctgggaggatggggaacagaggatgatcaggcagtgctctgggggacaacagaggcagggcagggaggtctccttcaagatgggtggttatccaggtgctggagagagaaaccaaaaataagaatcgctaaggaacagcagcagagctctctgagcctcactcacagtgtgccaaccgcttgacatagattaattcacggaagcctcacgacattgctatgaagtggtggctgtgagcattgtcatccccatatcacagatgaggaaaccgagcagctgagtgattcagctgcacagctaggatgggatggagccaggatttgaacccaggagggcctgattccagagccttgctcctaaccagagctcactctcagtgctgggggtctgggagcggggtggaggctgtgtaggaggttgcattccgcagccccatccccagctttccatcctgctgttagaaaccccagttctcctacctactcccgagattccaagcattcccgcctgcccccgggacctcgcctccctactccatccttagccttctattttgctcctagtgaccccaatcctcccacaccacccccagatcctttagagcccatcatggccagagcggccgcatcctctctccccatccccagcgtccctgcccttcccccatctgtacccaccccccttctctccagcgctttcccgcctgctccagctccgtctccagctgccaggatggagccgggtcgggaccatccgggaaaggggacgccctcccggaccccggctcaccctcgggggcgccggctgcccgcacgcgcctctcccgccaccagcgccgccccggtatttatgagttcgcgggtgccgaggcctcttgccgcctacagccgtcccagccccggaagagccggtcgcctcggggtgacagcctccctagacagccagggccccgggtcccacaggtccggccggtcctgcctgggcgccccacacccacccgcccaccccaccagggcgtggcgcgggaagggggacccaggaaggttatgatacgtctccggcgcgccacctctgagccggccaccaggtgagagcccaggcaggtaaccctgcgctcgtccctcaggcgcccactcatcagctggggagccccagggcacggacaccggcccctatcctggccctgcccgatccccaggtacccaggtgtgcaggaccgggggatccccaacctttccagcctcgctgcatcttcctccagccttccggcttccttcctttccatgctgagcccactgacccctcctcagaagcccggggcaacctcaaaacaaaaccagaatcccggaattgcagtgggctttctgagctgtgcgacctaggtgagttattcaacctcgctggaccttgggttttttcacctgtaaaaaggaggtgatgctcgtatataccccgtgggctgttgtgaggagtaaacgagttgctgcatgaaatttcatgccgataacagggcccggcccagagtaagggctggataagaatcagctgttctttttaatcgtattaatgcaggaactccagaaactgacgtctagggaacaagttagggttctcccctgtaaacctttgcaatctgtttgaacgtgaggagcggctgccacaaaaagagaagcagggaagaactgggggggcccggatttccagtcgtttccccttcctgactgcagatacaatgacccgccaccacttggctttgtaaattcagagcacataggcttctactgattgtggacaccaatttcagaaattggcactaggagtgtgggaaaatcaaaacgagccctttgcactgtttgagtttttttttttttcttcccacttccagagtctccattacagcctaaaatataatgaaagtagctctcataaccaaacttgagtacctgccactcctgtggcccccaattataacctccccgtattcttagttcgtccagaatgggaggttcctaagcttttttgtgctaaagatgcctatggcaagctggtcaagcccttctcaggatcatgtcgttacatgcataatataaatacacagaaatacaaaggaaaccagtgctattgtgatacaaggtgttggggggtttttttgttgttgttgttttgtttttgtgtttgttttttggttttgtgtgtgtgtgtgttttgtttttgttttgagacagagtttcactctgttgcccaggctggagcacagtaacacgatcttggctcattacaacctctgcctcctgggttcatgcgattttcgagcctcagcctcccgagtagctgggactacaggcatgaacctggctgaaaacgagaagttttaaaaacacacgaatatacatgcatatatttctattagccatcagagtgatgacattatcacaggtcaggtagtctctggagaatgaaaaggacaaacgtcttaatatcattatgaaaatacttttgacctcactagcccctgagaaaggtcttgcggacccacaggtgcccccagaccacattttgagaactgctagattaaagtgtagtaaaaggagaggtaaaaaaagtttcccctatccaagttcacgtagctcctgaattcccaaccaccagcccaggtgaaaagagcccactggagttgcctctggttggaccctgactggcggatgagggcttatagctcaggtataagcttgcggtggggaatggagcatcgactctggggctagatggcctggttataaatctatcttcagcactgactaacttagacaagtgatttaaccgcacggtgcctcggtttccccatctgtgaaatgggaacaatagtagcaccttatagggttgtt

SEQ ID NO: 1560831 - DNA, 4001 bp, Homo sapiens
cgtgattcacctgccttggcctcccaaagtgctgggattacaggcgtgagccaccgcacctggccccagccttcctttaaactcaactctttccctccctggctaggaactttctcttcccagccagactccgctttttacatcctctttcccacctcagggcctctgaaggtgctgtcctctccaaagatgttcttctccacctggcttcctatagcatgcaacccctatccctacagcttttattgccatttattttatttttttcttttctcagattggtacaggatggtctcactatgttgcccaggctggtctcaaactgctggactcaagtgatcctcccactgggaggcagctgggattacctacccatgctaccatgcctggcttatacttttttgcttttgtttgagacagggtctagctctgtcacccaggctggagtgcaatggcttgattcggctcactgcagcctcagcctcctaagtagctgggactacaggcttgcatcatcacacctaactaattttttaattttatttttagtagagacgaggtcttactacattgtccaggttggtctcgaactcctgagctcaagcaatcctcctgcctcagcctcctaaagtgctgtgattagagatgtgagccactccacccagtccttattttttgctatttacattccctcccctaaatcatgtactcgagagcagggactatgtcagcacccggttccctatccagttattgtaaggattcaataaaaatttgctgaattcattaaaaagaaaataggtcttccatctccacccactcctctactaacccttttcccaaaagttctcgatggttcccacaccaagttaccccagttcagttcttcagtctcctgcagacattcctgagtcccattcccagccactcactctccatcatctgccctggaaacttcccacccacaggccgggctcggtggctcgcgcctgtaatcccagcacttagggaggccgagacggaatgagtgcttgaacccaggagtttaagcaactatagcgagacccctgtctctacaaaatatacaaaaaaatcagccgggcgtggttgcacgtgcgcctgtggtcccagctactcgggaggctgaggcaggagaatcaactgagccggggaggtggatgctgcagtgagccatgatcacgccactgcactccagcctgggcgacagagcaagaccgtgtcaaacaacaacaaaaaaacttccagccgcaggagtcccattaacgtacccatttagtcattcactcgtcaaaagtcccgtacgtgcccatttctcagccctactccctaaacccctaaacccaaccttctcgccccaagatgagctgctgaaaatccttcacgccactgctcggccccataaggcctatccagcccgttccgtttgaaccccatacatcccttcgtcctcgggacccccctccagccctcctcaagcgcccctcgtcagtctggcctccacgccccgtcccctcagcccgccaacctcactgccacgaccctgcgtggcccctgccgagcccgcgggcagcacctggcctgtgcctcgtccaggctctggtcggtgatggccatgatctgctgcaggacgtcgctcgtgtcgaggcgccgcggggcggggggcgatggcgcggggcgcggcggggcggccatgagcggcagggccgggcgggcgctgtgagggtgccgtcgagcctggagcactaccactggcgccgcagccaaccgccgctgcctgagcgccgcgcccgctctcgctcgcgcctaagccacgcccaccgccgctatcgccagccaacccgtgtattgcaccgcctacagacacgccccttcatctccgtcagccaaccggcgccacgcaccgcccccgggactcgccccgaacttccccctctccgggcttggactgggtttggggttgccgaggcaacggcacttctcataagcgccctccttccccttgagagagggcagcgctggctccgctccagccagaggcccccatccctcacatctcgcgcggtgcacgcctccttcagccccactcgcatctcctcagagttcctgctcctcctcagggcccccttctcctcaaagccctcggtcctcagagaccctcactccccagagcaccccaactcttcctccaagccaccccctcctcctcagaaccccacacctcttatagcttgatcgacagcccccattcatttccagaagccccaagccccagacccctgctcagtccccctaatgctccctgcatcctcagccccatcaggtgggccactggggcccctggctcttcctctagagctttccacgccccgttcacctggctaaggcggggcgcaggcgtgcgtggttgatggcaacgaggaggtcagaacgcagcgcttttctccactgcagaaatcaattccagtcacctttcaaggtccagctgaagagtgacctcgcttgtttattcatcttcgcagattacagttctgggcatagaaaatgctaccacgtggttaccgaatgaaggaaggatgtttactgagagactcccctgcagtgtaccccaaatcagagcgaatcctcacatctttgtttctagtccttaggacacagcatcgaaggctcctagtgcacaagaaaaggaactgggcggtggctcatgcctgtaatcctagcactttgggcggcagaggcgggaggatcacttgagcacgggagtttgagaccagcttgggcaacatagtgagaccccgtggtggtgcacgcctgtggtcccagctatttgggacttgagaggctgaagtgggaggatcacttgggcctgggaatttgaggctgcagtgagccatgattgcaccactgcactgcagcctggttgacggagaccaggtctcaaaaaaaaaaaaaaaaaaaaaaagtaatggcctggacatgaatctcttctccaaagtcacagaacctcctggagcctatttgctatgaggacagtctccagatgtgggctcagtaaaaggtcctcagcctgctggctgggagcccttccagggtggggcccacgttctctccattgctgctggggaggaaattcaaacaccatctggtatggctggattggagagcgtcgggagactccaaaggggacggcagggagtgaaaaatgaaagacattgaccgagtgtctggacaatagggaaagctctctgatgaaggaaaccgacacttggctccaatgacagaaagtaatagattgcatgggagccacggagaccagtgcctgttcaaaaggtcacccacaagcacagcactgcccaggaggcctgaacagtagtggccttcaggctgggtgcagtggctgacacctatgatcccaacactttgggagtctgaggtgggagattacttgagcccaggagttcaagaccagtctggggaacatagtgagaccccatctctacaaaaataaaaattaaaaaaatagctaaattagctggtcatggtcccagctacttgggaggctgaggcgggaggataagttgggctcaggaggtcgaggctacagtgagctgtgtttgtgccactgcactccagcctgggtgagagagcaaaacctgcccccaaccccaacaaagtagtatccttcagagaacttggaggggtgggcactgaaagcttcagggaccagcagagacaaaaatttgaagccacttggtggagacgggagatcgacaagaggaaatggtctcgaaggagacccacggggtgcaggttaaaacctggaggagctgatgtgaacagccagctcagagcgcctgagacagagttgccttttttttttttttttttttttagacagaaatcttactctgttgcccaggctggagtgtagtggcgtgaccttggctcactgcaacctccacctcctgggttcaagcacttct

SEQ ID NO: 1560832 - DNA, 4001 bp, Homo sapiens
agcctggccaacatggcgaaaccccatgtctacagaaatacaaaacttagccaggcatggtggcaggcgcctataattccagctgcttgggaggctgagggagaagaatcacttgaacccaggaggtggaggttgcagtgagcccaagatcacgccactgcactccagcctgggcaatagagtgagactttgtctcaaaaagaaacattttactctcagccatgagtaaggaaccgagagcagaggagtagatggtttccttattgccttctcctggaagagtgaagcggatcccacgcggacccctttgtaattggcagggggcttccagtgaagacactgaaccctgaagccgtggtctggggcagggtggtgggagaggtgggcgggggggggtggtcccggctctgaggtgtgtgcccctccccccttcctgtcccacccgcttctccacccctagcttcaagagatagaggaattcaaagagaggttacggaagcggcgggaggagaagctccttcgcgacgcccagcagaactcctgaggcctccaagtgggagtcctagcccctcccctgatgaaatatacatatactcagttccttgttattcatttaagtgttttattcttttatcagtttttgggggccgagtgagacccaggatgcctcaggccctcagggggcttgtgtcgggggctgggggctgctgttccgacggaagccgagagcggtcgggtcctgaggggtgagcaggggttggggactgagggtcccagctcgtttctgtgctccgtcctgtggatgaagaggggtcagccagggggagggctcaagggcagtgccggccacaggtggcgaacaatggagagagggtgcaggtagccaccgtgtcccacctcattgtgagcactggtctatgtttaccctcaatatctgccatttagggtggcatttgagtgtgaggtggcaggtcttggggccctcgctgggatcttgatcagaacccaagcttcgtgtatgtgtgaagtcaacagatgtgagtatacagatgtatatatcctatgtgtgagcttacgtgacttcctccctgggatactttcctaggaaggggtcctattttctccctttggcctccccagaaccttcagacttgggggcaggagccacaagttccagccatgggtcttacactagcatggcccctgtataaccttgggcccctctagccactgcctgggccttggtcctcccatctgaagtcagggcagcggatggacagagatggggcaggccctgttccctcctggctggggtggagggcaggatcggagagcactgcctggcgggtttctcctcgacatcgccagaacatcacctaccttggaccccacgggctggaagccgggcaggctgctgactgtcacacgttggtcatccatgcggcggccctgggtactggccagcatgtccatgaggctgtccatctcgggggtggggtcgctctctgcgtggacgttcacagacttgggaggacacagccggagtgggggcccccaaccctaccccttcacccccacacagatgcttcagggtgcacaaccacctcccacatcccgtgcccccaggccctccagatgaccacttgccctgcactcccaccccgttcacgccccatggacagcacccccgtgcccatgctcacggctcttggtggtctggcccggcccggcttgcagtgaacagcgctgtccctccatccggtcgccctgcacgtggctcagcagattgaagaagccctcctggtctggggagcccgcctggggacagactcgctcagtctggttggcccttcagcttgggggcccctccccaaacttcctagccagcttgctcacaccctgaccccggggcctgccgtccccacttcctcagctctcaccatggtccccgccgatcctctctgcagagctgttctgaatgagacatgagtctccttcccaatcccggcccccgccccaggggccctggccagcagtgccacttcacgtggtaccgcttcaagggacaggctccgatgcgtgtcccgccgtcctagattggggcctgatgagtgtggcctgggagctgggacacgaatcagggaaacatggcccaggagctacccccaggtcccagcatctcccatcaataggggtccacacggagagccctgccctctgccctggggcctggcactcagacccccaagcccaccagcccctttctacagccacaactgggtcagggggtcctaggagactcactcgttaattaggtgccctacaaactagtcttgtcaatcatgggctctgagaccttgagctgggggtggggtgggggcagggccctctcacctcggcacaggggcctgagccttcctccgtcttctcctcctgatccatcatgtccctggactccagtcacttttctgctggcctctgccccggcccagtgccagagagggccttttaaacgtccaggacgtgggggtgtggattccccccatccccaaatccccagctcatgccccatctgctcccacccaagcttaagccccataaagatcatccagataattgtttgcccacaacgatgctggatctggcatggtgggtagggggcagggcgacctgagcttggacctcgctgtgcccagcagcaatgactggaccccagggactctcaggtgtgatgtcacaaaaggcctgagcagcatccccacagttggagaagggaggccaacagtgtagggtggtagctggcttagggaggacttgcaggtgtccccacccagccacccaggttcccccactggctcctgaaagggcagctgccacctgcagtcggtacagaaaaaggaggttggagtcaaaggccccttccctccctccctctctgcacctgcctcagacaccaccggccaccctagctccagctctgtctccttggcagcaagtcaaggggtctcccagccacccttccttcaactcactgtccctggagcctggttgcctgccccagaccccaaaacaagaaagtctggggtctcctgttcccacaccacctaaatgccaggttgagctatctcctctcctctatcaccctagccccaggtgggaacaggaggcgagactccctggggacagaggcaggcggggagaggacgtccctgccttttcccccgagccactgtggctttccctcagtgcccaagcaggggataccactgggaggtccccatccccttcccttccctccccaagacgcctttacggaaaccagtggaagtttcatctcagaatgaatgggctgcactatcaccacctctgcccgagcctcctctgttccacaaaaggccaagttcacactctctccctctatgccaatgaagtgtccccctcctcagtacgtgtatccctttcctaggcctgccagaacaaagtgtcatagaccagatggcttaaaacacataagttgacttttgttatatatttttatatagagatgaggtctcactattttgcccaggctagtctcaaactcctgggttcatgtgatcctcctgcctgggcctcccaaagtgctgggattacaggcatgagccaccatgctgagcctttaaaatttttttttaacaaatttattgagccaacgttccagaggccacagcctgaaatgaaggtgttggcagagctgtgctccctctgaaaaccaggtctcaggagccctccttgcccctccctggcttttggcagtggcctgccgtccttgatgtccttggcttgtcactgcagctcttcactccctgcctccgtggtcacatggcattctccctctgtgtcccagtcttcatatacccatttccccacccccccaaccacctacacagaaccaggcagacatataactatcttacaaggacaccagtgatattgcattaggggcctactctactccagtg

SEQ ID NO: 1560833 - DNA, 4001 bp, Homo sapiens
gtcctgaggggtgagcaggggttggggactgagggtcccagctcgtttctgtgctccgtcctgtggatgaagaggggtcagccagggggagggctcaagggcagtgccggccacaggtggcgaacaatggagagagggtgcaggtagccaccgtgtcccacctcattgtgagcactggtctatgtttaccctcaatatctgccatttagggtggcatttgagtgtgaggtggcaggtcttggggccctcgctgggatcttgatcagaacccaagcttcgtgtatgtgtgaagtcaacagatgtgagtatacagatgtatatatcctatgtgtgagcttacgtgacttcctccctgggatactttcctaggaaggggtcctattttctccctttggcctccccagaaccttcagacttgggggcaggagccacaagttccagccatgggtcttacactagcatggcccctgtataaccttgggcccctctagccactgcctgggccttggtcctcccatctgaagtcagggcagcggatggacagagatggggcaggccctgttccctcctggctggggtggagggcaggatcggagagcactgcctggcgggtttctcctcgacatcgccagaacatcacctaccttggaccccacgggctggaagccgggcaggctgctgactgtcacacgttggtcatccatgcggcggccctgggtactggccagcatgtccatgaggctgtccatctcgggggtggggtcgctctctgcgtggacgttcacagacttgggaggacacagccggagtgggggcccccaaccctaccccttcacccccacacagatgcttcagggtgcacaaccacctcccacatcccgtgcccccaggccctccagatgaccacttgccctgcactcccaccccgttcacgccccatggacagcacccccgtgcccatgctcacggctcttggtggtctggcccggcccggcttgcagtgaacagcgctgtccctccatccggtcgccctgcacgtggctcagcagattgaagaagccctcctggtctggggagcccgcctggggacagactcgctcagtctggttggcccttcagcttgggggcccctccccaaacttcctagccagcttgctcacaccctgaccccggggcctgccgtccccacttcctcagctctcaccatggtccccgccgatcctctctgcagagctgttctgaatgagacatgagtctccttcccaatcccggcccccgccccaggggccctggccagcagtgccacttcacgtggtaccgcttcaagggacaggctccgatgcgtgtcccgccgtcctagattggggcctgatgagtgtggcctgggagctgggacacgaatcagggaaacatggcccaggagctacccccaggtcccagcatctcccatcaataggggtccacacggagagccctgccctctgccctggggcctggcactcagacccccaagcccaccagcccctttctacagccacaactgggtcagggggtcctaggagactcactcgttaattaggtgccctacaaactagtcttgtcaatcatgggctctgagaccttgagctgggggtggggtgggggcagggccctctcacctcggcacaggggcctgagccttcctccgtcttctcctcctgatccatcatgtccctggactccagtcacttttctgctggcctctgccccggcccagtgccagagagggccttttaaacgtccaggacgtgggggtgtggattccccccatccccaaatccccagctcatgccccatctgctcccacccaagcttaagccccataaagatcatccagataattgtttgcccacaacgatgctggatctggcatggtgggtagggggcagggcgacctgagcttggacctcgctgtgcccagcagcaatgactggaccccagggactctcaggtgtgatgtcacaaaaggcctgagcagcatccccacagttggagaagggaggccaacagtgtagggtggtagctggcttagggaggacttgcaggtgtccccacccagccacccaggttcccccactggctcctgaaagggcagctgccacctgcagtcggtacagaaaaaggaggttggagtcaaaggccccttccctccctccctctctgcacctgcctcagacaccaccggccaccctagctccagctctgtctccttggcagcaagtcaaggggtctcccagccacccttccttcaactcactgtccctggagcctggttgcctgccccagaccccaaaacaagaaagtctggggtctcctgttcccacaccacctaaatgccaggttgagctatctcctctcctctatcaccctagccccaggtgggaacaggaggcgagactccctggggacagaggcaggcggggagaggacgtccctgccttttcccccgagccactgtggctttccctcagtgcccaagcaggggataccactgggaggtccccatccccttcccttccctccccaagacgcctttacggaaaccagtggaagtttcatctcagaatgaatgggctgcactatcaccacctctgcccgagcctcctctgttccacaaaaggccaagttcacactctctccctctatgccaatgaagtgtccccctcctcagtacgtgtatccctttcctaggcctgccagaacaaagtgtcatagaccagatggcttaaaacacataagttgacttttgttatatatttttatatagagatgaggtctcactattttgcccaggctagtctcaaactcctgggttcatgtgatcctcctgcctgggcctcccaaagtgctgggattacaggcatgagccaccatgctgagcctttaaaatttttttttaacaaatttattgagccaacgttccagaggccacagcctgaaatgaaggtgttggcagagctgtgctccctctgaaaaccaggtctcaggagccctccttgcccctccctggcttttggcagtggcctgccgtccttgatgtccttggcttgtcactgcagctcttcactccctgcctccgtggtcacatggcattctccctctgtgtcccagtcttcatatacccatttccccacccccccaaccacctacacagaaccaggcagacatataactatcttacaaggacaccagtgatattgcattaggggcctactctactccagtgtgacctcatgctcactgctaatatctatactaaccccatttcaaataagatcctattgtggggtattggggattagtacttcatatcttttgggggttagtggtggggtggctggccctaacagctctctgtccccccaaggggtcaggctgagaagctggaggcggtcctggcttccatccccccaggatctggagggttccccgccttcccctgctcaaaactcttgagaagacaaaacccaaacacctaggggttgtggaaatgttctaaaatggattgtggtaatggacacacaactccaaaaatactgaaagccattgacttacgcaccttaggtcagcgagttgtatggtatgtgaattatatctcagtaaagctgttacaaaaggaggaaggggcagggtgcggtggctcatacctaaaatcctaacactttgggaggccaaggcaggaggatcccttgagcccaggagtttgataccagcctgggcaacatagggagatcctgtctcttaacaacaacaacaaaatcaaccgggcacggtggcgtgcacctgtagtcccagctacttgggtggccgaagtggaagaatcccttgagctcaggaagtcgaggctgcagtgagctatgatcgtgccactgccctccagcctgagcaacagagcgagacccgtctctttacaaaacaaaaacaaacaaaaatggggaggagggagaagaaggaagaaagga

SEQ ID NO: 1560834 - DNA, 4001 bp, Homo sapiens
ggaccacctgtccttgggcccacagacgcgtcgttgctgccgcgggtgactgcaggtccccgggtccccaccccactctctcccccatccctgttctagatccttctatctctctcctgcatcacttccttattttttttctttttttgagacagagtcttgttctgtcgcccaggctggggtgcagtggcgcaatcttggctcactgcaacctctgcctcctgggttcaagcgattctcctacctcagcctcccaagtagctgggactacaggcgcacaccaccatgcccggctaatttttgtacatttagtagagatggggtttcgccatgttgatcaggctggtctcgaactcctgagcttaagtgatctgcctgccttggcctcccgaagtgccgggattacaggcatgaaccaccacgccaggcctggcttctctcttgcaaaccacatcaggaactggccactgctctccctcccggtgctgtaagcaggcagctgtccagtcctgttcaaggcacttcctggcctccgagggcttcccaggctccatcccaacccctcagcttgacatcccaggcattttctagacagggcccagcccgatgggacccaggcccctttctgagcgcctggacactgcgtcctgagggccactgggtgactgtaagcctcctactttttttttttttttttttgagacggagtctcgctctgtcgcccaggctggagtgcaatggcgcgatctcggctcactgcaagctccgcctcccgggttcacaccattctcctgcctaagcctcctgaatagctgggactacaggcgcctgccaccatgcccggctaatttttttgtattttcagtagagacagggtttcaccgtgttcgctaggatctcgtctcgatttcctgaccttgtgatccgaccgcctccgcctcccaaagtgctgggattacaggcgtgagccaccgcgccgggccaagcctcctactctttggaacccattacggtgtcgtaaaatccccttccctccatcccatgacctagacggtggggaagtcacgccgtctgtccctccttaccagagcccctggggcccagaggagggagggggaggacaagaggtgcccactgtgtaccaggccctggcaggcgccatgatttccgtatctgggtcttcctgcctcctcttgctgtatagacttggggcccgggcgggtctgagccacagaaagcacacagctgttcataacaaccacgagaaccacagaagatggctggtggccccaggaggcagctgagaccccgggcagggggttggcctccaggccaggctcaccttggggtttttcttcaggtgcaggcggtggccccagtgcggggtcagggactgctggaccacgccccggtgccgcaggtgaaagtactgcccgtcagggaagatctggggatgtggggaagcggccgcaccgatgggacccggctcccctgctgaagcccccgagggccggtaacagcccccttctttgtccttccccagcaggtgctctctgggagtcccagaagctgagcttggctgaggcaggggtgggctgggactcttgatatttagaagaccttgtgggctccctcccccttgtcggggtctagggttgttcagtcccctccaagcccccacttcccgtctatcccggtcccacccaccggccccaggttgacgaagccgaatttgcgtgccaggcgctcgacctcccggttaccctgggacacctggacggcccagctgctgacatagatgggggctcggaccggggcccaccccacagcccgggggcggacaagggccagggccaagaccaggcgcagccacagcgcaatcggggcgggccgcatggaggcggggcgggagcggggcctgcgcaaatcccctccctcccgccaaaccgccgagtgggcccaggcgtccgacccgcccccggcgccatagcaacgcagaaggcttcgactcccagggggccttgcggctactcagccaggaggggcgcgaagatctaacagaagcgggagagggacgcacgcctgcccgtcttccgcagacccacaccctcgggagcctcagttttcccatttgtacaacgacaagactaacccagagaagcgggttcactgttgcgataacgcgtcctaccctttgtttgacctctcccactttccaacacacccctccttcgagaatcagcccggcctcctgtccggcctaatcagaatcattcttttgcgtaatcccgcctcctccgataagcctcgccccgttcccgcccctaccattccgccctgcctcctttgtgatcagccccgccctccactggtctcgccaatgaatcgcgtcccgtttctccaatcggctcggatgtttctttagcccctccccccggttccgcccccccacgcctctcctcgccctggctccacccttcagccaataatcccatcctctgacaccgcccttccaatcagctacgtctcgctccggcccggccaatcggtgccctgggccgccgcgccccgccctctcccggcggggtctgggcagcggcggccgtggcggagggctatgcggcgggggagacggggcaggcccctcctcctttgtccgccctgccctcccattggtcctagcggggggccgggggcggacaccggcgcggggccggagcatcgcggctcaggctgcgggaaagcggtgcgcgtgcagcggggtgggtgccctggtccgcgggcgagctcgagcagccaaccccgggcgcgtcggggccatggacggcctgaggcagcgcgtggagcacttcctggagcaaaggaacctggtcaccgaagtgctgggggcgctggaggccaagaccggggtggagaagcggtatctggctgcaggtgagccgtcggcgctagcccgtttcgccgacgggcacaccgaggccatgggcctgggggtcgcagaccggactccttccccggctacggggtccggtccggccggtggagcgcgcgaggtgactgggacctcgaggtccgcccgcagcccttcccttgcccgcgccctgcgaccctgctcccgggccacccctctctagcttccgcccctggccgccccccgacgcctccttccgggcgctgggtgcctgccatgccgaagtccggttcttccagttgcccagtggccccagaggggtcgggatgccagtgtcctgcgcgtttcgccgtcccccttcccccgtggaccccggcctggctgcaacagtagagatcttcccgtttttctgaggggaggctcctggcgggaaggggaacggaccgtcctgggggcctgcccaggacccttctcctttcctcctcctctcctgccctagctcaccttcccccagctcaatggcttagtgccaccgagcgtaaatgtttgttaagacggagttgggttgtctgacggctgtgatgtggggaggctggactggggcccacagagccggagatccaggcaccccgattgtgactccattacagttcttccgtgactttcacccttggtgacgctgcgcgccccttcccctttccaaatctctagcaagagcatgtagtaaacgctccttaaatgcctccctccccacctttaaaacttttttttgagaccgagtcttgctctgctgcccaggctggagtgcagtggtgtgatcttggctcactgcaacctccacctcctgggttcaagcgattctcctgcctcagtctaccaagtagctgggattacaggtacccaccaccatgcccggctaacttttgtatttttagccgttcaacatggtgaaacggggtttcaccatgttggccaggctggtcttgaactcctggcctcaggtgatctgcccacctcggcctcccaaactgctgggattacaggcatgagccaccttgcctggcctaaaactttttaaaattaacttttt

SEQ ID NO: 1560835 - DNA, 4001 bp, Homo sapiens
aaaaaaaaaataagagtattgtgtatctccaaattgctagaggaaatttcaaatgttctcacaagatgttaagtatttgaggtgatgaatgcattaactagcttcatttaattattccacatgatattcatgaatcatagccatcactttatacctcataaatttatacattattataaactgtcaatttacagttaaaaaaaaaagttgaagaaatccaggaggaagtctccatctcccttttgtttttttggcaggggacagggtctggctttgtggcccaggccggagtgcagtggcacaagtgtaggtcactgcagcctcaacctcctagactcaagcaatcctcctacctcagcctcctgagtagctggcactacagttgcgtggccatcatgcctggctaatttgtttactttttatagagacgatgttttgctatgttgcccagactgctctcccaacgttttttttttcttttgttttgttttgttttgtttttacggagtctgtcacccacgctggagtgcagtggcatgatctcagctcactgcaatctctgtctcccgggttcaagcgattctcctgcctcaacctcccttgtagctgggattacaggtgtctgccaccatgcccggctaattttttgtttttgtttttaatagagacggggtttcgccatgttggccaggctggtctcgaacttctgacctcaggagatccgcccgcctcggcctcccaaagtgctgggattacaggcgtaagccaccgcgcccagcctggtctccaacttctgagctcaagcaatcctcccacttcagcctctcaaaaaacggtgggatcacaggcgtgagccaccatgctgggcctccatctccttttaacaaaggagttagaaaataaaaataaagtaaaatagaagaaaaaaaaaactctcacaaaaccttaagaaaggccgggcgcggtggctcatgcctgtaatcccagcactttgggaggccgaggcgggtggatcacctgaggtcggcagttcgagaccagcctgaccaccatggcgaaaccccgtctctattaaaaatacaaaattagccgggcgtggtggcatatgcctgtaatcccagctactagggaggctgaggcaggagaatcgcttgaacctgggaggcggaggttgcggtgagccgagatcgcgccattgcactccagcctgggcgacagagcgaaactccgtctcaaaaaaaaaaaaaaaaaaaaactttacgaaaatagcattttatggttcttcagaaaagcaaaaaacactccagtgtacttcaaagaacacggctttaaagtctgccccaaactattctctggaaaatatcctcaaatgacagaaaaacaataacatgccaatcacaacctttacctgagcgtcctgcgcctctctctctggcacctgcaggcactgggagcggaacaccttccagcttcggggtgaagacaaagggccgtgagggctgcaccccgactccagcccgccggcccgccccagcccgctggaaaggacacccctggagcagctctgggacttccccgcctacctgcgcgcaccgccggtgctacagccggggcaggcgcacgcgaacacgtgcagcagacggtgaaacggggagccttccagcgggcaatacacctgcacgaccagagcgagcggctgcccgcagcgctgacacacgggcctgggcgcagccacggtgggcagagcatcctgaggggacagaggaggcgctcagaccccgactccccccaggacctcgcccactccctccgcacccttcagcagcacccatcgaccccagctccggcacccgccctcaccggaatgccgcccagcttgctagcagtccaggcacccggccctgtggggctgccgtgcaccggcgcatctcgaaggcccagcagcaccggcttcagaacggccgccatggccgccgggcgaccaggtgaaaacgcaaactacggcggcctctctgcgcacgcgcaacgctacgctaaaatgataaccccgctcccttactaggatccgatgcggaggcgtggctttaaggcgcgtgcgctcaggtcccagagccacagaggcgccgctggcgtcaggggctcgaaatcccggagtcccaggcattatgtgccccttaatgcgctgtgataggaagtacacaccatctactaggaagtagttttgccaaaaagctaactttcttttttcctttttttcctgagacgaggacttgctatattgcccacactggtcttgaactcctggggttcaagcgatcctcccgcctccgcctcccaaagtgttgcgattacaggtgtgagccaccagaaaaaagccttcccggaaaataaaaattttaggtgggataatggtattatcagtcattaacaagaacaataaagttttttaaaaagttaaagtttttaatttttagagaaacacaccaaaatgcttatagatgaaatacctccgatttgctactacataattaaggtggtggggtgtaaatacagtaagattgaccatgagttgataattgttgaaatttggtgccaggcacatggagatttattctatttgggttttatatgtttgagatttttcagtttttatttttgttttgttttgttttgtttttgagacagagtcttgctgggtcgcccaggctgaagtgcagtggcgccatctcactgcatctcagcctcccaggttcaagtgattctcctgcctcagccccacccagtagctggggttacagacgcccaccaccacgcccggcgcccggctttttttttttttttttttttagacggagtttcgctcttgtcgcccaggctggagtgcactggcgtgatcccagctcactgcaacctctgcctcccaggttcaagcgattcttctgccttagcctcccgagtagctgagattacaggcatgtgccaccatgcctggctaattttgtatttttaatagagatggggtttctccatgttggtcaggctggtctcgaactcccaacctcaggtgatccgcccaccttggcctcccaaagtgctgggattacaggcgtgagccaccatgcccggccttttttgtatttttagtagagacggggtttcaccatgttggccaggctggtttcgagctcctgaaatcaagtgatctgcccacctcggcctcccaaagtgttagtattacaggtgtgagccaccgcgcccagccacacaatacagttttttcaattcctgcagcacaacatgggtgaatttcaaaagcatcatgggaagaagccagacacaaaaggcgccattctggtaaacgcagaacttcggagggaaaaaaatcagttcaatggtagtcaggagttgggatgagggagtaggactggaccacaagtgtcaggaacttttgagggtgaggaaaatgctgtatatctcatctgtaatggttctaagactgtatatacacttgtgaaaactcataactgtataccaaagaaaggtgaatcttactatatgtaaatcacaccccaataaacctgactttttaaaaatgcaggctgcaaaaacattattttaggattcataacgtggtatgcaaaagaaatgaatgttttcaaggatttacacctcaaaggaggaagcaccagcctttgtgaggtttggctctagcccagcaaggatctggagatgaaacccatttactcctttttttaccacacttcatcctgatagctttaaaaggccctgtgatgctgggcacagtggcttgcgcctgtaatcccaacactttcggaggccaaggcaggaggatctcttaagcccaggagttgaagataagcctgggcaacacagtagtattaccaggggaggatcttgactacaagtcgtccaggttcttggaatattgaacaaagaggtggacaaaacacacaaagcaacaaaagaaggaacaaaagcac

SEQ ID NO: 1560836 - DNA, 4001 bp, Homo sapiens
ttcacactactaggcaggaggcaggggaaaacctcaagcagagaatttaactttcaatggtctcagaaatgtactcaagtgatagcagagtcaaaagtaaatcccctctggaagaatctggggcaagagcaatctgttttaaaaggcatcctgatttcagatatgtgacaatgaaaagatgtacacggcagaaatcaatgaaatttgcgtcgttttacttcctatcactactccagatacttctcaccgtctgtcttctcccgaaccctcccttcctatttctgtagacccagcacagtgcctgacccagagcaggtgctctataaatatttgctggagaggaggagtaagaaggtgaggaaggggaaatagagaattgtccagtagctaaaggtttcagtcttgcaagatgaaaacattctagagtgtgaacactactgaagagcacacttaaaaatggttgtgatggtgaaattttatttaaccacaatttttaaaaaatgatagcatgatagggtaatcacatactcattcaataaacctgccaccgaatcaattacctgcatctgtctcaggtgctgtgcgctgtgttgggataaaacaatcagaatagcttaccagttaacacttattgagcacttactaagtgaggcaccggactcacgtcacccccacagccgaggaaactgccacagctgcctattatcaggctcatttttaaggtactcacattgtagcagagaaacatcaaccagtaattgcaatacaaggtctgatgtggagctgcacacgtgtttatttaacaataatgaagataccctgcggatgattttggccaaatcaccattccagcaaaacaaaaaaatctgagtcacacacctgcttaaaataactacagcaaaagaaatccatttggtgaaaccacccttcaaaaagttcacgtttccagcccatacctgtgctttgcttcctgttgggccgcatcaccaggatcctggaaaaaaaaaacttaaatttaatagagaaatttcacgggaggcggcgggaaaaaggaacggttctgttgtttcctatacataacagtctcttgcggtggtagaaacaactccccaaataagaaactgggcctcacagaaatcaatgaactagttcccacttacaacgttttgatgaacgtctaaaaccacaacctcagaaggctttggaatacagagcaccctggggaggggaatccctgtattacgaaaccgtgtttcacatgtaggaataatttctggaaaataaaacgggcctcggtattagggacaacgataactcaaagactgcgccctccgtccctaaggtcccggtcccttatcagaaacgcctctccgggcgtgtgatccatccaagcttcccaggcggcccctccctgtcatcccggcggggcaagcgttcctccgaccctgccgcgctctcagcaccgggaacacagcggaccctcaatacctgtcggctaaacttgggtcataacaactgaactccggaaaaactgaattcggtccggctgctggctccaaaagctgagattgtgcttggatccaggcccgccaggacgagcccgctccaggctaggggaccccacaccccaacgccagggcaggtcccgcacgtggcggcccccgccgccagcctcctgggcccctcgcgacgaggaaagcgacgaggccacctctgagccggccacgaggccgccagggcagcgcaggggaccggggccccggggaggcgcccagagcctccgccccggaggcgcgccctacactccgggcgagggcggcgccccgcgagggccaagcctggcgggggctgatgcgctcaccccgtgtttggcctgcagctcggccagcctctgtctcctcagcgcctcaagctcctcgtccgccatggctcggcgtcagcgctggagcagccgcggtcactctcgcagcccctcggcgcgagcgcggccttgaccactgcgcaggcgctcgcggggcccaggcgccaccaatccagcccggagccacgccccgcgccgctgccagggcgccggcagaggcccgattccccgatttcaggcggtcgagcttgggcgcacggaggggcggggcctggggcggggcctccgggatccacctcccacccgtgatcggcgcctctgcgtgcagggacttgggctgcgctggggcggggctgcgctttggaaaggttaaaacctgaaagtgtggcatcaacaagtataataattatgggtgcaatgtgctggtgacctagagggttaggcgtatattatctctatttatagatgaggaaccaggggcgcaggaaggctgagtggggtgatggaaatgtcctaaagctggatcgtggcggtggctgcccggctcctcggtgcacacagaggccggccggtggctcgccgcctgtggtcccgacgcttcgggaggcggtagggtcatttgaggtcaggagttagagaccagcctgggcaatatggcaagagcctatctctactaaaattttaaaaaactagttgggcgcggtgatgtgcacctgtagtcccagctactcaggaggctgtgtcaggaggatcgctggagcccggaagttcgaggctgcagtgagccttgatctcgccactgcactccagcctgggagacacagccagaccctgtctctaaaaaaaaaaaaaaaaaaaaaaaaagtgcacatctgcctcctcgccatctgcctcctccacgcacaaaagggcttttcctgggaggatactgcagtgggcagctgtggctggtgtaaactctttggtggaacaaatcccttctgcctttgacttgggggaattgggggcagagaggatattcagctacctaaacgtgtgactcatacagattctgtttgtttgtctgtgtgtgtgttattttattttttacattaaaaaaatacagatggggtctcgctatgttgcctaggctggcctctatctcctgagctcaagcaatccttttgcctcagcctcccaaactgctaacattacaggcatgagccaccacacctggcctgtgtgttttaattgtggcaaaatatacacaatacaaaatttaccattttcaccatttttaggtgtacttttcagtggtatgaaatgcattatcgtgcagttgtcactcaatctcagctcactgcaacctccacctcccgggttcaagcgattctcctgcatcagtctcccaagtagctgggaccacaggcgtgcaccactgtgcccggctaattttgtattttttagtagagatggggtttcaccatgttggtcaagctggtctcgaacttctgacctaaagtgatccacctgccttggtctcccaaagtgctgggattacaggcatgaaccaccttgtccaccatcaatctctacaactttttttttttatcatcctgaactggaactctacccagtaaagatttaggttggtgtgaggggcctctaatgggaatgggtgggggtgggaggggtctgagaataataatcagtctccacccattctcattctagtttctatgaatttgcctattctgggtatcttgtatatgtggaatcatacaatatttgtccttttgtgactggcttactccacctagcatatgtcttaaaggttcattcatgttgtagcatgtggcagaatttctttccctctttagactgaatatattccattgtatggatatacctagcacattttgtttatccattcatctgacaatggacacttaggttgcatccaccttttggctattattaataatgcagctatgaacatgggtgtagaaatatctgttcaggtctgtgctttcacttttggatatatacccagaagagaaattgttggataatgtgataattctgtgttgaggaatggccataccattttccacagcaactgcactattttacattccaaccaacagtgaatgaaggttcc

SEQ ID NO: 1560837 - DNA, 4001 bp, Homo sapiens
gagggctgcaatgactgctgaagacccccaaagagacttaggaagagtagggctacatcttagagaggcctcactcaggagctccagggataaggagcccaaatctgaccgtcttggtgatatccccagcagtggggcatccaggtagagcacacgggcaaagctgtcagttgcacacatcgctggagcacaagcaatcagaccctggagcaccatcagaggaggaacaataactaagaacaccaggtggttagaggacaccagttcttaggatacaccaggcagagggaacacagaccacatgtcagagcaccgacgctcagacgtgagcacctggtgaagactaacacacagccactgtgtttcaatcacagtgtccaaggagcacagactgttccacgaactcaatcacattgttccccaagtgtaaacaccccagtgccacaatcactgcatgccagaaatgacactgtcacaatcacattgtccctagaccaccaacaccattgcacaatcactgtcctaggagcagaaacagtcactctatcccaatcactgcatcccatgaggccacagtcaccctgtgacagtcacagcattcttggagcacacacagtcactgtcgcaaaccctgtcccagaaacacacagtcacactaccctggaaatacacagtcacactgtcacaattacactgtccctggaggacacagagtcatcgtgtcaccatcacaagaccccagaagctcacacagagcacacaactgaggtagccacagctggtcatacccggacagctggagcaaacggaggtcaatcggagaataccctcagaggagaccaagctcaacacacatgcaccctcactatgctgtcacctctgcagtcagggactccttccctctgtgctgggactgcgccccccctccactgtttcctgcctctgaacagctacttaacgctaacactcttgccctgagaggggaactccaatctaacgcaaggctcccaaaacagtgctcccccaagaggcaccctctggatttctgaccccagctgctgcaggaggagtccactaacatccccgcaatagagtcctccatcccctagaaggaccctgagagcaccccaccctgaagtaaagatcctggtcctagcaggcacccccttatggagtgctccaagagtaccccaaacactgcgaatctagccctcagtatagtgcccccaggaaggtccctccaagtggttcccagcttagcagctgttctgcactgtcaccaagaatacagacccctaagtgtgcagcccccttccccaacccagacctcgttaacaccacgcgcagcgtggcgccccctaaatggaccccaggatgggcttcagcaggaagcctcccgtagagcgcacaaccaggggccaggtcccagacgcccccgcagccgaattccctccgcccccgccagccaaaccgaccccacccgcatcctagcgccccctgcggccggcagctcgagttgcctcctccctgcgcgcccatccgttccgcgcgcatccgccgcggggagtcttaccgcctgctgctgcctccgcccgcgccgccgctgccggtgccagtgccatggaaggacgagggccaggacatgcgggtcgtgcgcaggccgggccggtcgctggtgtccatggcatcggcgcgctctatgggccggtgcggctgccgctcccgctcggcgcgctccgcgctgtcggagtagccgcgctgctggatacggatgggggtccgaggctgccgccacaggtgctgcgggggaggcttcagggtggcctggccctcccggggcccgggcagtgacagagacaggctcctttccgaggggacggtcgggggttccatggcgccggcccccacttgcgccccagggggccctggcccttccaacctacaccccgctcagctgcgcgcaagccagcgagcccagggccccgcgggtgcgcccggccgcggtagggccatggcgccccggggacagacccgggggcgctgcgggccaatcgcccccgggccgggctctgcagcttcctttcggcgcctggagctctgctcagtgcccggcggcgctctccgcgctccgcgctccgcgttccgcggcccgctcggcgccagccccggctcctccgccccgtcccgcccctccccgccccccgcccgccgcggctgtcagcgccgcccccctcctcctccgtccgggccagcggggggcagctacctaaggaggggggcccttcccgcccacgcagatccccgctccgggctgggagggggcgctggaactcgtctgtcttcaaagcaccctgcttggccgcggcgcgcacaggcacgaaggagttaaacggttaatccgatctggaagcagacaccggactggttgccagagtgtcagtcagtcggtccatcatggcgagggcggagtccggtgttggcgtgtcctcgccgctacccctggcggggggcagtttttgaggagtggtcctagtgccaccggcgcggtacctgcagcgggcggcggcagagtgtgtgggatctcctgtctgtgcgtcggaggatagtgatggtgcgggcccggggcgggatgtgcgcgcacgtggcctcttccgagggttgtctgtgttttcagtgtcggctggaagtgtgtgtgcgcacgtggttggctgctgttgtctgcccgtttctctggatttggctgtgtgtataactgtgtgtgtctgtgggtgaaggatgtgtgcgcacatgtgctacctatttggaggatgtgcatccctacgtggtcttttttcaggtggcctggggactgtgaatgtgttctcaagcgcttggatgcgtttgtggtcggtgtgtgcttgcggagttgtgcacgcgattcggcctctgtcgtctgactgtagtgtcggaggacgtctatgtatgttagtgtgtgcgtgtgcgtgagtgtatgtgtgtggtcggcctggggcctctggggtgtttctggggtgtgtcccattggttcccttgtggctccaggaagacaccctgtggcggataccgcagctgccggcccaccgctctatacatcgctgcctcttctaaagcgcttctgccagaggtaaactgaggaaggtcccaggtagccgcggagcgcacccccgtgcccttttcaggcgagtaaacaggcgagcctcctccctgcggcccccgccagcagagccccccttccggcacctaaatcgggagtcgccgtgactcacgctcccgcctcccccagcgccgcgccgagcgagcaagcagagagcgagcgggatccgagtgcgcccccatccccctcaacccccccaaggatggctgctgggcggggggagtgcacgcgcccgcgtgtcccaccgccccccccccccacgccgataagagctcgaacgcgaaactgctctgctgcgggacccggggaccagacccctgcccccgtgcgccccctgtcacgggctccccagggcacgcgatgccgtttgccaccgccctccccccgcgcccttctccttatttgaaaaaaaaaaaaaaaaaaaaaaaagactgccggtcttcaacccccacagccacttttctccccgccagagggggctcccggcgtgggcgaacgccgagcaaaaaccggcccccccatcagcagccgccgggtattccaagggccaaaactgtgttccccacttctctcaggaacaccccccccattacacactcaaaacggcttctagggaatttgcaggggctgtgagttctccccagatcatatttgagagtcctgggctgggccaaattcttggcggggtatgctgtaacgttggttagagatctggaagcgggtgggagtgcgtaatgtgaggtgggtgggggtgtcaggacacagctggggttgcagaagaaggaggaaacgaggagcggtggcctgagctgggggataaactgatctg

SEQ ID NO: 1560838 - DNA, 4001 bp, Homo sapiens
gccagaagctcaggtttaaggacacaaagagggtgacgggtcctaccttggataggcaggaatggacccagcacccactttgagggctgccaccttcaagaagccctcagcagcaccccaggcctttagagccaggaaagggggtggggccccagccagatcctggaagccacttaggggactcacccaggtagactcagcacccccacccccccagcacagccagtgcccttcagtattaaaagagaggactgactggccacgggccacccacctgacagatctgcccggagggtgccgacgggtgtcctcatcgctgaaggggaagtgggtcagggactcggggcccgtggggggcagtgccagggcagggggccggggccgggcccggggcgctgcaccggagcgcatgggagccaagcgccgtcgtcggggcgcgcatggggacggcggcagggcggtgtggcgcgcgctgctggccaggcccaaggtgtctgcggcctccactgccggcaccgcctccacgcctctggtgacccccccagggacagccccgggcggtcgagcgttcccgggtctgcacgggggaggggagcgcacgggcgctctgtctgcctccccctgcaggggtcctgcggagtcggacgcacacttcccccccccccccccgtctcctccctcctaggcctctggggtgccccggggctccggtttcccggctccgggcccgccctcctgccaccgcctccggccccgcctttcccccctccccgccctgacgtcgagctgggcccgctcgaggtctctgatcgctgatcgccgtgcgcccccggggaaacgggactcgagtgtggggccgggtgacataaacccaggggaggggaaggtgcagctcagcggtgggaaggagaaacaaaacagagacagaagagacagaagtggagacagagacgcaggacgcagagagagagacccggagagaagcaacgatttccctacacacaccctgcggaccccacgcggggctcccaaaggccctggcccctcttcctcttctgtccccgccccatttcgttcctggggccagtcgctgggcccggtcctgccccgccgtgccctccttcagtctgtgcctcaattgcacgtggaaagtaggtggaagagggggaggctgaggacccggagaagcccccagggccagccagtgcccaactccgggctgccaacttctgcctccaggatataaggacattagaaagccagactggatgtggcctcggggcctgtcactcccagacttcaagcccccgcagcccaccccgtctggccagaaagggaacttccatttgccctctgtggcccggtactaggagtgacaccaagcctcaccgcaaggccacccacagaaggcatgactggccccatttcacaggccagtagactgaggctgacagaactgaacacataccccaggatgaacacatgacctggatggcaggtcgccctcactcctccaaagcgtgaccgcagcttcaggtttgcacaggaagtgggaaggatgcaacatttattaaacgtctactgcatgccctatcagaggtctccagggcaaccctggcggtcagggatgattttgatcgctgctatgtgacagaagaggaaagtgaggctggagagagtgagccacgaaccctagaccctggagtgcgccaggtggccaggggcgacttgaacccacggccaccagcgctgcacttacccagccccagcccaagcctggcggcccaaatcctggcagctgcggagaagccgaaggcgtctgcggaaagttggggacgggctggcgaagaagacgggcgaggagggcggcgaacgcgggcggcggggcgcgcgcggggccaggggctcgggcaggaacgcctcgtcctcagccgccaccgccaccgggaaggccaccagttgcagctccgggatgcggcctaggccgcgcggccgcgccatggccgcggggcggccccgcctcggcgggcgctggggagctgcgccgcccaccccgccaggcccacgcaggccgcctgcccagccccgggcccgcgggccccaccccgccctgtcgcctcggcccttccggcttcgcgctggagccgcccccagggcggggcgggtctggggcgcccgcacggctctggtggggactctcccgcagaccccaaagccgcccgcgttggctctaatgtcctcacaatcgccggacgcgtccccacaaacaccagggacacccccaaatctgtggggacactcctgcaaactccccgtggtgttgacaggccccacaagccccaggagccaccccacagtctctcagaatcccaaggagcaccctcattgtccctgagacaaccccacacaagaagtccaggggtacccccccaaatcccggggcttctcagcacaacttagaggtgttctgagacaccctcataaaccctagggcactctcatagctctccagatgcccccataatcctagcagtattctcactgtttctgggacatgccacaagccccaggagtgccctgagaatcccagggtgcatccacaaatgccagggatgcccccaaatctctgggggcactcccacaaactccctgccagtggtgctctgagagcccagggaaaacccttcagatcccagaacccccaccacagttcctcagatgtcccaaaattcctccagagctccccatcatccccaactctcatcatcccatcatgcatagaccctccctcagtacccccagaatcccccacacccacagagccattttcatagaccgaatataggttcccaccaaatcctagagttctccacagaccccaggaacacctccacagtccctcagatgtcccttaatccctgaatggttctacagcatctctgagatgcccccacaagtgctgagaccccaagacaacctcgggaatgccttcagactcaggggatgccctagtaaccatggagatgccagcaaaatctggggtgccccaatagaccccagggacacaactagattcctctccagctcctaagacagtctcacaccctagaacagaatcccaagatgcaccccacagtccttggggacaacctagaatgccacccacagcttctgagatgtgtcttacaactcttaagacacccctagaaggcaggtgtggtggctcatgcctgtaatcccagcactttgggaggtgaaggtgggcggatcacttgagcccaggagttcgagaccagcccaggtgacatggcgagatcccatctctacaaaagatgacaaaaattagcagggcatagtgggatgagcctgtggtcccagctactttggaggctgaggtgggaagatcacctgagccaagaggttgaggttgcagtgagttatgaaggtgccactaaaccatcttgagacagtgagaccctgtctcacgaaaaaaaagagaaaagagggtgaatctctattttcttttctttctttccttcctctctttctttctttctttctttcttccttccttccttctttcctttcctttcctttcccctccgtccctctctttctttcttttccttttctccttcctttccttattttccttccttccttccttcatttcttccttcctttcctttcctttcctttctccttcctccctttccccctttctctctttctttctttctttttcatcagtctctcactgtcacccagactggagtgcagtggcacgatcttggctcaccgcaacctctgcttgctaggttcaaaggattctcgtgcctcagcctcccaagtagctgggattacaggcatgtgccacaatacctggcaaatttttcttgtatttttagtagaaatggggtttcaccatgttggccaggttggtctcgaattcctggcctcaagtgatccacccgtgtgagccactgcgcccaacagtgaat

SEQ ID NO: 1560839 - DNA, 4001 bp, Homo sapiens
aggagtttgagatcagcctggccaccatagagaaaccccatctaaactaaaaatacaaaaaaattagctgggctatggtggcatacacctgtaatgccagctacttgggaggctgaggcacaagaattgcttgaacccgggaggcagaggttgcattgagccaagatcactccactgcactccagcctgggtgacagagcgagaccctgaaaaaaaaaaaaaggaagaaagagagaaagaaggaaagaaggaaaggaagaaagaaaggaaggaaggaaggaagaaagaaagaaactgaggcacataaaggataaatactatggttattagtagcagagcatggatttcttttaaaatttatttattttgtagagatgaggttttactatgttgcccaggctggtctcaaactcctgggctcaagccatcctcccacctcagcctcccaaagtgctgggattacaggcatgagccaccacgcccggcctagaatgtggatttgaacccaggcagctgagctacaaagctgcgacgagtgtcttcccccggggcgcacagggcaggcaggcctggtgtctcccccggctccccgtgcttttccacctgactcacttgtaggtggtgccaggcagcctttatggaaaggcctggcatttgctttgtgaaggtcacatggaggttgaaggcgggtgctggtgtgtgtctcccaggcaggcgcgtagtgccaggtgacacagctctttggggggctgagtatgtaagagactgggggagagggaggtctgtgtgcccccgggcatcacacatagacatctctgtggcatcgcacatctgcctgtgtgagcaggggctgggtgctcatgggtgcctgtgtgcatctctgtgtctttatctgtgtatttctgagtctgggtgactttatgagaccgtgtcgcactgatactgtgacagtccctgacccctgtgtgggcacggggtgcgttcctgtgtgtatctggtgcaggtgggagtacagcatacaggaacatgtgtgggccctgggtgtgtatttttgtgagaatgtgtctcaccaaaatacagtgtcccccactgtggaggaacgcagtgtagacgaggatgtgcgagggctgggccagggttgctgtggtctgtgtgtcacctgtgtgtggccatgagtcaactgcagggtcctcttggtgcagccaggagacccatacctagtacggtaaacaccaggtgacccggattgccctgtgtgcggccctgtgtgtgtgtctgtgttagagaccatggagcaggaaagcaagaacaaggctagaaacccctgagaattctgagaacttaaaggccactcacagccccagctcagtccagcctattctaaacaccctccatgagacccagaatctcccctccccacccccaacccagcttggttttcagcctggcagctccagcatgagagggggtggggaaggtaaggctggagacactgagccaggcagggacttagggatctggttctaggccagtggcctgggagtggagcccaggtgacgctggacacccatatttgcagccaaagtgaatgccagaagctcaggtttaaggacacaaagagggtgacgggtcctaccttggataggcaggaatggacccagcacccactttgagggctgccaccttcaagaagccctcagcagcaccccaggcctttagagccaggaaagggggtggggccccagccagatcctggaagccacttaggggactcacccaggtagactcagcacccccacccccccagcacagccagtgcccttcagtattaaaagagaggactgactggccacgggccacccacctgacagatctgcccggagggtgccgacgggtgtcctcatcgctgaaggggaagtgggtcagggactcggggcccgtggggggcagtgccagggcagggggccggggccgggcccggggcgctgcaccggagcgcatgggagccaagcgccgtcgtcggggcgcgcatggggacggcggcagggcggtgtggcgcgcgctgctggccaggcccaaggtgtctgcggcctccactgccggcaccgcctccacgcctctggtgacccccccagggacagccccgggcggtcgagcgttcccgggtctgcacgggggaggggagcgcacgggcgctctgtctgcctccccctgcaggggtcctgcggagtcggacgcacacttcccccccccccccccgtctcctccctcctaggcctctggggtgccccggggctccggtttcccggctccgggcccgccctcctgccaccgcctccggccccgcctttcccccctccccgccctgacgtcgagctgggcccgctcgaggtctctgatcgctgatcgccgtgcgcccccggggaaacgggactcgagtgtggggccgggtgacataaacccaggggaggggaaggtgcagctcagcggtgggaaggagaaacaaaacagagacagaagagacagaagtggagacagagacgcaggacgcagagagagagacccggagagaagcaacgatttccctacacacaccctgcggaccccacgcggggctcccaaaggccctggcccctcttcctcttctgtccccgccccatttcgttcctggggccagtcgctgggcccggtcctgccccgccgtgccctccttcagtctgtgcctcaattgcacgtggaaagtaggtggaagagggggaggctgaggacccggagaagcccccagggccagccagtgcccaactccgggctgccaacttctgcctccaggatataaggacattagaaagccagactggatgtggcctcggggcctgtcactcccagacttcaagcccccgcagcccaccccgtctggccagaaagggaacttccatttgccctctgtggcccggtactaggagtgacaccaagcctcaccgcaaggccacccacagaaggcatgactggccccatttcacaggccagtagactgaggctgacagaactgaacacataccccaggatgaacacatgacctggatggcaggtcgccctcactcctccaaagcgtgaccgcagcttcaggtttgcacaggaagtgggaaggatgcaacatttattaaacgtctactgcatgccctatcagaggtctccagggcaaccctggcggtcagggatgattttgatcgctgctatgtgacagaagaggaaagtgaggctggagagagtgagccacgaaccctagaccctggagtgcgccaggtggccaggggcgacttgaacccacggccaccagcgctgcacttacccagccccagcccaagcctggcggcccaaatcctggcagctgcggagaagccgaaggcgtctgcggaaagttggggacgggctggcgaagaagacgggcgaggagggcggcgaacgcgggcggcggggcgcgcgcggggccaggggctcgggcaggaacgcctcgtcctcagccgccaccgccaccgggaaggccaccagttgcagctccgggatgcggcctaggccgcgcggccgcgccatggccgcggggcggccccgcctcggcgggcgctggggagctgcgccgcccaccccgccaggcccacgcaggccgcctgcccagccccgggcccgcgggccccaccccgccctgtcgcctcggcccttccggcttcgcgctggagccgcccccagggcggggcgggtctggggcgcccgcacggctctggtggggactctcccgcagaccccaaagccgcccgcgttggctctaatgtcctcacaatcgccggacgcgtccccacaaacaccagggacacccccaaatctgtggggacactcctgcaaactccccgtggtgttgacaggccccacaagccccaggagccaccccacagtctctcagaatcccaaggagcaccctcattgtccctgagacaaccccacacaag

SEQ ID NO: 1560840 - DNA, 4001 bp, Homo sapiens
tggaagcgggtgggagtgcgtaatgtgaggtgggtgggggtgtcaggacacagctggggttgcagaagaaggaggaaacgaggagcggtggcctgagctgggggataaactgatctggacctgaggctagtgggatgggcgtggagaggtataattaagcagctccaggggcgagagacagtcacttgctctccctatctggaaatgaaccattggaccatgacggaaacagagaccctggaaccctccaattgagtagatgggggtgggggtggattggaactgccgaaagcggtgaccagaggagggcatgggggcaggggccggccagaagccaggaccagctcagctgtctgactttccagctcattcttgagccaagaggggggttgagtactctgggaaactggttgggtacctggaaggtccccagatgagaatcagcaggaggtgctgtgtgaacccagagctcgcagatatttctcacatctccccaggagaaagaaaaatactagtccagaccccttccaagactccaccatccccttcaaggcggagaagaaacctgatcctcccaggcggggacatgaaagccggtgcacagccgcctgatcaacctgccccagctctgtgaatatgggagcatcttgggggctggagacatgacacccctttcctcagtcctgccccttgctgactcaggcagctggaaaatgaaataaggggttcctagagcctgcgaagggtgccttggggtaggggtgtcacagcccgccacaggacaagttgcagctagttttgcaaacggcagggagcatggagatcgggaagggctggtggctggacctagcccagttggcactgtgcctccccaacccacctcccactctgctccctctcctacctacctgtcgttctcggccctggtgatggaaatccgcggtgggatcagcagcggcagggtggtgggccgtggcggcagagggaccccagggtccgagggctcaggctgggcccagcccaggccaggaccggacgagaggcggcggcgagggcgacgcaggtcggcccccagcatgttggcacggtcggattcgggggtctccctcgacctctggggagggacaaagtggaataggggcgtggcctggctgggaagctctgagcccctctccccaagaacacccctacctagctgtctaagggagtagttaatggcggtataggctccccttcacgtgtgagccactcgctgacccctcacacagagggtgccctgccatcccttaggtctgagagtgccccttctcagccataatttttgtggggtcccctctcgatgccccagccttggggtctgtcacatctagacattctgtctcaagtgtgagacctctctaacacatcacctttttagggtctcttcccaacctccacgtctaagagggcccctcttggtcttaatgtcaatgcccccctcccatccctcacatctgagactctcaagacctcaccacccctagcgccccctcccacctcctcgccaaaatcctctcctcatttgagaagcctttgcctgctgtccctgggccggctgagagcctcttagggcagcaggagaaaaaatggaatcaagggggtaaactgaggcacgaggggaccaaactcctcacagcttggaggtagtgaagccacgttcaggaaatagccgtggtcactagagggcgctagtctcccccaaggggcgaagccccgcccctagcccaagcccctcctctcgcacctcgtccccggtccctgccacggacagggcactgcgactcctcttcatctcgccaacctagcgcgccgttgggactgcggtggccatgtcggcagggccagggcctcctacaagaccaagccaaacgcatctgccatcagtgccccagggctccccctgccggtcgggcctagaacccgcccccgccacttgcctattgcctctcctggggcgtgacgtcagcggactgacgcaccaccaatgtggtgacgtcgcccccgttgccagggcgacagctgacgcacggctgggctcctgacggcgtcaatgccggggttggccactggggggccgagagcctccgggcccgggtcgccccagcccccacccttcctcccgcgggggcttccccggctcggggatcccgcagaaaaaactgggagctcccagagctggccgcgtgcggcgcgtggtccgagccgggggccggaggaagcgtctcctccgagctgttgggcttttaagccttaaacccgaaatagctccgatgtgcgggggccgggcgcagagagacggcggcttgggcacagatgggggacgcacaggcagaggcgcgtggagacagacagggacgtgtggaaatagaaacagacagacagggacacagacgccgttcccgaagacgggtgcgctctgcagccaccgatccttgtctgaaatgcttgggggagggagaggctggcttactttaccttggcacccaggcgctgaagattattgctgtgcggccatgggtcagtgtcttaaactctgtgagcctcagtttcttttctgtgaaatggaatgatattccctacagggtccatgtgagaatgaaatgagatcaaaccatattgaacagaatagtgtctggcactcagtaaatatttaataaatggtaacatctgaccctgtgggagcctgttagaactcgattcagatcatgatcttcctctactcagagccctaatagctcttacctcactcagaggaaacgtcaaagtcctcgcgtggcccacacagtcctgctagataacgcccagtcaccttcctgccctcagctccagccacactggtctagctgtttctggacacagcaagcatgctggtgcctcaggccctttgcactttcagttctgtccacctggaactcttcccccaaatatccgcaggttggccagatgcggtggctcaggcctgtaatcccagcactatggaaggccaaagcaggtggatcacttgaggtcaggagttcgagaccagcctggccaacatggtgaaaccccatttctactaaaaatacaaaaatcagccgtgcgtggtggcaggcgcctgtagttccacctacttgggagggtgaggcaggagactggcttgagcctgggaggtggaggttgcagtgagccgagatcgggccactgcactccagcctgggcaacagatcgagactccatctcaaaaaaaaaaaaaaaaaaaatccgcaggtcccttacctcttttaggtctttgcttatatctcatcctttcaggcatttctttctttcttaccccacccccacttaaaattataatacaacctcctaggacttctggtcccccttttcccgctcttcccccctcataccacactatgtaatttgtttattacatttattgtctgtgtctcctcacactggaatattagctgcaggagggcacgaaaactttgtttaattattatgttaacaataatgtagtattattctttactatctcctgagcgtcctgaacagaatccggaacataataggcttttaataacctgttcaatgtcaggttattattgagagcctgatagtgtaatgttcctaacagttctactgtgtactagctggtttatcccctactttggttcttttgtttctactttttaaatagagactggggtctcactatgttacccaggctggtctcaaactcctgagctcaaactaaagctcaaactcaaagtgctggaattacaggtgtgagccatcacacccagcctagttctcatttctttattttttttaatatttatttatttatttatttatttgagacagggtctcactctgttgcccaggctggagtgcagtggcaccattgcacagctcactgcagcctcgacctcccaggctcaggctatcctcccacctcagcctccagagtagcagctggt

SEQ ID NO: 1560841 - DNA, 4001 bp, Homo sapiens
cccccctccaatcccacgtgcttcccctcactcacccaggaatgttgtggaaatgtactctgagacctggtttccggacctgctcatttctgacaggtgtgtgagctcacggttcaacatccttttgaactaaggtaaaggagtcaacaaggaagaaatgatgggggaagcacagtggtgaggagggtgtcagtccttcccaagaacgcctgaagaccccatgagtccctcctatttttctgctcagccaacagagcccctataagactgctggggggttggggtcagcctttcctgtcctcccagctctggatggaggtccccaggtttggggagtcatggtcagcataaccctccctgcctgaggaaagaggggcttccctcctcatctcccccaaggaggagctagaggggcacctgtggaagggaggggctcctgcctaacagggagccaatagggaagcaggagaatcccgtcgccatggcgatgggagtctccttagcaactccccctccaaccagctgctgagctggggaaaaggggggcaagccggaggccccttaacccttgccttcctagagctgcccctgacccaagtgttcccagacatggaccccaatcctgggggtcctggctcctggcctccagctcagtttggaaaaagggaacgtggtagccaagctctgggggacaaaaaggtttggccggggtaggggagaatggtgagctgaggaaatcccagtttgatcacccaggggagggggaggggggttctcatcatagcccactctcccccaaccccagaagggtggacagatgcacagatgaacagagtatacccaaaaccgggcttggaggcccctcctggtccccccatgccactctgcacaggcctctgctgtgacattgtacacagaggagaaagggcattggctccccacccccaagctctgccacagcaccccaaaagcaggagcagactctgtccagggaagcaggagggacacttggcaggaggggtgagcctgcatggcccaggcttggacggggtgctccctcctcccggtgccacccagagaccctgggtacagagacacacacatccacacaagatggacccacaaaatctcacacaaccacacacacaatcacaggctctcagtcctacacagcgtcacacagcccagacacacagatcaaagggcatgcaaaataaggcggtcactgacatttggggtcacatgtccccaaaatatcaggcagctctgggctcagacacacaacccaacacacaacaccatggtcagagccagatgatctcagacagggccacacagtgacccaggcaaacaagcctatactcaggcagacacacaccatcgcagacacacacacacacatccaggcactgacacagtcacacccagtgagggacccgcagtccacccccagggagagtcacacacccccagctgcccgccatccacgcccagccctgggccacacacagagacagtcacaaggcttcatctccaggccacacacgtgcacagctgcacacacaagcccacaccgggggcccagctcaccaggatgcccgcccaccccctaccctgcactctcctacctggtcccaccagcccaccagccaaggcttagagcaggtctcgcagaagaaatccaccaagggcatcttggagacttagcccgcctggggctgctgcacacagaggctgggcttggggagtcccggggttaacaaccactggggagggggtgccgggcaggtgggtagtggaagggggagccgcggaggggcctgggccggcccagcagggctgggggctcccttcccctccgcgctcccagcagcagccctggttacatggcccgccagccctgggccccaacgggcccccccgcggcagtgggtggaggcggtggggggtccgtgcccatgggaggggggcagggcaagggtcccaggaggaggctgcggagctctgtgtgtgcacccgtgtgtgtgcgtgtgtgctcactgcagcactggcaggctgcatgggatgtcaggtggtgctgggggtgggggggtattaaaggggcatcagagcccatgggcctcagccagaacctaggtgggctgtccccatcaggacccatcccctccatggacacacccagagacagaaacacacatccactttacactcacagatgtacaaacaccctgagacacaccttccagggacacccacacacatccaggcacttgacacttgaatatacacagatactcaaatgctttctgttgtacacttacagcacacacacacacacacacacccggagacagtcacaactctgatgtccaacacacttataggtccacagctgagcatatagcaaatgccttcagacacgccccatccaagggcacagacccacatccagacccacatccagacccacacctatagacagacaccgagataccagccacatttctttttttttttttgagacggagttttcactcttgtcgcccaggctggagtgcaatggcacgatctcggctcaccacaacctccgccttccaggttcaagcaattctcccgcctcagcctccagagtagttgggattacaggcaccctccagcacacccgactaattttgtatgtttagtagagacggggtttctccatgctggtcaggctgctcgaactcccgacctcaggtgatccgcccgccttggcctccccagccagccacacttacagacacacactaaacacacccacagacacactttccaaccattgcaaatatccactgcccttggacacaaacatatcccgacaaatccataaggaaatatactcacagatgcaaaaatacacacacacacacacacacacacacacacacacacacacaccattgcagaaacatcctcagacccatatccaaagacacagctacatttcagatgcttgatccaccctcagggacacaatcgccctcagactgctatgttcctatacaagcctccacccactgctgtaagcaccccccaacaaagacactcccacctacagatcatttcttgataggcacccgcccacaagggctgttaccactctctccaactccaggaagcatcattcacacatactgcctgcttcctgaatggtgtcccctggagttgtgcagtgcaccgtctgcacaactgtacatgggagcattgcagtcacccctacggccctgcaaacacacacattcacaaacacatagagctacacattcagtttcccatctggtccaactctcccctgcagacatgcgcacccctctggcacagccccacacacctataaccctgcataattacccgtgcaaacctatacacctacacaagtacacactggcgtgccactcttcagaatctattcccaacaccccagcgctgcaaatgcgtagccaataaaccagcggctacgcagacctatagccgcagatacacccccgcagaccataaaagcataaaaccccccaacggaaacggtcacctattgacacatgtacaaccagacagacacaccccaccccacaacacacaccaggctcctccagccctggggaaagtcataatctacaggagcttcaagccttgaagctgccgcccaggggttggccccacccagggactgaccccataccatagaccctacccagagattggccccaccctcatgagccacgcccaatagttggcctcggctacaggcctaacctagtggttggctccatccatagggcccagctccaccagcccccgcccagggattggccctgccctaatcagccacacccagtagctatctccgcccacaggaacaacctaatggctggctccatccgcaggccgcgcccactggtcccatccagcggttggctctacccactggccccgcccccgcctgccccgcccaggggttctgc

SEQ ID NO: 1560842 - DNA, 4001 bp, Homo sapiens
tgagatggagtctcgctctgtcacccagcctggagtgcagtggcatgatcacggttcactgcagcctcgacctcccgtgctcaagcagtcctcctaccttagcctcccaagtagctgggactacaggcgtacaccaccatgactggctatttttttttttttaatagagatagggtcttactgtgttacccaggatggtcttgaactcctcggctcaagcgatccacctgcctcggcctcccaaagcgctgagattacaggcgtgagccaccgcgcccagactacccttttcctttcctcttcctgcagatggctggagtgtggataaataaacattaaggcatatgcagctacgcctgccctaggagacccgaggctcaccctgagcaccctcattccacacaaagttagcccagttttttaacacacaaaaacgctgagttctggccaggtatggtggttcatgcctgtaatcccagcactttgggaggctgaggcaggtgggtcacttaagatcaggggttcaagaccagcctggccaacatggagaaacccgtctctactaaaaatacaaaaatcagccgggcgtcaaggcttgtgcctgtaactccagctgctcgggaagctgagggaggagaatcacttaaacccgggaagcagagatggcagagagcaaaaatcacatcactgcactccagcctgggcgacagagtgagaccctgtctaaaaaacaaaacaaaacaacaacagaaaccactgagtcctagagaggttaccagccactcaggtgatgggcctgggatttgaatccagcccccgcagggttttcctcttggctcagtttcccagaatgggggcactggctgtgatctgaagttgtgacctcatgacccactgctcaggcccgggggcagccaggtccccttttcttgggtgagtcaaaaccttgtgtccaggcacaagggatctcctgctcccaaaagcagtggccacagccctgggctggacagttggatcaggtccccaattccctggtggcctctctgggcctcagtgggcccctgtgagctggtccccgagcagctctaagtgtttcttttttttttggtggtggggacagagtctcactctgtctcccaggctggagtgcagtggcgtgatctcaactcactgcaacctccgcctcccaggttcaagcaattctcctgcctcagcctccaagtagctggactacaggcatgagccaccatgcccagctaagttttttgtgtgtctagtagagacggggtttctccatgttggccaggttggtcttgaactcctgacctcaagtgatccgcctgcttcgccctcccaaagtgctaggattgcaggcgtgagccaccgcgcctggccagctctgggtatttctcagtagagggtctctgggatctccccaccatggcctgggccacccccaccccctactcacttcactcagcaggaaggagagtgttgtcctgctgtgcctcatgctgctggcatctgtggccctgcagaaatggttctgagacctccagaccactgggagcccaggtacggccctgtgggacaccccctagacagaagctcactcccacactctctgcaccctcccttgaaccccaaggaactaaatcaaggtggcatggaccacaccacaggcaccagtgtgagacacccgcccggaccttgcagcggtccccatccagggacagcagccaggtgcccaaagcccctccccacacctgtccaggttcagcagcctgggtgggggcatcaggactggcgaaacaaggtctcctggccccagacacatgggagacccattcagctcccagagtggctctgatggtttcagggggattacgagaccccagcacctctcctgagacgcccccaagctcaagaataagcttgctccaggaggcccaggcatgtctggcacttaccaccactgcggagtcctgcctgggtcccatgacctgctggctagtgagggaaggaggggagaaaatgacctgaccaagagggaggcccagggctccctcaacacccactcagcggagccccttaactgtctgggcaccaggccaggacataatccacacactttccttgggtgaggctcccagtgggtggagggcagagtgtccaagagggcctgaggggacgagagagtggccaagagggtggccgggcatggagggggaggggcggggagggcagaggaaggaggggggaaggagggaagggaggcgtaggagtgaggaggctgggtgagaggtgttaagattaattgttcatgtgtttgcatatgatagagtgagagagagggcgcgaaggaagatggtggtaggggaccagcagctctgggaagggggggattttatcaactcagggtctaggatatctgcttccaagcagagcccatggggtgtggcctaaggagcttgggggctccaggaaagttgcccgctgtgctgtgccgccccgggtagatcaaagaccctctctggtcattggctgggcgcggtggctcacgcctgtaatcccagcactttgggaggcggaggcgggtggatcacgagatcaggagatcgagaccatcctggccaacatggtgaagccccatctctactaaaaatacaaaaaaattagctgagtgtggtggcaggtgcctgtaatcccagctacttgggaggctgaagcaggagaatcgtttgaacccaggaggcagaggttgcagtgagctgagatcgtgtcactgcactccagtgtgggcaacaagagcgaaactccatcttattaaaaaaaaaaaaaaaagaatggcttgaacccaggagtcagaggctgcagtgagccaagactgcactactgcactccagcctaggtgacagagggagactgtctcaaaaaagaaaaaaagagagagagatggggttttgccattttgcccaatttggtctcaaactaccaagctcaagcaattcacccacctcagcttctcaaagtgctgagattacagtggtaagccaccatgcccggcacccccagttttgtttgtttgttttgagacagggtctcactctgtcacccagactagagtgcagtggtgcaatctcagcttaccgcaacctctgactcccaggctcaaccaattctcctgcctcagcctccctaatagctgggattacaggcacacaccaccacgcctggctaatttttgtatttttagtaaagatggggtttcaccatgttgaccaggctggtcttgaactcctgacctcaaatgatccacccacctttgccttccaaagtgctgggattacaggtgtaagccactacgcctggccctattttttttttttttgagatggagtcttgctctgttgcccaggctggagtacaatggggcgatctcagctcactgcaacctccgcctccctggttcaagcgattctctgcctcagcctcctgagtagctgggattacaggcacctgccaccacgctcagctaatttttgtatttttagtacagacagagtttcgccatgttagccaggctggtctcaaactcctaagctcaggagatctgcccgccttggcctcccaaagtgctgggattacaggtgtgaaccaccgcacccagccaagtgagctcctgattcttatctgtccctgccttgagtctgtggatcccctgaaagtaaagacatggtccccactgtgaccccagcacagagcccagcacatagtaggtgctcagttaatgttttcacacgagtccataactcgtgttttcacacgaggccttggatgaatggtaggggctttatttcctcaggttctgctcctccccaggaaccccagccccatccatgcccccatctctgttggctcctcagggctcactcctggaggtggtgggcaaaggacaatctgtcattcacggatccctgaggaaggaacacacagggagg

SEQ ID NO: 1560843 - DNA, 4001 bp, Homo sapiens
gggtctgatcacgtcgaattggacttggtcacgaagagtttgttcgatgagttcgggagaattcggctacgtccgattgagctcgggagacttcggataagttcgagcttgttcgcctaagtccggttacgctcggtctgcttcgaacaagtccgggtgacgctcgggccgggtcgggcatgttcggtcacgtccggctacatgagggctagttcgggcatctccgactaagaccggccgcgctcggcctgttccgtccgactccagcgggtttagcagcaccgggatgaaccccacggccagccgaaggggcggggcttcttaacccttccctggcccgtctggggtgcgccgtgggcgctgtggtgcaatgggagacgctcttaggggcggactggaggcggcggataacccagatctgcccctcgagggggaggcatgcggatcgcgaccccctacccctctctcggctctccccaagggttccagaaaagcgcgtctgtggacaaatagggaaactgaggccaggagcggccacagggcgtgcaaatccggatcccgggcgcggagggttaaggactgggcccgggttttcttggggcgggggaggctgtttttctttctgctctaaacttagccgggagcggcggggtcaggctgtggttccatgacgcgggcggtgcgggggtagagccccccggctgtgggaacggcgcggctgcccattggccaggggggtaaactgagccagggaggctcggacttgggttcgggtctggcctgcgcggggccggccctcgttcatcctcacttctgagtacccgcgacgcgccctcgacgtccctgcgctgtctctagcgccttcaaaagggaatgtgcttcgctagtgtttggtgccccgaggtcgctctccaggacacggaacccccactctcccactccctggttgaaatggaaccaccaggaaccacggtcataccttctccctccaaccccagctatgaccttggagagggacctcccctctcagcctttgggtgccagacttaccaagtgggtgccaattcggcgcggaccaagcgcaggatgccagccacagtcggcgcccacaagccccactccgaaccccagccttgcccccatccctccccacgaggtcacagtcgtttctggaaaggcagggattcgaacccagaggggtggaccgagtgcttagaggatgcagcgcaagcagctgccgggcgcaggcgcgcgctcagcctgggactcccgaacgccctgcctcgaaaaccccctcaattcaggtcttcctccgtggacacccagagttcattgtgaggcccccagggcatctctttgctggcactgggacaggatgctggtgggagggggcaccaagggaaggagtgccccttccccctcctcccactgccaggacgcacagcctgcctgccccaggccggcgagggtcaggaggagacgtgagcctcagcccgtcccactctgggcctcacagctggaaggagacagacggctggtcccctgggcctatatccaggcggcgggtggagacagacggagacagagagagacagagtcaccaactgcgagacaaaagtagggtaaggtagggtagagggagagagatacagagaaagcgagggagaggcagagcgtccaagcccggactccggccccggccccagctgtccctggccttgtccctgtccctgcccttcccacctccacaccgggcgtcccggtgaccccgccaggccctctgtccagcctcaccacagcggatgggccaccgtgaagcgccgctgcaggcggatgctctgattcaccaaaagcttcctgaagagcccgggggagccgcgcggggatccccgaggggagccgggcccggggaccggggcgggcgcgggggggccctgcatcgccaggactgcgtggaggctggaccgagcgccggctgcgcgggaccttttctggacagctgcgggggcggggcccagcggggagggggcaaagggcgcatcggccccgcctcgaggccggcggctccctgacgacccccgggacaaacggggaaactgaggcacagagtcagacgcaactctctgctccttttttttttttttttttttgagacgatctcgctgtgttgcccaggctggagtgcagtggcacagtcctagctcattgcagcctcaacttcctgggctcaagggatcctcctacctcagcctcccaagtagctgggactacagatgcacaccaccacgcccgggctaatgtattttctggagagatgggggtgtctctttatgttgcccaggctgatctcgaactcccagactcaagtgatcctcctgcctcagcctcgcaaagtgctgggattataggtgtgagccattgcgccaggcccaactgtacttctttagagggctgcccctaagatctcagagcctggatcttactcagccttcctcggcacgtccctggttagtgcagcttgctgggccaataactgctaaaaagtgtagaatgagggagtcagaaagcaaggtgcccagagaaacagctgtcttgccttccattattgagggcatcaccgaggtatagagtttgccaatgtccgatcccacgcaatgtttctaatcctcctctgcccattttccagatggagaaactgaggcctagtgccatcaaacagcgcaccagaaactacaaacccttaatcctttgccaagtggggaaactgaggcttccatggacgcggtcacgggcatgggtctttgttgcagaaagcgagacccaaactcagggccccctctcccagcacccctccacgcaactccccacgtgatcccccacctgctctgacattccccaggccctgtctctggatgccttcacctctcctgctgtctcctcctagacaaacatccgcacatcacctctgccaagtcttctgtcctgcgaaacctcagccgcccacccctgccatcagagggacctcactgtcccaggactggggggggcctctggtgtctgggaggattcccagagtctgtaccaggtgctctaccctcagaatgctggagtcaggctggccttgttccactttacagaaaaggaaaccaaggcttagcatgtgtcacacaaggaggagggacctagaaacagccatgtcacaggcagaggcccaggggacctcccagcaactgaggcctgaccgtgccccttgctgtggaatgacctctgtctctcagcctgggccttccccccggggcggctgcctcagtcttggtgtccccagacatggtacccatgtttctggcagtcctggagaagcccattgatcagggatcccacaggagatcctgaggcaaccatgctaaggccagatacatgagagtctccccattctacagatgagaaaacagaggctcagaggaggagtcacacagcccagaaaaacagagagcctcaggtatctggccaggaagcccccctaacccccgcagtcttgcaaccagacacctggcgggaaccagacctcgctgtccccaagacaaaaataccatcgttgtctgctggggccagacctaattatagccatccctaggggacacatgctgctaggattggccttgtggggacactggagccaaggtctcagcagtcttgacaccacctccccgccactgtgagagaagtgacaatagttacatgtccccaaggagaaaccgaggcacagagattcagcccctcccccaaaatcacagacataaaataggaggctaagactaaacaaaattatgtaaactgagtgcttcaaaaacatgcagcactcagccaacagcagtgaagggaaaagtcattggattttcagacgaaacctacaaagtgtggactactattcccatttcgaggatggggctactgaggcacagaaaggcacagtcatttgcctaaggacacacagccataag

SEQ ID NO: 1560844 - DNA, 4001 bp, Homo sapiens
cactttggtctttgagtctacactggactccaggacctcagttccagatcttcctcaaagtggctatgtggccatggacaggtactgactttctctggacctcaatcaccctatttcttttattttttttctctctttcttttttttttttctttctcgttctttctctctctctctctctctctctctctctcgccctttcttttctttttttttttttttttttgacagggccccactttgtcacccaggctgcagtgcagtggtgtgatcctacctcactgcagcctcaatctcctaagctcaagccatcctccagcctcagcctcctgagtagctgagactacaggagcatgccccaacactcggctaattttaaaattttttgtagagaccaggtctcactattttgcccaggctggtcttgaactcctggcctcaaacaatcctcccagctccgcctcccaaagtgctgggattacaggagtgagccaccgcacccggcctccccatttcttttttttctgttttttggggtttttttgagacgaaatattgctctgttgcctgcactggagtgcagttatccatgctggagtgcagtgggggaacgatctcggctcactgcaacctccacctcccgggttcaagcaattttctcgcctcagcctcccaagtagctgggattacaggtgcgcaccaccacgcccggctaattttttttttttttttttgagacagagtttcactcttgttgcccaagctggagtgcaatggcacaatctcagctcaccgcaacctccgcctcccaggttcaagcaattctcctgcctcagcctcccaaggagctgggattacaggcgtgtgccaccacgcccagctaattttgtatttttagtagagacggggtttctccatgttggtcaggctggtcttgaactcccgacctcaggtgatccgcccgccttggcctcccaaagtgctgggattacaggcgtgagccaccgtgcccggccaaagttttgtatttttactagagacagggtttcaccgtgttggccaggctgctcttgaactcctgacctcgtgatctgcccgcctcggcctaccaaagtactgggattacaggcatgagccaccgcacccggcctctcctgtttctaacatgtgcgtgatgtagcccatccccgagagctctttgagggggttacaaccgaacatccaaagactgcgactggatgaccatattgcaaagggacaaactgagatctagctcacatggtggacacgtggactggaaacagcttcttgggctcttctacctggaggaggccggggttctgcctagctcctgcgtgcgccttagtctagagagaccccactcctagccaacttgctcacacccttggctacctgccacgcccccagcgttccaggctccaccctcagcccataaggctccgccccacggccgccgaccacgcccccagctagccgggtcctgccctaggctcccccactcctccacttcatcttcagcctgaacgttccgcctgttatcttccacctccgggtctttgcacaggccgtgctttctgcccggcccaccctcctccctctccacactacctgtcccgttctaccctcaaaccctgtctttccctctggctcctcctctttggggtcagaggtcagagaaagggcgtagggcaagaactggggcgctagagaaggcggtgacctgggggtgggttttcaagaagggcaggcggaagcggcaccgacaggaagacaaccgggaccgcctgagactcggagctcccggccgagggccagtgtccggctggtcccggccaagacttttgggtcaaaggtcaccgtatccccgtccacgagctgggtcggcaccccgcgtaggctcagatctgggtagaggtgggggatttggcagcattcggtccaagtatgaccgggtctgagttgggtctgatcacgtcgaattggacttggtcacgaagagtttgttcgatgagttcgggagaattcggctacgtccgattgagctcgggagacttcggataagttcgagcttgttcgcctaagtccggttacgctcggtctgcttcgaacaagtccgggtgacgctcgggccgggtcgggcatgttcggtcacgtccggctacatgagggctagttcgggcatctccgactaagaccggccgcgctcggcctgttccgtccgactccagcgggtttagcagcaccgggatgaaccccacggccagccgaaggggcggggcttcttaacccttccctggcccgtctggggtgcgccgtgggcgctgtggtgcaatgggagacgctcttaggggcggactggaggcggcggataacccagatctgcccctcgagggggaggcatgcggatcgcgaccccctacccctctctcggctctccccaagggttccagaaaagcgcgtctgtggacaaatagggaaactgaggccaggagcggccacagggcgtgcaaatccggatcccgggcgcggagggttaaggactgggcccgggttttcttggggcgggggaggctgtttttctttctgctctaaacttagccgggagcggcggggtcaggctgtggttccatgacgcgggcggtgcgggggtagagccccccggctgtgggaacggcgcggctgcccattggccaggggggtaaactgagccagggaggctcggacttgggttcgggtctggcctgcgcggggccggccctcgttcatcctcacttctgagtacccgcgacgcgccctcgacgtccctgcgctgtctctagcgccttcaaaagggaatgtgcttcgctagtgtttggtgccccgaggtcgctctccaggacacggaacccccactctcccactccctggttgaaatggaaccaccaggaaccacggtcataccttctccctccaaccccagctatgaccttggagagggacctcccctctcagcctttgggtgccagacttaccaagtgggtgccaattcggcgcggaccaagcgcaggatgccagccacagtcggcgcccacaagccccactccgaaccccagccttgcccccatccctccccacgaggtcacagtcgtttctggaaaggcagggattcgaacccagaggggtggaccgagtgcttagaggatgcagcgcaagcagctgccgggcgcaggcgcgcgctcagcctgggactcccgaacgccctgcctcgaaaaccccctcaattcaggtcttcctccgtggacacccagagttcattgtgaggcccccagggcatctctttgctggcactgggacaggatgctggtgggagggggcaccaagggaaggagtgccccttccccctcctcccactgccaggacgcacagcctgcctgccccaggccggcgagggtcaggaggagacgtgagcctcagcccgtcccactctgggcctcacagctggaaggagacagacggctggtcccctgggcctatatccaggcggcgggtggagacagacggagacagagagagacagagtcaccaactgcgagacaaaagtagggtaaggtagggtagagggagagagatacagagaaagcgagggagaggcagagcgtccaagcccggactccggccccggccccagctgtccctggccttgtccctgtccctgcccttcccacctccacaccgggcgtcccggtgaccccgccaggccctctgtccagcctcaccacagcggatgggccaccgtgaagcgccgctgcaggcggatgctctgattcaccaaaagcttcctgaagagcccgggggagccgcgcggggatccccgaggggagccgggcccggggaccggggcgggcgcgggggggccctgcatcgccaggactgcgtggaggctggaccgagcgccggctgcgcgggaccttttctggacagctgcgggggcggggcccagc

SEQ ID NO: 1560845 - DNA, 4001 bp, Homo sapiens
gcggggactgagccagtcccactggcaaaacagcctggcgaccagcacacacagcccaaggagcgcggcactccacagctttccatcaccgcaaggcaggcaagcacagcaaccgtggccccgcccctccctgtggacaaccccacacctatgcggcaaaccgcagccgccccgatcaaagatggcacccaggtgggcggggcttgaacagaccgtcccgcccatgccacctgcagccacttcagccttgccccgccgcatctgccgccaaccaatccgggcaacgcctgcgcggcaaacctcagctgcccccatcaaagatggcgcccaggcgggcgggccttgtctcgcccaaccaactaggacagcgcctgcgcagcaaatctcaagcactttcattaaagatggcgcccaggtgggtggggcttgaacaaaccactaggtccaatgccaccctgtcacttcagccttgccccgccccatctgccaccaaccaaccaggacagcacctgcgcagcaaactccagcagcccccatcaaacatggcatctaggtgggcggggcctgagcagatcgtcatatccaatgctacacagtcacttcagccttgccccgccccctctgctaccaaccaaccagggcagcacctgcacagcaaacctcagcagcccccatcaaacatggcgtccaagcgggcagggcctgaacagatcgtcacatctaatgctacccagtcacttcagccttgccccgccccatatgccaccaaccaaccaggggagcacctgcgcagcaaacctcagcagcccccatcaaacatggcgtcaaagcgggcggggcctgagtggatagttacccaatcacttcagccttgccccgccccacttgccgccaatcaactagaacagcgcctactcggcaaacctcagccaccctcataaaagatggcacccaatgggtggggctggaacagaccattacatccaatgcaacccacagtcattcagctttgcctcgccccatctgccaccaatcaaccagaacagcgcctgcgcggcaaacctcagccaccctcataaaagatggcacccagtgggtggggcttgagcagacgattacgtccaatgccacccagtcacttgagccttgccccgccccatctgccgccaaccaaccaaggcagctcctgcgcagcaagcctcagccgcccttatttaagataccgcccgagagggcggggaaagaaaacccctacaggcaggacagcccttcgcccctcccaccaccactgcggcaaacaagccccgcccccagagggtagccgggcacgccggcgccgcgaggccgatggcaccccgcaggaaggggcattttcgcagcccccagacccagcccaggaggcccagggctcccgagagccgcattccgccgtggcaacagggatagcattggtgtcgaccttgctggacttgccgtggcagagcccccggctgtctgccctaatgcccccggtttgctgcggtggcccccggccagtcagaaaggcgcggagaccctgcagcagcccctcagaccccggactgcaagatggcggcaccaacgcagcagcccgggctgcgcccacccctgccccaaaaaggcaccaaccatccacagcctggccgccactgtgcccactctcggactgggcagcgggcggccaagtaccatgtccgccagcccgccctgccacaagggtcgctggcttgccgcggggtcttgggcttgcggcaagacggccactctggcccagagccgtcgcgacaccaaggtcccgcgggcaggaggcgcgcggggcggccgaaggcgcactcacctcacctcagtgctgcgcagcctcgggcacgaacagccgcctagcgcaccctcatggcgcccggcgcccggcggcgccaccagcccagggtggacatctcccgcgcctcccaaacctctcctcccgcagctgcccagacttctgcaccgaggtgcagctcgacgcctccttgtcagggcttctccgcagaggcggggcttctgtgctagccaatcagcagcctcaccgccctctccgggccccctcaccacagccctgtgacgtgccaatcaggctgcggttgccacagcaacagtttggcgcgaaggctgggggctgacgtcagggagtggccgtgagggaccccaaagccaggtctggaaaaggggggtgggttgggtggtgggggtgcagcccccaaagaaatgggggtcgaaatggaggaaaccccactgagatgctcaaatgtaaaaccgctgaagaataaagggacaaatgtacacatctgtctaaatgaaaaaaatgaaaatcctggccgcaaaaacacatacattaacgtctaaagacctgcagggaagacaagacttttccgcctgggacacatgaaagacatcgagctaatttccttaataaatgaagagctcttggaaaccaacgagataaagaccaaaccaagacagaaaaatgggcaaaagggataaaactggcaattcgcaagaaaatccaaacggctggccgacctgcgaaggaaacatcacgacctgtttgcataaagaaatgcaaacctgaaacaccgggcacgtgcggtttaggggagcgggcagtctcacacactactgagttgtttcccagcagccgtcaatacagaccttccactgcgtaagcccactgcattgccatttaataaaacagcaagaaaatgagagagaaaaataatgaggtagaattgtatgggattattaaggattgaattctcagtagatttagtgaaatatacaagttactgaagtttgtagaaacgaactggtaagtgttttctcatttatttgttttttaaggataaacccaaatataggtaaaactgttggaaaggtaggcaagaaattgttgatgagttacttctagggacaaggaatgtggggtggaagagggatttttcccttctgccatccatactgtgaatttccttggcagaaatacgtatttcttctctggcagtaaaatcaatgaattactaaaagttcactaatgtactctttggtccaactattccactctcaaggaactaaaaaagcaaaggaaatacagggatatacagaagattctatacagggatattcacggagcatcatttttatcaccaaaaatgtgctccacagaaaagaattaaactgtattctggtaaatttacacagcgcgattttaactgactaataaaaatgctgtatgattttaactttaaaggaaaaaatctgtaagatgtggttaattaccaaaaggtgtttacctaaggagcacacagactttaataccccaaattaaactttatattatactcaaggagttatcagtggttgcttgctacactgagaagctgctttatgtgttttagactccctagaccatcaacagtctctttttgcccagcagtgccacataaacataatatacgaatgaaaacactgtgcttcttatgaaaatacacgttcaaaacaaattccccagcaggaatattgaaggtgaatgtggtagtaccctgacttaggttacagattttcaaatctggctactctcattaggctcacctggagagctgttaaacaatgcagattcccagtgtcccacagagatctttgtttttcaggttcccaagggatcctaatgtctagttaaggttttgtaggtgattttaatatattttaaagactccatcatccccctgtctcctcaaaggcctctatctgcaataccagtttctctccggatcctgaatcattaatttccacaagacaccacatgctctcagagctcctgcagttaccacccccttgctcagcacctcttggccctgaaaatgcctcttgatagagcagtctactgtcactaactcaatggttttaccatacattctctcctgctaacatatatgccccacaggcttccatcc

SEQ ID NO: 1560846 - DNA, 4001 bp, Homo sapiens
atacccgcaacatggtttctgcaggctttgcccaagtggggcttgcttccaagcaagttccaaagctcagtccagtagctaacccccacttcagactctttgctggcttcccagttcctaaggggctgagtccacattcaggagaatggactgcagaccccctactgtctggcagccgatcttaaagtacacgttattctactacaaaaaaaacaaaacccaagaaaacaacacacacaccctccctgaaagcagtgctccctataaaagctcactgaagcatctttaatgaaccttcctgaggaggctgggggtacagctggaagcagcctgttgcaaattccaaatagctttatatactttatcgttgaataaaacggtattaagtatttaaggtgtctgtttagatataaaaatgtctcattatgacatcaattaatttaccctctcctcagatctctgagtgaagctgaccactcggggatggcgggtcatcttcatggaggccccaacccactgtgtctccatctggaagcatctggcagcgcctgcccatgggtgaccagtggggatgggtactcaccactgaaagaatggactgagtgaggtggtgaggactctcttctgttccgggtcatgtcgtcgtcgctggtcacgtcactgttgttgtcgtctaagaggacaccggtcgccaagttactatctctggcccacattctcacaatagttccccccaatccctgagccgcatctccctgtcacagacacacatggttggaatgacctgatcctgacatttctgagttcaaaacccttcagcggcttccaaccactcctggcatactaaaaactgggtggggggagcatggtggctgtgaccaccccgacctcacccccagacacaaacagccagaaggcaacctcctagcacaccacaccaaaaaggcaggagccataggaggttttctcccttctacagaagtgtctcctttccctctcctgactcaggatggtggttctgcactagggaggttttggcgaccaggggatacctgggcatgtgtggagacacttttggtggccacacccagaaaatcatgatgcagctcaatatcccacagtacacaggacatccccaccgctgcccaggacagagagttatccagtccagaccatgtcagaagtgtggaggctgagagccccaggggacacctgaggcctgcactgaccaccaacaccccgtggagactctcaccttctggttggtacatctccttgtaattctccagcagagtgacgagcttctcacagttctccggcttttttgctcgcacccaaggcttgagcttttcagggatgatggtcaggtactgctcaaggaccaagagctcgatgatctcctccttggtgcgggtctccggctgcaaccaatcgaggcagaggtttcggagtttgatcagggtcttccgaggcccaacaaattccacatagattaggttccgaaacctctgatgaaaaaactcagagtcagttggaccttctcctatgatgacatccggctccttagtcaagtcactgtctagctcatacagatttggggcccaggacttcttaggtttggtggcagacaagtgctttggaggcagcatttctctaagtaaaattttcactggaggaaccaaacatgagtcaacaggaaagacgcggcagcctgtgaccgtcagtactcagggacctgtggatcgtaaggagatatacacatgtcccagaagttgaagaccaggcagcagtggaggccaccttaccagaggcatcgacaatgcttttgggatatgggagtccccagtaaataggcaaacaaccgcacaaagttggcctcagcacagcagttacaagcatgacctctgggcttcacagagacctactcgaggagttagctcggctactaacttgggctactaacttgggactgtgggcaacttgtctaatgccctagaagtctctctgtaatctgagaaataagaataacagcacctccatccctttcagaattgtgaagcttaaataaactaagatacctaaaaagacttaactgcccaatgcaaggcacaagagaaatgttcaaggccctagccagtactaaaatcagacgtcagcacgtttattagcaaaaatgaaaaggggaagtaggagttggggcaaatcctcccctaacatttcttcccttaacacaattattaaaacacagtatacaacatgtaaaaaatggaagaccattcaaaaatattaaaagtactcaactctaggtaatatgacattattccctcacacagtgagaagtgaccattgagcctcttgatgctactgcacgttcttttgccttcatcaatcttgacaaaggtctaatctgtctaaaagaaccggctttctgttttgacattcctttcttactgtttctttacttagttcatttatttccttctctttattttattatctgcccccttccattttttaaacttttgagattggacataaatgtaaagattttcaatctctccttttttttatgtaaccaagtaaagctatacatttccttaaagcatttttgctattatttgcattttattgcgtattttaatgactggtcagcacatctggtgcaactaagtaaggcaatatgggaaagaaatctaggtctgggagcataaactacctactggctttacttccagagaagaaaaaaaaccatatgcaacagaaattttctccctttgttttaaaaggaaagcaagtttaaattttttaatttggaaaaagtctaaaggaaaactgaaggtgtttccattattcagagtctctcattagacattatcacttgcaaatcaatgtggtaatcacggtaaactcatgtttactcgtctcagtgatgggctcccacttccctccctatgcaaactgccctcccacgctctctcctgcatattatcatcccatggagcttgggcaccatccaatgcaaatgcctcgatcctgaagaccttagcgactggactatttccttgctgccttccttcataggactgagaaaccacggagagcacaacatagataatgctctgctgggcagaagaatcccaaagcaagggaaggcaacagaccagagagtccaggctccagatgattggtgtgacatttcagacatggtcactctaacccaggacagggcaagagcagaggtctgtgcctgtgagggagacaggcaagggcagacggcccaactctgttatgtggcagacagactcaggagaacactctggtacctgaaatgatactagccctcatcctcaggcaacaagataccctcagatatgtaatcacctgtctgggaacaggatcctttctggaacttcagaccaagcagctatccacaggaacagagtcaaaacacaggtatctgcagaagttttaaaggaagaaatacacagactaagaatatgaaagacatgtagaaggagtgtcagagaattaactccccaaacaactggggactcaaatagcactggggtgatgccttctataccttcggggaaaggccattcccatgctatataaaccatgccagacaggagaaataaaaagctttcaaactgtctttatgaaaccagaacaagtcaaaaacgcaagacaaagatatcactaagaaaccacgaaccaaaactcatgaaagcagaaataaaagtcttaatgctgctattattgaacattattctatgcagttctactcaattacaataagacaagaaaaacacatctgaggcacagagagataaaactaacattcccttatgtaagatctatacacatatatatgcttctattctgtgaatttctctccctaacagacatgaattgaagcataaagtaccctaggtgaaagctatatatcagaatggcaggcttatagagttcaataggaaaccaataatttttttaaagaa

SEQ ID NO: 1560847 - DNA, 4001 bp, Homo sapiens
catctccactaaaaatacaaaaaattagctgagtgtggtggcacacgcctgtaattccagctactcaggaggctgaggcagaagactcgcttgaacctgggaggtggaggttgcagtgagccatcatgccattgcactccagactgggcaacaagagcaaaactacgtctcaaaaaaaaaaaaagaaagagaaaaagaaaagctctcattccaggatccagtcagttccagacttgctcccgtccagacatcagcttggttccttcaggagagcagcaggtctcaggccagcttggaatcctgaacccaaatgcaacccctggcactccctgtgagcaccgagccagcctaaccagagagacagcacacccacagctgggcaccagcctgctcagtctaccctttaaaagggtcacaggctggattcaaggatctgaccctgagttccttgacacccatctgagactttgtctgcactgttctctacctgaagggagtctcattgctgaaggactagcacaaaagtcacccaggaagtgaagccttcccacactttatctgagctcagagtccatgcccctcctttgcaaatggcaagaccacacggcaagcagatggatgacagagtcccatgtgtccatctgttccagtggcctgtgagtaccttaagggaagacccactgctattcctggaatatagcaggtgcccacaaaatatttgatttgtatgctctaagctccctcaaccttgggggccaacttagaacccactttctgttgccattttccctgtatcttaaaaagagagatgcattcagtccactagatcccccattctgacctcagtttccaacctggcatctggaatactgctccctcctacaccatgccccctctaccccactgtaccaccagacccacaccttctcccattgaactcacacatagctcaggggagcctaatctttaaaaaacagatcaagcagcttgtaacaaaacccttccagcccatcagggcaaagtctgaagccgccacctggaacaccacaccttccaaccagccccaggcatgcacccctgtccccagaacactctgaactctcaacctttgtcccttaccctgggctcagatgctccctatctgggagattccgcccaacgctctggtgaacccatctgtccacccttcctcccactacgaccactcagctttctttcatttagcccagtatggagcacctactgtgtgcaaggcaccgggctactgagaagcaggtaacatacctgcccttgcactctaaatgcagagaagataaagaacaagtacaaacaatgctctatatagtttatcaggtgatgatgagggcacaaaaagtgggatagatggttagagaaggattccctgagggggtgacatttggcccctgaaagaaatggggaagtgccctgctgggaaaagggaattccaagtccgtctcgaataccgcctcctccgggaagcgcccgggtccctggggtcctcgcaacgccgccctcctacccgggggtcttggcagcgaacatgcgtgtcgaccccagcccccaccgcagccgcacacggtggggccgccagacgcgggcaggtggggccggagccagccaggagggtggagaggagctgcggcccccgcgctgaccctgactcggagcgtgcagctcgccgaccggcgctgggactccgggccaacgggaagaggcgcctacccgcggcattcagcgaccccggctgacgctctcacccgcggtccggccgggacacccatgcccctctccacgccagcgggaaagagcgagggaggcgcagcactcacccggtggccgccgccatgttcgcccggcaccggcgtcacgtgaagtgcggcgtcagctgagcccctccgggtgccaatgcatggggcggggtaagggcggggcagggggcggggcatggagtccttgacccacctcctccagagccaaattccacgggacgggaaggggcggtacctggggaagggcggagccccgatggggcggggctcccggagattgggggcccaagagctcggccaggataaatgagcgggctgccggctgcagacagtaggtcgggttagcgggcagcatctgcagccttttcgtggtgggagggaggtcctgaagcagaggacatcttgattctggttcagtccccgatctggcgtaccagcccacccgggagaagaacacataggaataaagaaaccacgtgggaggagaggagggagactgacccaggctagggtcggggcagaggtggcgatttttgtttaagaagggaaagggcttgagcaaaggccgtggggcaactggaggactctaaatgtgcagcgtccaggagaatgtgcgcgagagaggggcagcctaagggaagcaagggccagaccctgcggggcctccactgtggggcctatgagttaagtctggtaggatcttttctaggtttcctgggctgcagaatggagaagctggaggaagggaagccagggaggagggcaggcgagaagtgggcacagccgagaagggtttaggagggagagtctgccagaaggcttactcctctgccccactgggcactggtactgggtgcagagtcctgcagagaaggtgtagggaccctgcagcagacgctgccctccctactgccaacagagtcagggcattacaagcacggcccaaatgcgttgcacatgtgagctcatagaaacctcaccacagccctatgaggtcgagactatctttaagtctattatacagatgaggaaactgaggccagagagtgctcacacagaggctgagctcatgaagccataccctgaggagtgacctcactgcccctgtgaaggaagggggccccacactgttgggggagggcgtccctggcgccaagggtgtacagatgtgtgtggtgtacagatgtgtgtggacaggtggatgggtggcccaggataggcgtgtggggctcctgaccccaccctgcagctgtcccacagctggaagtggcttctgatcaaaggttgtgggttgggggatgcttcttgtttctttatcgaaacaaggatgtgggtcaccatggccaggctggtgggagccaggggctatgactggagaagcagcttctgtttgtccccatgaagcagggaggagaataggccccttaaataggagcaagggagccagccataagcagggtagtgaagggcacgtggcacagttacctggaagcccagtaccatccctgctgtcctcatctgtcaggagagagctaatggggccacctcacagggctgctagagggttttacactcaaacctgcaggcacagccagagaccaaagctgccaggaggaatgtggcccctccagacagcccctcccacctcccggtcccagataaggaaaacgagagctaatggaagagggggggcctcatcccttctaccccttcccacaacacatggacaatttgcaggggtccctgacctccaggcaaggtccaagaggagctctctccaccctcttgccagtttccaggaagaagaacagaggtaaggattcacaccccactgcctggcctaggggcccctgagaacttctaacacccctagttaagcagtaggtccgccttcagcttaagaaactcaactccctagtaagtggcgctttaaaaaatacataataacaaagggtgagcagaatgagctttccatgcgccttcaaggaaggaaaacataccccccagctcattcattgcacctgcctcccaccatttcttttgacataaaatatgtcaaaattaagccagctgccagctctgagtgcttactaatatgaaaaagaagtcaatatcccaaacacaaaataatggaaggaaggcacccaccaactgagtggagctcccttgtttgtggacagtaatatggaggcactgcccatgacccctgcc

SEQ ID NO: 1560848 - DNA, 4001 bp, Homo sapiens
gaccctcagtccccaacccctgctcacccctcaggacccgaccgctctcggcttccgtcggaacagcagcccccagcccccgacacaagccccctgagggcctgaggcatcctgggtctcactcggcccccaaaaactgataaaagaataaaacacttaaatgaataacaaggaactgagtatatgtatatttcatcaggggaggggctaggactcccacttggaggcctcaggagttctgctgggcgtcgcgaaggagcttctcctcccgccgcttccgtaacctctctttgaattcctctatctcttgaagctaggggtggagaagcgggtgggacaggaaggggggaggggcacacacctcagagccgggaccacccccccccgcccacctctcccaccaccctgccccagaccacggcttcagggttcagtgtcttcactggaagccccctgccaattacaaaggggtccgcgtgggatccgcttcactcttccaggagaaggcaataaggaaaccatctactcctctgctctcggttccttactcatggctgagagtaaaatgtttctttttgagacaaagtctcactctattgcccaggctggagtgcagtggcgtgatcttgggctcactgcaacctccacctcctgggttcaagtgattcttctccctcagcctcccaagcagctggaattataggcgcctgccaccatgcctggctaagttttgtatttctgtagacatggggtttcgccatgttggccaggctggttttgaactcctgacctcaagtgatctacccacctcagcctcccatgccctgggattacaagcatgagccactgcgcctggcctaaaattttcatctaaaacccatcccggatacaagaatccagcctcctccatccctctggcaggaagaagagatcacttaccttctcaggtggccacagctccctctgtaaggaaaagtcacaaatgggacacgagccaaaggcctccagagccccacatcagggcagggtcggcttatgggaggcagacattagtccccagcagactgctgccccacaccctctcccacccctggaatgaaccctcaaacactcctcttatgcccaccttgcgctgtatgacatcgtcctcaaaccactcggcctgattggaaacccagaacatagccacagggaaagtgaggtagattatcatctggaatggcagagggtgggtgaggtgagctccccccaagcaatgtgcagaggctcctcagagcctgggggacccatcctactgcagagtccagaagcgcctcgttacggccgacccaagaatcccagaactcccaccaagggtacagaaacctcgcaccctaaaacctaactcctataatccaggaggcctcattcctgaaagttccctctgagctggagtcttcctctcaaacacagacagacacacagacgccccagctacaatcaaaagcatctcctcgagacctcattacccatccccacttaagatcccgggagcacccccaaacccaggaggcgtcactcttcaactccacttctcgaagtctaggaatctccctgtcatagacacccacccaccacgagcccgagagctcccccaggatcttaagtcttccttctttagagcccccttctcagctcacccctctctgaggtccttcctcggaccagccctctcacagcccccaaacccagaagcccaaatccgagaacccccccagcccagcgtcccctctcctggatttccaaccagaaaggttcctctcaaatcttaagagctttctccttggagctccctcttcctttgaagtccccccatttccaacctcatcttcagatccaggaagatcccctgcccagcctcccaacccactcctgtgtccactgacccgaaatatctccagcttcacccccatctcgtttctcccggtcaacaaagccagttccgcccaaagccgaccctccagcaagacagaagctcactggtgttttgcacgctccattgctgaagctgattggccaatgtgtatcctgatggcgcatcttctggcgcctctattctgcttccggtcgctggcgtcgtcgaaaagaagtcaataacgtgggcctgtccgtcaaaaatgatttaaccaatagaaaacgggtctggctcggaggggcgggccgtcagtggtagacgtcataagcgcgcgactctctcctgtacctgggcatccagaaaaatggtggtgatggcgcgactctcgcggcccgagcggccggaccttgtcttcgtgagtccacagaggagccgggggtggcctgcgttggggcattgggacctggacgccgcaggggatcgaggctgggtcggcaaggagatttaggccgaaactgccaggccaaggtctgggaaccctaatgggccagagaccggatcgtcatgtccgcaccgaactgtccaggagtaaaaatatggtgttgtatcttcgggtctgagtagaaaaccactgtcgaagggaagcgtctagcctcccgaaccaggggcggaaatgggggcgtgcagggaatgggagaggaggaagatcgcataactgaaccttgagaggtgaagatcggtgtctgaagtaaaggcttgcttacgaggccagggttctggtttctgggatgaaggcttggttttctggatagcggtctctaggcctggactgcagcatgacagtttctggggtggtggccaggctagaagaaccctggtgatgtggagcttgtcaggcgatggccagtgaaatacttactctctggagtagaggcgtgacatcttcaccagattcttggtgtgcagagttaaaggcttggcttctggtgtataactcctcctgtgagataaaggcctagcttttaatttctggggcagagttgagctagacgctggctagtgggatcctgggggcggggctagtggcttggaatctggacctgagagccctggtggctggggtaaagatctggtcatctgggcctggggtggagatgggtcagatggtgacagtgggagtctgaggggccaaaggcctggtgtctgggaagaggcacgttttgaagaagtggggtctggtgtccaggactggcatctgggccagggccttggtatctaaggagtctgaccatctggggcagaaagcgagtggtgatgcggactcattcctggcccagagccctaatgactgagaagtctgatgatttgggttcgattttgggtagttgaattctgaggggtaaaggtctgggccactgtcttggtgtcgggcatctggtttggtgcctgggcatctggtgacctgacttccttggtgggtggtgggatctaggtaaaagtccggagtttggacctgagccccagcagtgggatggtgctgcacacaggctctgagggtaggcctctcttcttcccattccctggccctggcaggaggaagaggacctcccctatgaggaggaaatcatgcggaaccaattctctgtcaaatgctggcttcgctacatcgagttcaaacagggcgccccgaagcccaggctcaatcagctatacgagcgggcactcaagctgctgccctgcaggtgggaatggctccagctgccctgcccaccagcccccaccccacctggtccagttataacaaaactgccaagtgggtcccgggtcccgggtgattgcttcgtgtttcatcactgacctgtacatcccttgatgggtcagcacaccttctctgatgtcccagtctgtccctgtcattgctgagacatgtcacccctcccacaccccttcttcccacatttgccaactggggcagggcaaatggttctgggggtgtccataaagctgaccgatcagcatctgtcccctcctattccccagctacaaactctggtaccgatacctgaaggcgcgtcgggcacaggtgaagcatcgctgtgtgaccgac

SEQ ID NO: 1560849 - DNA, 4001 bp, Homo sapiens
cctgtctaaaaaaagaaaaagaaaaagaaaaaaaaagctggaagtttaaaaacatacttggaggtgggacaaatgaagaaacatgacatcattgatgtaactgaagggcacagcctttgggaacagatgtgacaggaacaaagaaaacaaagctccttacttcccacctcctaggtccttcttttcccaggtggcaggaagccacagctaaagtgtatatttacatctacctgcctggaccaaagcctttggatgtgctgaatggtgggcacaggtgatcaggcctcaacccagtgaacaacaggataatttggtagaattactttagagagaaagaacctactcagtaggtgatgtggagccttctgaaataggtcatcttcactactcagatcttttttcttttggagacagagtcttgctctgctccccaggctcgagtgcaaaggtgtgagctcactgcaacctctgcatcccaggttcaagcaattctcccgcctcagccttccaagtagctgggactacaggcacgcaccaccacatccggctaatttttgtattttagtagagacgaggtttcatcacttttcccaggctggtctcaaactcctgagctcagacaatccacccagctcagcctcccaaagtgctaggatcacaggcgcgagccaccacgcctggcctcccttatatctttattttacctgcttttcagaaattgcttgttcctgttgttttatttatttttacttgtaattcctttccagccccattataatggcaaaacactgcaatctgaatgttcaactcgggggagatttgttaacccacccccccaatcataagatatttgaatggaatctaaatgcctagccaccagtacaccgcctggtacaacctgaatgtctacctataagagactggtggggacaagctaagagtccagactcaggggcatggatggcataacctaaatgttcaaccatatgggacttgattggaactaaaaactgtccagccatagggagagtcttgcaatatcctaaatccccacatgagattgtttgggacaacccagggaccaactacagtggcccggtcagatcctaaatgtccaaacatgggaatctgtttggtatgtaaacgtccagccaggctgggttggcagagacgatctaaatgaccaactggggttttgttggaacccatcgctgcttaggcatggcagggcccaggccatggcgtgttctttggtctaggttggctgaaacaacctaaatgcccaactatagggaatctggttggaagtgaatgtccagccacaggggagccctgcaacatcccaaatcccaacacgagattgttcaggacaacttcagtggcctggtcggatccaaaacgtccaaacacgggaatctggccagtgtgtcaatgtccagacaggttgggttggcagaaactatctaaatgtccaacgctggccagacgcggtggctcacgcctgtaatcccagcactttgggaggccgaggcaggtggatcgcttgaggccaggagatcgagaccatcctggctaacacgatgaaactccgtctctactaaaaatacaaaaaaatagcagggagtggtggcgggcgcctgtagtcccagctactcgggagtgctgaggcaggagaatcgcttgaacccgggaagcggaggctgcagtgagcagagatcgcaccactgcactccagccaaaataaataaatacataaatgtccaatgctagggcaccgcatttgagcctagctcggacggggcctctgcgacggagtatcctgggcgaccccgtcccctctctggcccgtttcccagtctctgagcttgggccaaactctaggacctccggccccggtccgcccctgcctcaccaggcggtcccggcccctgtacgactccagcgccgacgccaggccgctcagcgacgccatggcaactccgtgacgtcaccgcgacgtcggcgcgccgcgccagggggcggggccaggccggggtaccgggagcgccccaaaggcttgcgcgcaggcgcggccgcaggcctttgtccccctgaccggctttttgtccgctgtaggggagggacagagtttgcagaggtggggccgacacgtgtgtgctctccaggcctgcagaccctggatcatcctcggagtttgctgcattctgccccacggcggtttggccaactacccacgcacaaaaaaatatatttctaagtttaaccaactacccacacgctccaaaaatattccaagcaaaaccaccaacctgttcgcagtggttcaaggagagattttcctttttagtttttgtgcttcaccttttctgcactgtctgcctgcccgtagtgagcaggaatgactgctgtaatatcacaacaaggcatctttcgacgttaaggaaagacgttatctttggacgttaagaattgttctagaatacataaataaaaaataaaaatgcacaattcagtgacattagtacatgcacatgttggacaaccatcaccccttgctagtttcggggtatttttatcacccccaagagagacccccgtaggagaccagcatatgcccctctgaaatatgcgaccttggtgtaggattattttgagctgagatcaatgaagctgataccggaaaagctctctgttcttccctgatttgcctcaaagcaggacctaaaggtacaaaggtgccctcctcccctctctaccaggaaggacaaaggttgatcaccagggacacctttagactcttgtctggagacgtcttttttttttttttctttttttttgagacggagtcttgctctgtccccaaagctagagtgcagtagcgccatctctgctcactgcgtcctccgcttccctggttcaagcgattctcgtgcctcagcttcccaagtagctgggatcacagctgtgcaccactgtgcccggctaatttttgtatttttggtagagtcggggtttcaccacgttggccaggctgttctcaaattcctggcctcaagtgatccgcccgcctcggcctcccaaagtgctgggattacaagcgtgagccaccgcacccggcctcaatgtccttttccttcgtcttgtcacttctccaaaaatttgctgctatatgttgaaggtgctatataagcaggagttatataagctatataagccacctcatttctcttggcatctcccatgtacacataaggtacacatgttaataaatttgtttttcccttgttaattttttttttttagacggagcctcgctctgtcgcccaggctggagtgcagtggcacgatctcggctcactgcaagctccgcctcgcgggttcacgccattcttctgcctcagcctcccgagtagctggcactactacaggcgcccgccaccacgcctgggtaattttttttttttttttttttttgtatttttagtagagacggggtttcaccgtgttagccaggatggtcttgatctcctgacctcgtgatccgcccgtctctgcctcccaaagtgctaggattacaggcgtgagccaccgcgcctggcctctattttttttttttttttttttttttttttttgagacagggcctcgctctgggaggaaccaaatttgtagatgtgaagccgccacttgtgtgctctctgggcctgaggacccaggatgatgcccagagcttgctacattctgccccatggtagcttgaccaactacccacaaaaaaggggtagagtgcagcggcacgatcttaactcactgcagccttgaactcctgggatcaagccatcctgccacctcagcatcctgagtaggtgggaccacaggtgcctgccaccacaattggctaatttctttttattttttattttttgtagaaatggagtcttaccatgttacccaggctggccttgagccctgggcttaagcaatcttcccacgtcgacctt

SEQ ID NO: 1560850 - DNA, 4001 bp, Homo sapiens
cttctgaaataggtcatcttcactactcagatcttttttcttttggagacagagtcttgctctgctccccaggctcgagtgcaaaggtgtgagctcactgcaacctctgcatcccaggttcaagcaattctcccgcctcagccttccaagtagctgggactacaggcacgcaccaccacatccggctaatttttgtattttagtagagacgaggtttcatcacttttcccaggctggtctcaaactcctgagctcagacaatccacccagctcagcctcccaaagtgctaggatcacaggcgcgagccaccacgcctggcctcccttatatctttattttacctgcttttcagaaattgcttgttcctgttgttttatttatttttacttgtaattcctttccagccccattataatggcaaaacactgcaatctgaatgttcaactcgggggagatttgttaacccacccccccaatcataagatatttgaatggaatctaaatgcctagccaccagtacaccgcctggtacaacctgaatgtctacctataagagactggtggggacaagctaagagtccagactcaggggcatggatggcataacctaaatgttcaaccatatgggacttgattggaactaaaaactgtccagccatagggagagtcttgcaatatcctaaatccccacatgagattgtttgggacaacccagggaccaactacagtggcccggtcagatcctaaatgtccaaacatgggaatctgtttggtatgtaaacgtccagccaggctgggttggcagagacgatctaaatgaccaactggggttttgttggaacccatcgctgcttaggcatggcagggcccaggccatggcgtgttctttggtctaggttggctgaaacaacctaaatgcccaactatagggaatctggttggaagtgaatgtccagccacaggggagccctgcaacatcccaaatcccaacacgagattgttcaggacaacttcagtggcctggtcggatccaaaacgtccaaacacgggaatctggccagtgtgtcaatgtccagacaggttgggttggcagaaactatctaaatgtccaacgctggccagacgcggtggctcacgcctgtaatcccagcactttgggaggccgaggcaggtggatcgcttgaggccaggagatcgagaccatcctggctaacacgatgaaactccgtctctactaaaaatacaaaaaaatagcagggagtggtggcgggcgcctgtagtcccagctactcgggagtgctgaggcaggagaatcgcttgaacccgggaagcggaggctgcagtgagcagagatcgcaccactgcactccagccaaaataaataaatacataaatgtccaatgctagggcaccgcatttgagcctagctcggacggggcctctgcgacggagtatcctgggcgaccccgtcccctctctggcccgtttcccagtctctgagcttgggccaaactctaggacctccggccccggtccgcccctgcctcaccaggcggtcccggcccctgtacgactccagcgccgacgccaggccgctcagcgacgccatggcaactccgtgacgtcaccgcgacgtcggcgcgccgcgccagggggcggggccaggccggggtaccgggagcgccccaaaggcttgcgcgcaggcgcggccgcaggcctttgtccccctgaccggctttttgtccgctgtaggggagggacagagtttgcagaggtggggccgacacgtgtgtgctctccaggcctgcagaccctggatcatcctcggagtttgctgcattctgccccacggcggtttggccaactacccacgcacaaaaaaatatatttctaagtttaaccaactacccacacgctccaaaaatattccaagcaaaaccaccaacctgttcgcagtggttcaaggagagattttcctttttagtttttgtgcttcaccttttctgcactgtctgcctgcccgtagtgagcaggaatgactgctgtaatatcacaacaaggcatctttcgacgttaaggaaagacgttatctttggacgttaagaattgttctagaatacataaataaaaaataaaaatgcacaattcagtgacattagtacatgcacatgttggacaaccatcaccccttgctagtttcggggtatttttatcacccccaagagagacccccgtaggagaccagcatatgcccctctgaaatatgcgaccttggtgtaggattattttgagctgagatcaatgaagctgataccggaaaagctctctgttcttccctgatttgcctcaaagcaggacctaaaggtacaaaggtgccctcctcccctctctaccaggaaggacaaaggttgatcaccagggacacctttagactcttgtctggagacgtcttttttttttttttctttttttttgagacggagtcttgctctgtccccaaagctagagtgcagtagcgccatctctgctcactgcgtcctccgcttccctggttcaagcgattctcgtgcctcagcttcccaagtagctgggatcacagctgtgcaccactgtgcccggctaatttttgtatttttggtagagtcggggtttcaccacgttggccaggctgttctcaaattcctggcctcaagtgatccgcccgcctcggcctcccaaagtgctgggattacaagcgtgagccaccgcacccggcctcaatgtccttttccttcgtcttgtcacttctccaaaaatttgctgctatatgttgaaggtgctatataagcaggagttatataagctatataagccacctcatttctcttggcatctcccatgtacacataaggtacacatgttaataaatttgtttttcccttgttaattttttttttttagacggagcctcgctctgtcgcccaggctggagtgcagtggcacgatctcggctcactgcaagctccgcctcgcgggttcacgccattcttctgcctcagcctcccgagtagctggcactactacaggcgcccgccaccacgcctgggtaattttttttttttttttttttttgtatttttagtagagacggggtttcaccgtgttagccaggatggtcttgatctcctgacctcgtgatccgcccgtctctgcctcccaaagtgctaggattacaggcgtgagccaccgcgcctggcctctattttttttttttttttttttttttttttttgagacagggcctcgctctgggaggaaccaaatttgtagatgtgaagccgccacttgtgtgctctctgggcctgaggacccaggatgatgcccagagcttgctacattctgccccatggtagcttgaccaactacccacaaaaaaggggtagagtgcagcggcacgatcttaactcactgcagccttgaactcctgggatcaagccatcctgccacctcagcatcctgagtaggtgggaccacaggtgcctgccaccacaattggctaatttctttttattttttattttttgtagaaatggagtcttaccatgttacccaggctggccttgagccctgggcttaagcaatcttcccacgtcgaccttccaaagtgctggaattacaggcgtgaaccaccgcacccgcccttcttaattctttcattgcaaggatccatcacagctaagaactaagaataaaggaaaaagtatgtttcctcccctacaccctgttcccataaagcaatcactcaattcctccctcctcccagcccctggcaaccactaatctgcattctctgctgtctctctgtatttttaccacttcttgattttttttttttttttttttttttgagacagagtctcactctgtcacccagactggagtgcagtggcatgatctcagctcacggcagcctccgcctcccaagttcaagcaattctcctgcctcggcctcccaagtggc

SEQ ID NO: 1560851 - DNA, 4001 bp, Homo sapiens
tggtctccaacacctgacctcaggtgatccaccatccttggcctcccaaagtgctgagattacaggtatgagccaccacgcccggccaaaaacctgcttttttttttttttatctttaagacagtctcactctgtcgcccagggtggagtgtaatggcatgatctcggttcactgatcatgcctcactcctgcctcagcctcccgagtagctgggattacaggtgcgcaccaccacacctggctaatttttgcatttttagtagagacaggtttcaccatgttggtcaggttggtctcaaactcctgacctcgtgatccgcccgcctcagcctcccaaagtgctgggattacaagcgtgagccaccgcacccagccaatttttgtatttttttttagtagagacagagttttgccatgttggccaggctggtctcgaaatcctgacctcaggtgatctactcacgtcggcctcccaaagtgctgggattacacgcgtgagccaccgcacccggccaaaactttttaatgatgctcttggaaaacacacacaggaaggcggaagttaaatgtgtacccaactacgaagtcagatgaggcaggatcacaccctggctgcccctctggtcactagatgccttgggcaggtaagctcacctcttctggcctcagtttctccatctgtgaaatgagtgtaacatctcataggctgtggtacggactcatgaattgatgcatataaagcgttcagtaagccttttctcttaataaaaaacccacaaaaccatcatcagctcaagattctatgcaaagagaagacggcacacccagcatggggtgtcccttgacgctgccagactcaagtgacttgaggttcctggcctttgagcccgcccctcccactcttccctcggccaggccaaggctcctccaagcctcagttaccctgtctttaaaagagcgcgctcctctgattctatagaatcctgaggctcaaagccaaagatgaacagcctggaagcagagccatcagagcggcaaagctgcccagggatccccgagaactcgctggggttagagatcaggaccctgagattcaggctctacacctgattcctcgtgcccccgtccgctacggggctgagttatgggcatcgtttgacatgggccactcggattcccttccaggcccttgcccgtgccgttccctctgcctggccaccggatgaagcaggaagacggactgcaagtagaccatttctagccctgcctagataaaggcagagggcgcagtgaggtcctgcgggacccactgtaggcggggttcaggaggcgggcgagccctgtcggctagacccccagcggcccccgtagtcgaggtgcaggcagtgggcgtgaccatctcggcatgacccccagtggcccccgtagccgagggcaaccggtgggcgcggccctcttggcatgacccccagcgacccacgtagccgaggtgcaggcagtgggcacggccctcttggcatgatacccagtggcccccgtagccgaggtgcagacagtgggcgcggccctttcggcatggcccccggcggcctccgtagccggggtgtaggcggtggctgtggccctctcggcgtgatccccggcggcccccgtagctctcacccggtagaggccgtacgtgctctcggcgtgatcgaagggcacgaggcgctcgtcgcagaagcccagcgtccagcgcgctaagctagctggcccggcaggggcgacggcggcgggtagctcgcgggctagcatcgagacgaggctcccgcccgacaggccgagcgcgaaacgggcgcgggcccctgccaggcagcatgctgcgcgctgggccaccagctgcgctagcgccgcacccagctcctgggaactcgagaacaccgagatgaggcccggggccggcgcggccatggcgagggcggcggcggggaggaggaagcgctccctacggccgtcgctagtacgcctgcgcaagggccggccctgccgcttggtttcgagtactttgggtgattgtctttggcacatgcgcagtgaggcaagtgaagcaccgcgaaggtcgggcagtcggtccggccctacccattgaatctttgcctgctgtgcctgagtcgaagtgagttcgggaagccagtgcccgaatgctcaaccttgctgtatcagggagggccggagaggggagctcaagaagaggacgtcctatcgaggtggcagggattttctgaaggagggcgtattttggtgagttttaaaattcctgcaccgccgggcgcggtggctgacgcctgtaatcccaacactttgggaggccgaggcgggcggatcacgaggtcaggagatcgagaccatcctggctaacacggtgaaaccccgtctctactgaaaacacaaaaaattaaccgggcgtagtggcgggcgcctgtagtcccagctactcgggaggctgaggcaggagaatcgcttgaaccggggtggcggaggttgcagtgagccgagatcgtgccactgcaccccagcttgggcgacagagcgaggctccatctcaaaaaaaagtaggggatgaaaatatgcttgttgaattttttttttttttttttttacattttccggacggacgggctcttgctatatggtctaggctgatcttgaacccctgggctcaagcgatcttcctgcctcggcctcccaaagtggtagcattcaggcgaaagccactgcgcctggccatgcttgttgaattttttaagctaaccctcctagtgtggtggtgtgtccctctgagtgcccagaaaggcctccaatcgagttcttgcctggacagagggctggaaggggaagaaggcctggtgggcctggggaggctgggccacttctgagagtgggatatttcagtgatgtgtgtaagcgcagttcaactcacacaggtagtggattttaaaatcagtagcaaattaagaaaacaattccatttaccatagcatcataaagtataaagtaggcataaatttaataaaagaagtacaagactgtacttcttgagagctgtagctgggcttggtggctcacagctgtaatcccagcacgttgggaagccaaggctggacccggtggcagctgcctgtggtcccagctacttgggaggctgtggtgggaggatcacttgagcccaggagactaaggctgcagtgagctgtgttcctgccattccactccagcctgggcaatagagtgagaccctgtctcgaaacaagcaaaagaactaaaactttggtgaaaaaaaaaattaaagatgatctaaataaatggtaagacattccacgttcatggattggaaagtataatattgttaagatggcagtactccacaaattggtctacggatgcaatgtaatccctttcaaatttacaatgtttttgttgaaattgacaaattgatcctaaaattaataataaattgcaaatggccccaaaatagccaaaacaatattgaataaaatacgaggactcatactttctcatttcaaacaataaaaaggtacaataaccaaaactgtggtattggcataaggatagacatataaataaatgattggaactgatgcagaaataaacctatgcatatatggtcaactcatctttggcaacggtgccaggactattcaaaaagaaaggagggctgggcgtggtggctcacgcctgtaattccagcactttgagaggccaaggcaggtggatcacctgaggtcgggagtttaagatcagcctgaccaacatggagaaaccctgtctctactaaaaatacaaagccttagctgggcgtggtggcacatgcctgtaatctcagctactcgggagtcggaggcaggagaatggcttgaaccccggaggtggaggttgtggtgagctgagatcacgccattgcactccagcctgggcaacgagcaaaactctgtctcaaaaa

SEQ ID NO: 1560852 - DNA, 4001 bp, Homo sapiens
tgataaaatcttgaactggaagggctgggaatacctttggacacttctagacttctctgggtgggttttgtgtgtgtgtgtgtgtgagacacagccttaggaggtcctgagaacatgtgtcccctgggtggggtctattgaagtggtctctggggacctgcatgttcctccaataagctctgcaggagattctgatgcttacctgggtctgagagcctgcaggattgaaagttccctccctgtggaaaccgtcaggctggactgcagcccattctaaggaggaggtagctggtaggcgtggccccggacctgcttcagcctgcttcagccggcaccccttacagtctgttctccccacagcagccagagggagtctcttgtacctacactagccctggtccctgctctgcggggggaagcctcccatggctcccatctcggagtaaaagctacagtcctcactgtggtccacaaagccctgcctggtcctgccctttcctcatttcattccgctcgcccggctgtgttcagccaccctgtccttcccacaggacccgcccactcaaccccgttggctttgcccccagcaccccctgccacctgcaggcctctgtctgctcccccatcccagagccaaggcagccactctcagggaggctttcccttgccccacccttccaaggagcctgtgtgggtctggtcccagcctgaggtcaccctccctcacctctttccttttatccatcgcctctatcaccgtctgaattcacctgtggccttggcttgtttctccctgctggtctttcaaccccaggaggctagagtggcaccgttctccatgccacatctggcacactgcctggcacatagtaggtgcctaatggtaatagcccgtggctttgcgggcccccgtgtgccaggcagttcctaggtgctttgcctgtattggctcatataaggagcagatgggccgcgattccattgactttgccgaggaggaagctgaagccgggaggacccgccccaggcctcagccagcaataagatgagctgaccctggaacccagctccgcactgagtcagcctggttttccgcctcctaacaaaggcaccaggcatcaggaaggggcgccttcataaggcgtcgcggacaccttggtgtgtgttaggcaaagcctgccccttcttcccgggagcgggagcggggcttggatttcagcccatccccccttctcacgcatctttgtgctgtgagcacctgccccggcccacgtggtgacccgaggaagaaatgaccttgtgaggttcagtaagctgctcagggtgtcagccaggtggcctcagcaccaggcctagaaatggtcccgctggcgggcacttgcacacctttgcctctgggatccccagtccagcccgtgcccccctgccacactcacttgtagcccacgtcgcaccagcccagtgtcttcatgtggtagtgctgcacattccgggcctgctgctggcacgaggcgggggtgttgcagctgctgcccgccgtgtgcgataccaccacatagcgtaagggcaggctcaggtgctgggcgcactctgatgccagggccttccactcgttccggggcactatggggctgcagcaggccgggtcttctgtctcctgagccgctccgagtcgaaggaggctggggagagcccaggcaagcagcatagagcggcgggacatagtggcagggcggcagggtccgggagaccgctaggagcgcccggtggaggggccgcctttatctgctgggggattccaggagtggcccggaaagtcttgcttcacaccctgctgggacttcctgctggcccagcagaccccagactcagcttccttctctggctgggccagggcgggatgcactgtggttggggtctgggtcacgcccacggcaatgacaggccccctcgctcagcagggagggacgcacaggcccctgggcgcttcgccccgccgtttctggaagacccggggccgggatcccggtcctgcttgtctctcctctcagtggaacattgaacaactcaacaggaacttacatcgcagaggcccggggcattggcacatcttctccccgcaaggactgaggtaacaaagctacccattttaaaaacacttccttcccccaggtccaagcctgatgccatttacgcttgcagcaaactcaagaggtgagtatctggaagtccatttcacagtggagtaaactgaggttgagagcagggaagtcacgggctgagacaccggaggcactggagccccgcgtctagagccaggctgcctgcatgtgaatcctggatatgcagtgtgtgagagcctgcaagtggtttttaaaaatgtgtatttaaaattttttttttaattttctattttataaataatattttcctttttttttttttttttttttgagatggagttttgctcttgtcacccaggctggagtgcaatggtgcgatcttgggccactgcaacctccgcctcctggcttcaagtgattctcctgcctcagcctcctgagtagctgggattacaagtgcacaccaccacgcccagctaatttttatatttttggtagagacggggttttgccatgttggcctggctggtgtcgaactcctgacctcaggtgagccacctgccagtgttccagagtgctgggattactataggcatgagccaccgtgcctgacctgtgtggtgtgttttcatcttctgtgttctgccttctcatatacattgtactcatgctgttactgaattgtgcaccaggcatctgtagcacttttcagaaattatcatatactcaacgacaagcttgccagatccatgttattattaacccctcttacagttgacggaactgaggcccggggggatgatcacatacaggaggtgatgaagccagggtttggctacaggctttctgcctgcagagttataaaccgtattctcctccctacaaacttatataaggacattaaaaaaaaaaatcaaaaccatgtgcatcaatttaccttttgtcacctaatatttcatgggcatctcaccagggcagtacatctaattctaatttattctttataatagttgcacaatatgctatagtatcagttcagcattgtggatcttttagtttttgaaggttttccagtattttctccacactacgcaaaatattttcagacatatatccctatgcactggtgcatttataagtaaattataaacacagagttattaggtcaatgagtatacatatttaattaatattaccagatcattttccccaaaaagccattaataattcatatttttcaccagtaatgttttggagcctcctcaccccgaccccagaagtgggtgttatcacttttttttttttttttttgagtcagagtctcgctctgtcactcaggctggaatgcagtggcacgatcttgtctcactgtaaacctccacctcctgggttcaagccattctcctgcctcagcctcccaggtagctgggattacaggcatgtgccaccacacctggctaatttttgtatttgtagtagagatggggtttcgccatgttggccaagctgatctcgaactcctgagctcaggtgatccacccacctcagcctcccaaagtgctgggattacaggcatgagccaccttgcctggccagtgttatcacttcttaaatttataagtataaagtgacagctcctttggcatttttatacccactcaggagactgggtatttttctgtatttgctgtctatatttgggcttgctcttttgtcaattacctgttcatatccattgcccattaaaaaaaattgggttgtttgcctttttgttattatttgcaaaatgaacaaaagaatcccataattgggatttttgacttcttgggtgtgtacattttgtgtatttcagtttttttagaagcattaaagaataat

SEQ ID NO: 1560853 - DNA, 4001 bp, Homo sapiens
cggatcaacatggcgagactccgtcactactaaaaatacaaaaattagctgggcatggtggcacacacctgtaaccccagctactcaggaggctgaggcaggagaactgcttgaacccaggaggtggaggttgcagtgagccaagaaccccccactgcattccagcctgggtgacagagtgagactccatcataaaataaaataaataaaataaaattaaattaaaataaaataaaataaaataaaatagcctgggaggcagggggaagagcaggatgggcttgtgccatgttggggaaatgtcagtggctgaactgcaaacctagaaatgctaagttaggctcagagctggttcagagatgggttatcaaataatagctaactttcagtaaacatttactatgtgctagctactagtctaggtgacttatatattaataatttaacgcagttagtcttcacaactcttgtgaggtaggtccttttagcccctgtcttagtacattggtgctgctataacagatctctgaggttgggtaatttatgaaaaacagaaatttggccaggtgtgctggcacatgcctgtaatcccagcactttgggaggccgaggcaggcggatcacttgaggtcaggagtttgagaccagcctggccaacatggtgaaaccccgtttctactaaaaatacaaaagttagccgggtgcggtggcgggcacctgtaatcccagctacttggggggctgaggcaggaggatctgttgaacccgggaggtggaggttgcagtgagctgagatcatgctgctgcactccagcctgggcgacagagtcagactctgtctaaaaaacaaaaaaaaagaacagacatttatttctcatagttctagaggctgggaagtccaagatcaaagcactggcatttgggacttcctagcctgcagaactgcaagaaagtaaatttctcttctttacaaatttactcagtttcaggtaccctggcctatatagaagcacaaagggactaagatggtgtccctttacagatgaggcatctgaagcacagagaggttaagttacctgcctaaggtcacacaggaaggaagtggcagaggcaggatttgcctttgttttttttttttttttttgagacggagtcttgctctatcatccaggctggagtgcagtagtgctcagctcactgcaacctcctgagttcaagcaattttctggcctcagcctcctgggtagctgggattacaggtgcctgccaccacgcctggctaatttttggtatttttagtagagatggggtttcaccatgttggccaggctggtctcgatctcctgatctcaagtgatctgcccgccttgatctcccaaagtgctgggattacaggcctggccagtagtagaatttgaatccaggaagtcttactcgacacactctcctggtctagaatctaggttcttctccagtccaccacctaacctgtgtagctttgctcttctctgcaaaaaatgccctttctggcttctcccccaaatcatttctctttcttcctagcctagctcttatgtctcctcctccaagaagccttccctacttttgctctccaggccccagattccttcccttatccttgccttgactctgtggagctgggaatatctatgtccccatgctggagcttctttgagagcttgagtctccagcctcactccatgcagggcaagacatagatgggacagcagtacgccttctgcagagccaagaggtttggtcccaggactctgccccctgactcacctgtccctgggtctgaccacagtagcaatccgagtaggatccagaggacaccctgggccattgttgcaggattccagcttccaaggggtatttctggttggcctcggcagagaacctcggcagtgctggagggagacaggcacagagaactgagcagagcctttgaccactgtcaaagtccagcggcgaatgacagacctgcctctcgtagagctgtgggcgggaggcagcagggacatggggcagcgtaccctgggtcaaggtcatctgggcatcctggtctcccccagtctcttctgtccctcctaggctgaggtcagtggtcagtaagccaggcccatccccagaggggcctggagaccaggtggttcagactccataaactctgcccattctccagtgaggtggaccgaggcaacccctcaagtcctgtccctccccatagtgacggctctgtagccgctgctggccaccagaggggactctcagctgccgcctgctgtactggtaagaccggctgtgttgagggagaggagagaagcagaggcctgaagttggcactgccttctgcttttttttgcaaccaacacttcaggctcaggcacagcatcggtgcgggggctgaggacagtgtttgctgaggcctgaagttggcactgcctcctgcttttttttgcaaccaacacttcaggctcaggcagagcatgggtgcaggggccgaggacagtgtttgctgaggcctgctctgagcccatggggaccaggggctgtcacctctcatccagttccagcccttgatttcaagccaccagcagtagctgagagcaggggttgagcttgagtgttcaggaccctggcattgttccaggagctggcttctggactcacctgggctgacagtgaaatgtccttcctcttctccgggtgcccatgactgagacctgcagaatggacccatctcccctttattctggcatcagatggggcaggttgacatgactgggctgttgtgtatgtaaattgcttccctgtggggctcccacctcaaaaccagcccggggagtttccaggagacccaccagctggagactcagccagggcaggcctgggaatgtccagcctgagccaggcctgggattcccctgggggccacccctggggcctcctcaggtgtcctctttctggggacctcccagaaaaaagctgggcacatagtggaagctcaggatgtagggtgctaagtgatagagtgaatgggggacacttcccatgggagtaagagacaatgtcctcctccaagctcgtttcccaggatttggggataggagctttgcctggtagaaccatatgaaggttgtgggctgaggcagggactaggttgaggcatcctctttgccgcaaaatttaaggcagtgttgaaaatctaagtcatcaataactttttttttttttgagacggagtctcgctctgtcacccaggctggagtgcaatggcacgatctcagctcactacaacctccacctcccagattcaagcaattctcctgcctccctgcctcagcctaccaagtagctcaggttacaggcatgcgccaccatgcctggctaatttttgtatttttagtagagacggggttttgccacgtaggccaggctggtcttgaacccctgactcaggtgatccacccaacttggcctaccaaattgctgggattacaagcgtgagccaccatgcccggccgataaataattttaagacttttttagaacagttttattattattattatttttaaagatggagtcttgatatgctggccaggttggtcttaaactcttggcctcaagcaatcctcctgcctcggcctcccgaaatgctaggattacaggcgtgagccactgcacccagctttattttttattttattattattattttttgaggcagggtctccctctgtcacccaggctggagtgtagtggtgcaatcttggcttactgcagccctgcttcccaggttcaagtgattctcctgcctcagcctcccaaggagctgagattacaggtgcccgtccaccacttccagttaatttttgtatttttagtagagacgggatttcagcatgttggccaggctggtctcaaactcccaacctcgggtgatccacctgtcttggcctctcaaagtgctggga

SEQ ID NO: 1560854 - DNA, 4001 bp, Homo sapiens
ctgcctccgaaaaggtcctgatcctgtcttcacttcctctggtccccttgactcaacctacaattattgtgtcactgtcccaaaatgccctgaatcggcaccaaatgaggaatgagccctccaggctgtctagatttcaccttgtcaccctcctccctgctagctcaaactccaggccccctttccaaaacacgacagtcgcccaaggctgtgctaagtgatcttcctggcattaagcctggccacatcccctttcaggcaagggtgtttcctaggcccagtttccaggagcagggactgaggcacagagaggtgaagctagctgcccaaggtcacacagcaagaaggtgaaaaagctgggattcaaatccagatctggggctgggtgcggtggctcatgcctgtaattccagcactttgggaggccaaggcgggcggatcacctgaggtcagaagtttgagaccagcctggccaacatggtgaaaccccgtttctactaaaaatacaaaaaattaaccagatggggtgatgcgtgcccgtaattccagctactcaggaggctgaggcaggagaatcgcttgaacccaggaggcgaaggttgcagtgagccgagatcgcgccgttgtgctccagcttgggcaacaagagcaaaactccgtctcaaaaaaaaaaaaatacggtccatctgggccagtgatcccacaggatatgaatgctatgcagagatgctgtagcctgggatagcaggtaggggctgtggctcaggaggggacctcctaactctatccttctgtacagccaaagtttgagtctcagctcagccccttacaaactggatgacctctgtgagcctcagtttccctttctgcaaaatggagacagtaaagatgtaatcagctcatgcaaaaagtgctggaataaataaccagataaaggaaggctggaagggatgggggcagtgaccctcctcccaattatacacacctgttaagcaggtgccttgtttcttccttcttccctgaatctcctggatcagcctcaatctcccttcaacagccacaaaacacctgtgtgcacctttgctggatttcccactctgacccctccagacagcaggtcaaaatgacccccccactccttgactctgaggccccagcggaagttggcgccccacgtggccccgaggcggagtctcagggaggagaaacagttggtttgggggtgggggggagtcggtgacagcaggggccctgactcaccaacaaacagccctggcacaaaacacaaaaaggtttccgctgaagacagtccctgggacagctgggagagcccgaggtccccggacccccacctgcccctgccttgggagagtagccccccaggagcgcagggcgcggcgagcagtgactgggaggttcatttgtcactgggacacttcctgcccgcaaatcggcctttgtcccctggggccaggggttgggggagcggtgtggggacaggctggacctcggaaggggcagggaggaagggtccagtccagcccgcaggccagacagaggaggcaggtgccaggagggtcaccatccccaccttgggaggaaaggacgccaggggggcctgcgcagcgccgggcttttgcccggccccccaagccccgcgcccgactgccctgactcccgaccctgggacccccaaggctcctcctcctccactttccaggaagcctgggctgcgcggggctcccgcgggtgatgacaccttccaaatctgagaggacttccagcacctgcccctctcggccccgcagtcccggagccgcccccgcctctgcccccggccgctgccgctacagcccccatcagccagcgtacccgtcactaccaccgccttcctcggctgctccatggcgggatcgggctgtgcctcggacctgcttctgttgcgactggcgcgacagctgctgccgctgcagcctctcggccgcgcgaggccacgcccctgtcaagcccccggcctcgcccccggtcagccgctcggcgtgcgcgcccccgggcccgagacgcagcgtgcgcgccctgcgccccgcccccgtcggctaggcccggtattccccagcctccgtttccccgtctgcaaaatgggaacatcttatgccgtagtgtgtagccgcttgcacgcactgagccaggtgctggggatgagccggtcctttattctgcaagggttcattgagggcctgccctatgcatgcatactgcgcagaattagggagggaagtccccgcgagcaaggcccgttttccagataaggaaactgaggcacagaatgccacttccccgaggtcactcgcctcaaggggtcacaggagcagcattcaggccaggaagttggcgggggtgggggaggacagagtaaaaaaggaaaaacacgacaaccatatttgtgtggtgccagaagtttctctgcaggcccccatggtcctaggaggctaatgggggagggcgattgtacctgctgttccctctgccggaacacaccccgcaggtacctgcgaagctggcctccttcaggcctcagctccagtgttccaatgtcgcctcctcccaggggccctcctcctgtcctggctgtcacctcctccgaggggtgaactgtcactttctccttgtggccttctctggctatcacctccctgctatcctattacctcctctgagggttccttctggccctccttggctgaaatgacctcactgctaccccccagtggttccatctcattccctggttccatcctcttcatagcaataaagctcagaaataatttcctttctctctcttttttttggagacagggtctcactctgttacccaggctggagtgcagtggcaaaatcatagctctgtaactttgacctccagggctcaactgatcctcacatctcagcctcctgagtagctgggactacaggtgtgtggcaccacacccagctaatttttgtatttttgtagagatgggggtttcatagtgttgcacaggctggtctcgaactcccgagctcaagcaatccgcacaccttggcctcccaaaagtgctgggattacaggtgtaaaccagcacacctggccagaaatcatttttaattttttttagcttttaagttttggggtacatgtgcaggtttgttatatagataaactcgtgtcatggggtttgttgtacagattatttagtcccccaggtattattaagcagaaattatatatgtatttatttatttgagacgtagtttcactcttgtcacccaggctggagtgcagtggtgtgatcttggctcactgcaacctctgcctcccgggttcaagcaattctcccacctcagcctcccaagtagctgggattacaggcgagtgccgccatacccagctaattttgtatttttagtagagagggaggttcaccatgttggccaggctggtctcgaactcctgacttcaggtgatccacccttttcagctcccaaagtgctgggattacaggcgtgaaccactgcctccggccccctccccaggtattattaagcagaaatcatttagtatggtcacagcctctctggttggcttcccgtttcctccgacatagagatgagaacttctagaggaggaagcgttgttctgttagagctgcgtctcaacacccagcacatccccaggcacattctgccaacattcatcagagaccagaattcctctaaaaacaggtagaaaatgaaagctgagtttctggccacatcttcagaaacaggactggaccttggacttgggtcacgaattttttttttttttttttttttagacaggatcttgttcttttgcccaggctggagagcaatggagcgatcacagctcactgcagccttaatctccaaggctaaagcaattcttccacctcagcctcccgagtagctgggactacaggcgcgtgctgccatgcccggct

SEQ ID NO: 1560855 - DNA, 4001 bp, Homo sapiens
agaggtatcttctgcctccgaaaaggtcctgatcctgtcttcacttcctctggtccccttgactcaacctacaattattgtgtcactgtcccaaaatgccctgaatcggcaccaaatgaggaatgagccctccaggctgtctagatttcaccttgtcaccctcctccctgctagctcaaactccaggccccctttccaaaacacgacagtcgcccaaggctgtgctaagtgatcttcctggcattaagcctggccacatcccctttcaggcaagggtgtttcctaggcccagtttccaggagcagggactgaggcacagagaggtgaagctagctgcccaaggtcacacagcaagaaggtgaaaaagctgggattcaaatccagatctggggctgggtgcggtggctcatgcctgtaattccagcactttgggaggccaaggcgggcggatcacctgaggtcagaagtttgagaccagcctggccaacatggtgaaaccccgtttctactaaaaatacaaaaaattaaccagatggggtgatgcgtgcccgtaattccagctactcaggaggctgaggcaggagaatcgcttgaacccaggaggcgaaggttgcagtgagccgagatcgcgccgttgtgctccagcttgggcaacaagagcaaaactccgtctcaaaaaaaaaaaaatacggtccatctgggccagtgatcccacaggatatgaatgctatgcagagatgctgtagcctgggatagcaggtaggggctgtggctcaggaggggacctcctaactctatccttctgtacagccaaagtttgagtctcagctcagccccttacaaactggatgacctctgtgagcctcagtttccctttctgcaaaatggagacagtaaagatgtaatcagctcatgcaaaaagtgctggaataaataaccagataaaggaaggctggaagggatgggggcagtgaccctcctcccaattatacacacctgttaagcaggtgccttgtttcttccttcttccctgaatctcctggatcagcctcaatctcccttcaacagccacaaaacacctgtgtgcacctttgctggatttcccactctgacccctccagacagcaggtcaaaatgacccccccactccttgactctgaggccccagcggaagttggcgccccacgtggccccgaggcggagtctcagggaggagaaacagttggtttgggggtgggggggagtcggtgacagcaggggccctgactcaccaacaaacagccctggcacaaaacacaaaaaggtttccgctgaagacagtccctgggacagctgggagagcccgaggtccccggacccccacctgcccctgccttgggagagtagccccccaggagcgcagggcgcggcgagcagtgactgggaggttcatttgtcactgggacacttcctgcccgcaaatcggcctttgtcccctggggccaggggttgggggagcggtgtggggacaggctggacctcggaaggggcagggaggaagggtccagtccagcccgcaggccagacagaggaggcaggtgccaggagggtcaccatccccaccttgggaggaaaggacgccaggggggcctgcgcagcgccgggcttttgcccggccccccaagccccgcgcccgactgccctgactcccgaccctgggacccccaaggctcctcctcctccactttccaggaagcctgggctgcgcggggctcccgcgggtgatgacaccttccaaatctgagaggacttccagcacctgcccctctcggccccgcagtcccggagccgcccccgcctctgcccccggccgctgccgctacagcccccatcagccagcgtacccgtcactaccaccgccttcctcggctgctccatggcgggatcgggctgtgcctcggacctgcttctgttgcgactggcgcgacagctgctgccgctgcagcctctcggccgcgcgaggccacgcccctgtcaagcccccggcctcgcccccggtcagccgctcggcgtgcgcgcccccgggcccgagacgcagcgtgcgcgccctgcgccccgcccccgtcggctaggcccggtattccccagcctccgtttccccgtctgcaaaatgggaacatcttatgccgtagtgtgtagccgcttgcacgcactgagccaggtgctggggatgagccggtcctttattctgcaagggttcattgagggcctgccctatgcatgcatactgcgcagaattagggagggaagtccccgcgagcaaggcccgttttccagataaggaaactgaggcacagaatgccacttccccgaggtcactcgcctcaaggggtcacaggagcagcattcaggccaggaagttggcgggggtgggggaggacagagtaaaaaaggaaaaacacgacaaccatatttgtgtggtgccagaagtttctctgcaggcccccatggtcctaggaggctaatgggggagggcgattgtacctgctgttccctctgccggaacacaccccgcaggtacctgcgaagctggcctccttcaggcctcagctccagtgttccaatgtcgcctcctcccaggggccctcctcctgtcctggctgtcacctcctccgaggggtgaactgtcactttctccttgtggccttctctggctatcacctccctgctatcctattacctcctctgagggttccttctggccctccttggctgaaatgacctcactgctaccccccagtggttccatctcattccctggttccatcctcttcatagcaataaagctcagaaataatttcctttctctctcttttttttggagacagggtctcactctgttacccaggctggagtgcagtggcaaaatcatagctctgtaactttgacctccagggctcaactgatcctcacatctcagcctcctgagtagctgggactacaggtgtgtggcaccacacccagctaatttttgtatttttgtagagatgggggtttcatagtgttgcacaggctggtctcgaactcccgagctcaagcaatccgcacaccttggcctcccaaaagtgctgggattacaggtgtaaaccagcacacctggccagaaatcatttttaattttttttagcttttaagttttggggtacatgtgcaggtttgttatatagataaactcgtgtcatggggtttgttgtacagattatttagtcccccaggtattattaagcagaaattatatatgtatttatttatttgagacgtagtttcactcttgtcacccaggctggagtgcagtggtgtgatcttggctcactgcaacctctgcctcccgggttcaagcaattctcccacctcagcctcccaagtagctgggattacaggcgagtgccgccatacccagctaattttgtatttttagtagagagggaggttcaccatgttggccaggctggtctcgaactcctgacttcaggtgatccacccttttcagctcccaaagtgctgggattacaggcgtgaaccactgcctccggccccctccccaggtattattaagcagaaatcatttagtatggtcacagcctctctggttggcttcccgtttcctccgacatagagatgagaacttctagaggaggaagcgttgttctgttagagctgcgtctcaacacccagcacatccccaggcacattctgccaacattcatcagagaccagaattcctctaaaaacaggtagaaaatgaaagctgagtttctggccacatcttcagaaacaggactggaccttggacttgggtcacgaattttttttttttttttttttttagacaggatcttgttcttttgcccaggctggagagcaatggagcgatcacagctcactgcagccttaatctccaaggctaaagcaattcttccacctcagcctcccgagtagctgggactacaggcgcgtgctgc

SEQ ID NO: 1560856 - DNA, 4001 bp, Homo sapiens
tgcagtaccgtatggagggtgagcaggtgtaaagccgacttatgaaaggtgtttctttttctctatcaggtcctattctcttggcgtcactttcttgtagtgcctggatctgtctctgtctctccacctgaccccagtctctcagattcggtatctgtccactagatctgtccactagaatcactagatctttcttcctcggagtatgtccctctctcgaggtttttgtctatttgtttctctgagcatctctgccatttatttctgggtttccctctgtctcgattcccctctctctgactctagtctcactgtgtctctgtctttttggggtctttgtctctcagtctccatgtctctgggtctctgtctggcttcttgatctctctgcatctcttactcgtttggttctctctgttctgtagtctctcctgtctgtctatctggtctctctctctctctctctctctctctctctctctcatttttagagataggttctgctttgtcccaggctggggtgcagtggcgcagtcatagttcaccgcagcctacaactcctgggctcaagcgatcctcctgcctcagcctcccgagtagctgggattacaggcacgcggcactgcgcttggacaatttttgtattttttttttctctagagacagggatttgctatgttgcccagacttgtctcgaactcctgggcttaagcaatcctcccctcggcctccccaagtgctgggattacaggcgtgagccacctatctggttcctctatactagtctctctgtctctgtcgcccgtttgggtctatctccgttcttggggcctccccgtggctctatctggtttctgtctctgtatctggtttctgtctgtctgtgcctctgcctctctggctccgtgtcctggtgtatctctctctcagtagtctctgctatcactcggtctctctccctgtctccgggtctctgtctttctggtttccctctacctgtctacctgtctggccacctgtttgggtccccgtcggtccaagccccccgcgctgtcgccctcgggcccctcaccgcgtcgcggctgctctcagtgctgctgccttctcccacttcttcttcctctgcctgctgctcagctcccccgcggctcgaaggttccgccaggacttcggatgcctcctgttcccgggactcctcgggatggccctggggctggacctccacgtcgcattccgggaccagcggcggcggggtcccctcctcggggctgcttcgcgtccccatggccgctgggactcctgcggggtgggcgggaccagaagctccgggggcggggcctaggacggctgagcgccgctcgcgtctgctccggggcgcggagacccccccccaaggaggcggggcctaagagttcaaaggatggaactgagcgttacggaggcgtgtcctgaagtttccagaggcggggcttgatggctccaaggcgacacgccaccggagacgggaccggaatttgagtccgggtcgtagcacgccccctactgacctcttcgaccccgcctcccctccctcatctctaggtgtcaggccttgtaccctcccagcagccccctacaatctcttggattcgcttagagcgacccatcttctccctccgagactcagcagttcggctcccgccccatccttcccggagccccgtagtcttagtcccgaccccactgtgcagggcaaccgtgcccacgccgcctcacccagggatccaggagtcggggctctccttctctgaacaagccaggagtcggagtccttgagattccgaagtccaactgccacctccccacagcctcggccccctcacgagctcaggcttcggcgcgctccgctctgcgcgctgggcacggccgcttctgcctatgagacaggtggcaggggaagagggaggagagaggccgcccggtccccctccccagcagcccggaagtggaggggggacaacaggtccaacagctcccgagggaggagggagccacgggcttgccccacccgtggcctcggcatccggccatcccggccccaccggccccggcccggccccaccctcgtggaactcagcatcgcgacctcccagtctccctcgagcccctcattcctgcccccctggaggagtcttggccacctctgtatgggagcctctctaatgtccagaccttgggagttcagaaaggaaggcaggaatggagatggggacgtctcccctctaatgagcccttcagaagggccctgaccggtttggggagctggacaaggggaaggggtgccctgaactgagtcagacacctgcccagagactgagggaagtgtaccgccacccccccacaactttgctatggggtggagggcagaggttaaaggtctcagccagaccctttcctctctgggcgaaaacaggaaaatgaaaacaggaaaataactggtatatgaaaagggatgattagaagtcaagagctgtgtgaaacactttatacccagtcatttaatttcaccctcaaagctgtccagcgagaaagtgattactacctccatttctttttttttagtagagactgggtttctccaggttgcccaggctgatcttgaactcctgggctcaaacaacctgcctgcctcagcctcccaaagtgttgagattacaggcgtgagccaccgctcctggcctactatctccattttacacttggggatacaagctgaggaggacaaatgcacccaaggttggctgggcacagaggctcaggcctgtaatcccagcactttgggaagccgaggcaggtggattgcttgagatcaggagttcaaggccagcctgggcaacatggagaaaccccatctctactaaaaatacaaaaattatgccaggcgtggtggcacacacctgtcatctcagctactccagaggctgaggcaggaggatatctcgagcccaggaggtcgaggctgcagtgagtcttgaatgtgccactgcactccagcctgggcgacagagtaagaccccatctcagaaaaaaaaaaaaaaatgtagccaacatctacacatgttgtaagtggtaaaatgcaggcttcattctctcaaaagtccatgttcttaaccattgcgtatactgtcactacaagccaggaagtacccaaaagatcattctaaatgatagtaactttaatggtgaacactgataggccatgtgccaggcactcacacacattgactcatcagagcatcacaacaccccattattattccttccattttagagataagaaaactgaggcctagagaagtgaagtaacttaccccagggctaagtgggaagtggctcaaaagcaagccggtgttctaatccaaggtgatgagaagacctgccccagatagctgtgtttgtttttgatcttgtgagttagaaatcttgtgggctcccgggctgggcgcggtggctcacacctgtaatcccagcactttgggaggccgaggctggtggatcacgaggtcaggagatcaagatcatattggctaacatggtcaaaccctgtctctactaaaaatatgaaaaaattagccgggcatggtggcacgcgcctgtagtcccagctacttgggaagctgatgcaggagaatcgcttgaacccgggaggcagaggttgcagtgagccgagatcgtgccactgcactccagcctgggcaatggagggagactccatctcaaaaaaaaaaagaaaagaaaaagaaaacaaatcttgcaggctccctggcctctccataggaccagaaccccacccctttcggcccagaaacccaattggttcccccagaaaataggtagaagtcagactcacgttaaaaaaagttttatttagggagctccagggaatgcggtgggaaaggagaggtgcagtgtcattgccgccctctcctcccacctagtgcattaatagtggatgggagcat

SEQ ID NO: 1560857 - DNA, 4001 bp, Homo sapiens
tatgacaggctggggaaggcccctgtaaagaaggggatgtttcaatgacatttaaggtacttggagaggtagcaacagactcaaggagaaagaaggttccccagggtccaggcccccttgaatggaggctcacggtttagagaacctgaaagaagggtcaacttgatttaattggggtgggggggggcccagccaccagagggttaaggaaagttcatcagatcatatttcaaggcctggatggtacaaaagagtgcagaccctgccctcagccagggtgggggttggggtccagggtcacagctccaagccccgaaacgggaggttacatttcaggactccaggacacttcaagcccagagcctgccactttgggtttacagagttcaggcctccacatctccagggcgagtctccacttttcaaaactctagagaggagcagaagtgtgcgcaggggtgtagggttgggaggcgaagagaggtatatgctataatcacagagccctgagtgctgtgttttcagatcccagggggtaatgtgagaggaccgagaagaagatacgtacaggtcaggaccgtggggagggaagatgtgaaaggggatgggggagggagaggtcccctaacctccccggaagccgtggccttgcgggcacttctaagggttttagaccctcagctctaggtaggcacctacaagaaggtacatcccctggaatggggatactctgagctcaatcccaggatgattaaaagtggttccaagctaggagatggtatctatgggacatgggacctggacaggacccaaagtataatagagcagcagcaacagttgttctaaagaggccagccttggacccagtggggaccctccagagatcaacaaaagagaataggcagaaagagaggggaccttagaaaccaaagttggggtgcataaaagttctgggggctgtgtagggggagggtgggtgtctgacctaagaagtagactcgctcaagagcagaaaataggagaagcagccaaggtttgaggacagtatctgatgctgcacaggtgaggtttagagccccctgaagcagaatcagtagcctcagattctgtcccgagaggaacgaggtaggaccaaagcacagtccaggatttaagattaaaaaaaggagaataaagaaggtctgtgaccaagaagagtggtccgaactccatcctatggggagggaaagggagggcccagccttcccccaagcgcccactccggcgtgtgagagacggtgtcgggaagggggcggggttctgggaccaatgcaggagctgaagaggggctcaagaccgagcctgaactccagaccccaagaggacgtgccgtgtcttgggggtggtctcagggccctgactcctccacctggacggtggcaggacactatccaggactcgggggacccttccgagcaggagactcgcaaaccccagcctggcctgttgggcggggacgagacccagatagcagtcctgggagccctgtgggcggggaggcgcagacactccccccaacacaccagccaaaaagcaaggaccccggctcggaaccaagagggcaacgagtagctcaacacgtcccgcatcccggcgggacggtgcctcaaccgggaggcgcggccctggcctggcgctcagggaccgggaccctaagggctcgggctgggtggggggaccctgcctgaagccgggggagcgacccccggcgcgaagacctgggtgaggcaggagggccccgcccccggcctccccgccccccgccctcaccctgagaccgggggtcggggtctgggggccgggacggcgagccgcgggccggccgcgctgtggggccccggacagaaggcgcagacctcgacctgcggcccggcccccgccctctcgcccacttgccccggccggcgccgccaccgctcactcactttggcctccaccagctccgccgccatcttggtcaccagcgtcccccgcgccgggagcccccagccgtcgcgtcacgtgaccgctcaccactcgcgggcggggccgccgcccgggccaattagcacccgcgcgcgctcctcccgccgccggtgcgcgctgctgcctcctgcgcaggcgcgcgcggccaccgcccgggcctccggccaatcaggtccgtcctacaccagcgcccccccccccgctcgcggcgaccacgcctaccccggcggcgcctgactccttaaagtggtactagccctgcgcaggtggggacgggtgctcggtttcctctagggagggaaggcgagagggggcggtggcagcgacaacaatgcagctaggtgccgtggcttcctgcgcgcggcggccgccaggtgcgtctccagactcccggcggcgtcgggcaggggatggttgctccgccgcaacggccgccagtgcgtacagtgaggcgccttgcagcgcagcgcggtgcaggctccacgggcccagacaccccgcgcgctgcacatccgggtcctggtgtgcagatggggcgtgggctcggcaaccagctggctgggggcgcccggcggagaaaagcgggacccctgctcccaaattccttggagatcgtacagccctcacctctttgcaggcgccccccccatcctgcctccccacccatgggaaaccttggatctgcaccagttgggacctcttctccaaagcgctccttggctttggagctaagtggcttcgtgcccgtagaagtggatttcaaacttcaataatcaagtattttagtgcaatttattttttatttttatttttgtagagacgaggatctcattatgttatccagggtggtctcgaatgtctgggcttaaatgatccttctgtctgggcctcccacagtgctgggattacaggcgcgagtcaccacacctggctagtccaacactttaaacataaaaaaatcagtgcaaaagagtccatgatggatgaaataccaaattgttatttatttatttattttcgagacggagttttactcttgttgcccaggctggagtgcaatggcgcgatctcagctcactgcaacctccatctcccgggttcaagggattctcctgcctcagcctcccaagtaggtgggattacaggcgactgccaccacgcccagctaattttttttttggccaggcttttctgcaacccctgacctcaagtgatctgcccgcttcaacctcccaaagtactaggattacaggcatgagccatcatgcccagccttttttttttttttttttgagagccttgctgtgttgcccaggctggagtgcaatggagcgatctccactcactgcaacctctgcctcctgggttcaagcgattcccctgcctcagcctcccgagtagctgggattacaggtatgcaccaccatacccagctaatttttttttttttagacggagtcttgctttgtcaccaggctggagtgcagtggcgccaggctggagtgcagtggcgcaatttcggctcagtgcatcctctgcctcccgggttcaagtgattctcctgcctcagcctcccgagtagctgggactacaggtgggcaccaccacgctcagctgatttttgtatttttagtagagatggagtttcactgtgttggtcaggttggtctatgaactcctgacctcaggtgatccaccggcctcggcctcgcaaagtgctgggatcatgggtgttagccaccgcacccggcctgaaataccaaaattttaagtaaagagccagacgtaggagtgtgcgcctgtggtcccagctacttaggaggctgaggcaggaggatcgcttgagcccaggagttggaggctgcagtgagctttgatcatgccactacactccagcctgggcgacaaaattataggaggcggttgttttagactaaactcttgtgctaggcaccaagacacaggaataaacaaaatgcagctagtcacactcagat

SEQ ID NO: 1560858 - DNA, 4001 bp, Homo sapiens
atctcggctcactgcaacctccacctcccaggttcaagcaattctcatgcctcagcctcccaagtagctgggattataggcgcccaccaccacgcccggctaattttcgtatttttagtagagatggagtttcaccatgttggccaggctgatctcaaactcctgccctcaggtgatcctcccgccttggcctcccaaagtgctgggctcccggccccctctcttctttgttttctccttgtttgttttttgagacagggtctcactgtgtcacccaggttggagtgcagtggtacgatcttggctcaccgcagtctcttccacctggctcaagtgagcctcccacctcagcctcgtgagtagctatgactacaggcacgcacccaccaagtccagctaattttgtttatttttagtagagatgaggtctcactatgttgcacaggctggtcttgaatgcctggcctcaagcaatccttccacctcggcctcccaaagtgatggaattacagatgtgagccactgtgcccagcctctcttcctatctttgttgttgttgtttgtttcgttttgtttttgagacagagtctcgctctgtcacccaggctgcagtacagtggtgcgatctccacccactgcaacttctgcctcttgggttccagcaattctcctgtctcagcctccccagtagctgggactacaggcacgtgccaccgcacctggcctcttcctatctctgattctctggccccctacctactcctactctgtcctccaactcctttctgtcctaggatgatctctgtgggtgtctgctcaccccacccccaccctaggcctttattttcgtgtctctttccttcctcctctctctgtcctctccctgggtctcctgtccctctctctccggtgtcctttctcaccaggctgaggctggatttgtgtcgattctggtctggttgtctgggcttgctggagctccttcgaggcctgtataaaggaaaactacctccaggctcggagtctgtgccatcagacccctcatttgttcctcaaatggagcaattcttatgcatgagagctgtggataacgcgagaaattagacggtttaggtcccctttctcctttgagaactagaagaacaaccccaaccccattcccatttctttttttttttttttttttttggagacggagtctcactctgtcgcccaggctggagtgcagtgccgaggtctcggctcattgcaagcttcgcctcccgggttcacgccattctcctgcctcagcctctccagtagctaggactacaggtgcccgccaccacgcccggctaattttttgtatttttagtagagacggggtttcaccgtgttagccaggatggtctcgatctcctgacctcgtgatccgcccgcctcggcctcccaaagtggtgggattacaggtgtgagccaccgcgcccggccccccactcccatttcttagcaaacttgaagcccattaacctcaattccccgaggcctggttcccgccttagtgcattctgggaactgcagtcccatctttgagcaccccgccaaaatccccgaatactcaaggatccaggggtccggtcactgcacctgcagcagcagctcctcaaatcgcgccgaatcagcaccgatcgcctccgcctcgcttagccccattcccagcagcttcgggttcgccatggccctgggaaagagatctaggcgtcctcgagaccctcaacgtgggaaactttgcccaggatccgaaccccagtgcctgctctggccctcaatcgactccggatacctactatcctgttcaaaaacctaagactggcctaagactacatttccattcaagaccgaacaccatcgtcaaatccgtggggaatatgtgtctctagacgcactaccctccgtcctacgtgccgaactgtaaacgaagccacacttccggtctatcggtaaacacaggactggagtatgccacacttccgagtaccccagtgttcattcacaagctggtatcgcgttatcgacaagccacgcccctcgcatcaatcaaaaataaaccccaaggcggatccctgagtgccacacttcctgtatctatgaaagccacacttccggctgggcgctgtggctcctaccggtagtcccagcactttggaaggccagggcaagaggatcgcttgaggccaggagttcgaaaccagcttgggcaatacaatgagataacgtcccacaccccatctcttaaaaaaaaaaaaaaagcgccagacttccactctttccacaaccaaaactggcccccttactttgcagtgaaggttgcattttccaaaccttaatctcaatgtccatcctaaaaggtaccctttttatctttgaattatcacttcctgccagctctagatcctaatacgtccagatctagacccgccaggtctagatctagatctagacctctagtcaatataattagaaaagctgcactttgaggctgggaggccgaggtaggaggatcgcttgagcccaggagttcgagaccagcctgagcaacatagcaagatcctgtctctaccaaaaaaaaaaaaaaaaaaaaaattagccaggcttgatggcacctgcctgtagtcccagctactgtgcaggctgacgcaggagtaatgtttaaacctgaaaagtcgaggcgacagtaagccgtgatcggaccactgcactccagccctgggcgacagagggagaccctgtctcaagaaaataaaaggtaaaacaaaacctgcacttcctgctactataaaacaaggcactgggaagacgcatcaataggacgaccctttttttttattactattttttttttagacacagtctccctttgccacccaggctggagtgcagtggcgcgatctcggctcactgaaacgtacaccttctgggttcaagtgattctcccgcctcagcctcttgagtagctgagattacaggcgcgcaccaccacagctcggctaatgcttgtatttttagtagagacggggtttcaccaaattggtcaggctggtctcgaactcccgaccttaggtgatccgcccgcctcggcctcccgaagtgctgggattacagccaagagccatcgtgcccggccacgccgatcctcataaatccggagccctcctaactattcgcaaagtacccacatcgccgtctccccttcctccccgttttaagcagtgcgcatgctcctaaatacgcttccccgtgggggacgtaggcggggccatcgggtcctaaggaaaaagtgtgggcgtggctgctctctgtatcttgtagccccaccccattcccattagccccgcccctttgggctggaaccggaggtgtcgctcttcggacctcaaggttccccttaacacagagcgccccgcagtcttcgcggaaagcgttcggggtaggcgatggctgcgacgcgtgcagggccccgcgcccgcgagatcttcacctcgctggagtacggaccggtgccggagagccacgcatgcgcactggtgagagtctgcccggccggcgctgctcgctgcgttccccaggcctgggcgcccggtttttcgcggggagtcccgtcatccactgcggtagctcagccgctccgcctctcttagtccccgtgattcccgccgcccaataggatcgcgccctgtaggacgctcccttgagccttggcggtggcagccttttagtctgttccggtcttccccactggttctcttgccccttgatcctgaactcctcgtagtgtttccgcggttttcctgaactcctctagacgctctcgtgattcctcagggtcccctcagaacctgacgccacccaccagaccccttaggattcctgtgaggctccagtgacccacaacccccattgtctttccacgactcttcaaaacatcctatggcttccatgggcctccagagcaccccagacct

SEQ ID NO: 1560859 - DNA, 4001 bp, Homo sapiens
gtcacccaggctggagtgcagtggtgtgatctcagctcactgcaacctgtctcccaggttcaagcaattctcctgcctcagcctcccgagtagcaggccaccacacccagctaatttttgtatttttagtagagacgaggtttcaccatgttggccaggctggtcttgaactcctgacctcaagtgatctgctcgccttggcctcccaaagtgctgggattacaggcatgagccaccttgcccagcctttttttttttttttccaatagaggtggggtcttgctatgttgcccaggttggtcgcaaactcctgggctgaagcagtcctcctgcctctgccttccaaagtgttgggattacaggtgtgagccaccgcgcccggccagtaaacaggcttttcatcacccctgttacagatggggaaactgaggctcagagcagggaggtatctagggccgtgcagtaggccaggaggaagccaggacttacacctagatctgccgacttggcccagttggacatgagggggcagcagccaggtggccagatacctagggcagggaggacgcaatggaggccactccgggtgctttgggagctccatagaggggtcaggccagctgaactaagaggtagggaacaaagtccaggaagaggcctctacacaagcaaaggcctcgaggtgagtccaagcaaatggacctccagtctctgcagaggaggagtgagtgggctggcaggtagctccagcctggggcccagagtaggcacaaaatgcagatggggaggtgcttagaaggaaccttagccccaggcagggacagggagccaggagaaggtgggggtactgcagctgaggaggaggggaggctgccggcagcagggcattgattattccccaggagtcccagcctggggaggcggagataggcacacattcccagcctagccctgcgggttcagacgccctgtgatggacagggctagggtcgggggatggacgtgctgttctagagaatggatcatcacagcggataggaaggcgcgacaggcagacggaacggcacatgcaaagccttggcagtgggttaagttgcttgtcaaggattcagggtggctataaggataggtgctatccaccaagaggcccgagtgtcaggtggaggctctgagcatccttcagtcacggggaaccccaagaggtgtccgagcagggcggaggggcgccacattctcgggtgcccaatttacccattcctaggcctctgttaccctcattctacaggtggggaaactgaggccccgagaggggatgcccagaaaaccgcctggatctgcctgccagcccgcccccacgccccggtgtgcgcgccccgggagcagcgctccccgaatccgggaggcgggaggggcggggcaggcagggctgggggctccgcgggtgaaggcagggcctgagcgctcacacagacgcgcacttgggtctgcgtggacccggccacccggctaggggaccggaagtgggttcgacccccggccctcccgcaccccattctgccccgcacaatgcctgggcgcccctcggtactattcgaagccccattccaggcagggcctcccttcatttggggcctcggctccagtccggtatcttggacgcggggagtctctccccattctgccccgaccgtcccaaggaggctgcaccgctgcggagccgagcccgaggcccccccttgcctgcggcccccccagttcccgcggggcccgacgcagcctggcgcttgcgttctggcttccaccggggcccggcactgcccccgggcgccccgcatttaagcacactcccagccgcccccgccacgagggccagtcaggactcacctggtcgcggccgccaccgccgccgcagccgccgtcacaccaagccaagcccgccccgtggctccaccgcggccaccgtcgccgcagccgcgggatccccgcctccgccgccgccacggttccgagcggcctggcccgcccccggcggaaatgcccgagcgcattcgagccgggcggatgaaccgaggccgaggcggagcctgaggtaagggggcacccgagtgtttccggaagtagccgaacgtaatcccgcgggactggtggactagagggtgcccccgagacagccgagcgtttccagaggtagccgagtgcaatcgggtcggcgagggatccgagactgggctcggctgggcttagagacgcccgagcgctttcggaaatggccgaacactctctacggccgcactggcacaactgaggctgatccccaagaccgcggagcgtttctggaaataaccgaatgtgctcagtgcccaatggaggccttgggagtttagacccagaggcgaccgccagcttatgggaattactgaagcatagatggttccaggggacaaatgaggcgttctcaagctcagcaaacagggggcagtagagtggggaaagggcctgccgcaaaaagcagaagtcggagaaagccagggttgaaggagtttccatggcaacccagagcgtccggaaacagccaacgatctcgacccctacgggcactagaatttagcggacttgagcctagatgccgacggtttccggaaatagccgaacgcactcggagatggggctgtagccaagagtgtttgcatgccggctgagcgccccggaagtaacggattgctctagggctgggccgggttcggctagagggagttttatggcagagcgcaagctaagaccaggatagaaaggacgcgacgattgcttattttgttattattttttgagacggagtttcgctcttgttgcccaggctggagtgcaatggcgctatctcggctcgccgcaacctccacctcccgagttcaagcgattctcctgcctcagcctcccgagcagctgggattacaggcatgcgccaccacgcccggctaattttgtatttttagtagagacggggtttctccatgttggtcagggtggtttggaactcccgacctcaggagatccgcccgccttggccttccaaagtgctgggattacaggcgtgagccaccgcgccccgccgcttatttattttattaacatagcccagggcgcccaggaggtcgaggctgcaatgtgccgtgattgcgccactgtactccaacctgggttacagagcgagaccttgtctcaaaaacataaaaataaaaaacatagctcagggcccagatgtctggaggaagcttttaaaggcagggctatgatggagtactcgcagggagagggtagcaggaggctggtaccagcgatggcatcaggaagaatctcaacagcgaactgctatgcagtcctcaaaacccacttgcaatgactttgagccatgggtctatttcactccgctcccctccccactcttcccttcctcctttctcagcccctcacaaatccagacgttggagctcatctttgtaaatacgggcttttattcactgccagctccaggatggaaggagggggtgaatcatgcacagccttggtctaccctccaacactaggcagtgctggacaggggactcagaaagggaagcagagtgggctgttgatgtctggaaagctccctcaccagagtgcccagtgggtcacacagcatcatgggggatgagctggggctggagtcggctgtatctgacaccagaccctccattcaagctcccttgatgacaacgcccacaacagggtctggctgatgctccgttctgccacgactcctgctgggtgatcgtgggacaggtctccgcccctcgctggggtctcagctgctttgtctgtaaaatggaggtgatgacaccacctccagccttctcaaggctggctgagggagaagccacgtaaaagcgcttggcacacagtaggtgcttaataaacagtcaatgggattagtcttgtaaacacaaggaaactgaggcacagagtgg

SEQ ID NO: 1560860 - DNA, 4001 bp, Homo sapiens
cactccagcctgggtgacagagtgagattctgtctcaaaacaaacaaacaaacaataaaaaataaaaaataaaaaattagccatgggtgggtggtacacgcctgtggtctcagctacttgaaaggctgaggtgggaggattgcttaagcctgggaggcagaggctgcactgcagcctgagccacacagtgagaccatctccaaaaataataataagaaagcactaaataagctcacacatctacaaaatgcctaggacagaaactggcacacattaagagtgggatagcctttattatctctattgtatagatggcaaaacggagacctcaccttttgcatctctgggaatggcagcagtgggtaacgcttcctgagtgtttactctgttccaggcacacacaggggaaggcaggaactgtactcaggtacttcacacccgaaagctctgctcttagctactacaccgtgcatggtgttgcagagctaggaaccagcattactggtggcccgatgttacccagggagtgaggggtatgaaggagtgaagactgtgaacaagaaactggaagtaaagaccctactgggtgccactccaaaggctgacagttcgcctgggtgacatggagtgtcacccataaaggaagccatcagggttgaactgagcagaaacagcagaaatgggcccagagctgggcagagcatccggtttatgctggaggtcccagccacaggccagggctagagcagggtgggcgagagcgcgggttccaggtgcaaatgcagctgagctactgactcactctaaaaccttggcaatgggctctaatctccctgcacctcagttttctcatctgaaaaatggggaatagagaataaggagatcaaacctcatggggttaatgaggagagtccatgtatccaaacagttcaccagaacctggcactcaaccaaggagaattattattgcaaatgcgattgctatgggctctagaggcagcagagtgactcgggacctgcccacagatgctgggcctgctcctcaggagtttgcagtgacacggggagggggatttgtaggcaaactgcctaggtcctaatccaacccccggcccctgaaatgaatgatcttggacgagttccttcagttttctgacctcagtttccttgctggtaaggtggaagtaataactacctggctcccagagttgcggcaattcagagagaacttaaagcgcttgacacagagaaaaacatgccctgttactggcaatattatcattgtggctaacccttaaatcgggcctaagcacaggggccatcgtctggcagaatgtcacgggcgatgtcgcagactcagcattaggtgtacacagtaggggtgttagcaggggtaggttgtggacccgaggccgggcaacaccctacgccctttgcagggtactggggtgtctccctcccaggggtgcccccgggcccagcaaggtgcagagacgtcccccggggtgtcaggtgcattaggccgagaggtatcagccgggccggcagggccagggccatcgccccggactccccggaccctcacccgcccagccccctgcctcagcttcctcaggcttcccggcggctcctgaggctcgcagtccccacaacagggcgggccggggccgttaccccggggacgacgcggaagagccaggaccccatgggagggaggcagcgctgccgccgcgcccaaggggcgagctcgagccctgcttacgcgggcccgcgcagtcccgccccagccccgacccccgcggcacctgagctgcggctcatgcgcttctcccagccgggcggcagcttctcctcgtccgccatcttccctcctgccgcagcgcctgctccgcctcagctgcgccgcctgtcgcccgcgcccgcccgccgccgctgcctattggctagacgcgctctgcaacggggcctggcggcgacgcccattgggctccctaacggtccggattggctttctggccttctattgggtagaagaaaggctgggcggaccctcccacgttatccctgcgccccgcccccggccagcctcagcctggccccgcccactcgctctcctcggctcctgagtggtccgaagcgacgcgggcccgcccttctcaacgccctttagcgagcgccaaaaaactcccgaccccttcttggcgcgcgtcgccgcagagcccacccaggcgggatagagcttatggattggctaatgccgcagcaactcccgcctgcctgagctgttcccggaggtccgcaagcccccagccctcccatgcggaagagtctggctggtgcagaggtaacggcggtccaggaggtacttgggcggggcggtgctgcctctgctgttgccatagcaatgcagttgccttggagatgagcacctaagtacccgatgcttaaatttggctcctccatcctccctcttcccacctgtttcccacagatgtccaaagctaacccagcctcttttattttttgcagggctcaacttttccctaggctctggacccaaaggccttccacgtcctttggaacctgcttacttcctttattccctcgcagtctggctccttcctccatcctgggtgaccagtgggtgccgacattgacattcatataagaacacggaggaggtgcaggtgggaggagatgggctcagttttagccaacttaaaatagagtctgcagagcccgtgggacacaggggaggtatttggggacccagagttggggaactgtgggtagatatgggagttgaagacactgacagcaaagggtgcaactacagttcacctagcatagaaccctatgtgaccgttaaaaagaatgaggctcagtgaagtgaactcatagggaaacctgcccacaacaaattagacgcaggatgcagtagaaggctaagagaagtctggagccagacttgggtttaaagcctgggactgacacttgctatgcgaccttgaactgattacttaacgttactctgtacttcggtttcccaatctgcaaagcggggataagcaattacatccttctgtttgatgtgaacattaaataaattaatccacataaagcactcaagccaggctcggtggctcacacctgtaatcccagcactttggaaggccgaggtgggtggataacctgaagtcaggagttcgagaccagcctggccaacatggtgaaaccctgtctttactaaaaatacaaaaattagccaggcgtgatagtgggcacctttaattccagctactcgggtggttgagacaggagaattacttgaacctggaaggcggaggttgcagtgagccgagatcgcaccactgcactccagcgtaggtgacagagcgagactccatctcaaaaaacaaaaaaagtttaagttttaatagaacattttttacaagtattagcataatattaaaaagatactttttataaagataattttagacatgggcagttacaaaaacagtagggttttcatgtacccttcacccaaacttccctaatattagcgtcttaaataaacaatagaacagaattctcaaccagtagcgattttgtttcccaagggacatttggcaacatcttgatacatttttggttgttacaacaccttcagacattttggaacaggagatactactggctactggcatttagtattagatgccaaggatgctgctaacatccttcaaggcacagcccccaccaaaagaattatccaatccaagggctgagtgtggtggctcacacctgtaatccagggctttgggagcccaaggcaggaggatcgcttgagcccagagttggggaccagcctgggcaacatggcaagaccctatctctacaaaaataattcactgggtgtggtggcacgtgcctgtaatcccagctacttgggaggctgaggtgggaggatctcttgagtctaggagttaagaggctgc

SEQ ID NO: 1560861 - DNA, 4001 bp, Homo sapiens
gagaaccatgatgatcccccctcagcatggtagtctcttccaccctgaaggtacaccccacctccccaccaggtcccaggccacatcctcttacttgaagtagccttcccgaccaggagcacacatgtgtccttgtcactgctgcaggtcttcatttggccatggcacctgctccccgccgccgtacatatttcgcagtgtagtgggcaccctgcagtgtagacagagggcgaggctgtagtcatgggtggtgtggtcttcggaccacgactttgacttaggacttttgtgtcctgagagaggagggaccagcagctccctggtttttcatgggcgggatgttgaccactgcccaaggaactgtccagagttggacgaagaagcagtggtgatgccagcaaagctgcttccaggggcgggaagcgactccaccatgaagcctgtttgcctaattacatggctggggattttggatgccagggtccgctgagaaagctcaggggcagggaggggtcgtgatggaggtttccatggacttttgtgaaacttcaggtccagctggttcttgaatgtgggattctcctccttgaaggtgccatgtaggtcttgtagacagcaggagctcaggcagggggccctgaggctagggtctgcatcccaggtcaaggagggagagtgaggaccaggagggcagaggacttgaacttcttggttctgagagaggggacagctaggggcccagaaacctgggtcctggggaaagtgaggcttacttggactcctgtgtgcaggggaggagggggctggggcctgaacttcttagtctaaggagaaaggaaatctctctacctcttttaaaaaaatatatcatatgatattaatgtattttttttgagatggagttttgctctgtcacccaggctggggagtgcagtggcacgatcttggctcactgcaacctttgcctcccagtttcaagcaatcctctcacctcagcctcccaagtagctaggattacaggcgcccaccaccaagctcagctaactttttttgtatttttagtaaagacggggtttcaccatgttggccaggctggtcttgaactcctgacctcaagtgatccacctgcctcggcctcttaaagtgctggggttacaggcatgagccaccgcacctggccttctccctctttttttttttttaattatatttttaaagatttccctttccagccatgctctcatctgatttcctagaattgagatgtgtttgggatccttcctggaggatggaggattcagagcccaccaagcccctctctcagggatccaatcacaggagcttttcttctctgggacccccaggctttctcttcctttacccttggcctcttccatgaatctgaatttccagaatgcctccccgttcaccttgaggacttgctgaaggctctttctctctctatatctctctctctctcaatctgggacctctctcttcctgaggtcccagagacagttcaggtcccttgtcacttaccaagacccaggagggtgcagagcaacacaaaggccagcagaaaggtctctggtctcctggagagcctcatggtgtgtgtatcagcagtacctggtccccagcttttataggaagctgaggaggggtgggtctggacccacattcaccctacggggagaaatagctgaggtcagaacccagggcagtcctctgtggcctccgggttgggaaggcagaaccagaatccaaaagtgacctgggcatcttgtgcccagccccccacctccatggagaccccaggagtctgggcttccatccccctcttctattagaacccagaaagtcaccaccctgttttctcaccttcccacggcccattgttgtttgtttgtttgcttgaagaccaagacggagttgggcctcttgattcccagtggctgcaagaactgggattccctctccttctctctcttcccctctcctcccaaggaagcacccagtgtgggtagggccccaccttggagcacccagcatgtccaggctggtcctgcgggtgcggggtgccttgtctcccttcccctctcttcatgtgctcggctcacactccttgtgtgtttgggctgtctccagctgcgaccccacccagggctgcacccttgggtctccaaggcaccgaatgaacagagggatgtctgtcggcagtcataggcgggcgtagtaaaagacagatgcccacagtccacatattgggaaactgaggcttttgtggaagaactccaggataggggtgtgtgtgtgtgtgtgtggtgggggttgggcacatgctttgtgttatatttaggacgcagaacccttctcttttggcctcaggcataaggctgaaagagatctgctaatttttttcgcgcgtgcgcgcgcgcgtatgtatgtatatgtgcgtgtgtgtgtgtgtggcaaggggacagagagaagagtgcagccgcctgagccatttgaagagatcctgttgcgtagaatccaggttccctacgaaactacgaaaattcactcagatttgctgtcctagcccagcgcagtcgctcacgcctgtagttccagcactttgagaggccgaggcaggtggatcgcttgagctgaggagttcgagaccagtctgggcaacatggcaagacccgccgccctctcaccccatgtctccacaaaaaatacaaaaattagccgaatgtggtggcgcgtgcgtgtaatcccagctacttaggaggctgaagtgggaggatcccttggccccaggagacaggggttgcagaaagccgagatcgtgccactgcactccatcctgggtgagagagcaagaccctgtctcaacaaaaaatttttaaaaaataaaataaataataatacagcaaaaagatttgctttctcggcttcagtgtgggcggtaactccatcgtgcaatgagaaaggcgaatttcttccagacaccaatcccggaggtcgcttctgttgctaggctcccagaaagcagggttcggacgtcattgggaggcgaggctagagcggggttgtgtgtggcggagggaggcggggctggaggaaacgctcgttgctaaggaacgcagcgctcttcccgctctggagaggcgcgactgggcttgcgcagtgtcgacgccggcgccggcgcgccggggtttgaaaggcccgagcctcgcgcgcttgcgcactttagccagcgcagggcgcaccccgccccctcccactctccctgcccctcggaccccatactctacctcatccttctggccaggcgaagcccacgacgttgacatgccggagatccgcctccgccatgtcgtgtcctgcagcagccaggactcggtgagggacctgcatgggggaggttggaagacgtgagggaattaatgaggatagctcttaaaagagcttttggggttctcttggaagtctaaggagagtcatggggggatttccaggaggctaaaagtgaattgtggagagatgttgaattagggacgttccggcgtctagggaacttccggagagaaaaggaggaatagggaagctttcttggagagcccataggtgaacttccacgggaaagtgttgtaggggaaactccaggcagagtgtcgggggattaacgggagagcttaaatctgggggtcgtagaggccttgggaggactcaaaggaatcatctgagagctggaggcctagctgtcatctctgtgccctaattctcctctcccactgttgtttccagactcactgtgcagaaaatcttctcaaggcagacacttaccgaaaatggcgggcagccaaggcaggcgagaagaccatctctgtggtcctacaggtgatcctgccaccccacctcctcctcactaggagtctggagtccggggttccagattctgctcctgagccaactggcagtgggtttagtcactttctttgctgggcctc

SEQ ID NO: 1560862 - DNA, 4001 bp, Homo sapiens
tgtcatcccagcactttgggaggccaaggatcgcttgagcccaggagttcaagaccagcctgggcaatgtggtgaaaccctgttgctacaaaaaaattaaaaaattagccagtcatggtggtgcacgcttgtagtcccagctactagggaggccgaggtgggagaatcaccgagcatggtggtgcatgcctgtagtgccagctactagggaggctgacgtgagagaatcacctgagcccgggaggtcgaggctgcagtgagccttgaatgcaccactgcacttcagcctgggtggcagagtgagaccctgtctgaaaaagaaagaaagaaagaaggcagggccttccctctcttcctcaaaaggaggggatttgaaatgaggattgagaccccctatttcctgcattctatctcatcaagatacatcacaccacaaggactcaggcttgctctattaacttctttataggcacacggggagttacaggctgaggacaaatggggacttcacactacattatcttcctctgttcagatagcttttcagggggagtgagtgcactctatatgatggaggaagaggacattggtgcctgtgggtacttcagcaccaggcttggtaaagcacatactctctgtagcacagccccgcatagcaaatctgggtttgaaaatacctgaaagggagatttcagactggaatcagggacctcagccccttcttcctcataatcccagaacacatcctcacccacttctctggaaccctctcctcccatcgaacctagaagtttggacctctagttctgtttccttttccagagattcaggcaccactcaccagcctgcacgtgtccagataaggagacgcagtggttttcctttccagtacagtgggtcatgggccccatgcatttgtccctgaagctcgcagtgcaggcggggcacatcaggccattctcagtaagattggtcaagggaactgaggatgaggatgaagtgtaaggtgaatagggatgtttaagccgttcccccaacctcccaacaaccccgggaaacaccagggttgctaatagacactgcattttacaggtaaggaaacaggctcagagccagcaagtggctacagcaagggtcagtggagagccagagcacacaccacacaccacgggcttcttaccagacaaaaaggcactgttgcagccgtcgctctggcagcagaaggagctggttaccatgtggtccttggggcccatggtggtggatataacgccggagtagcagtcctgggacctgatgcagcccttgtaggtgtgcaccaactccttgccctctgtgggatggggacaggcagggacagtgctggctgaccactccctggcttcaacccctgcctcaaggtcttgcctaaccctaggcctccccaaccccacaacttcctgggatggtctctttcttttttttctttcttttcttattttttttagacggagttgcccaggctggagtgcaatggcgcgatcttggctcactgcaacctccacctcccgagtagctgcgatcacaggcgaccgccaccatgcccggctatttttttgtatttttaatagagacggggtttcaccatgttggccaggctggtctccaactcctgacctcaggtgatccgcccgcctcggcctcccaaagtgctgggattacaggcgggagccactgcgccagcccggccggggcggtctctttcaagccccctagagccatgcggccaaatctgtctggtgcatggcctggagtgctttcttaggtagccctccctcccgctgccatagcccctagtcggcctttggtggtctcttccagctccccattgccaacctcagcctgctggatgtggtcccttccaccccaccccaccccacccacggccacccctctctccctgtccttccgggattactctatttcaggccgcctatggccacccccatgccttcgtgaaatggtctcttccagcctcctcaactccccgccaacccccgcccaccccgtagtctcttccaatgaaccccggtcccagcaacaggcatcctcctctctcagatcctgccatggtcactcctcagacctcccaacgagggtctcttgctgcccctcttggctattttcaggtcttgtttaaggtgggttcttccagtctccccggccttccccctccccaccatgtggtggtctcttcctacccaattcacaggttcccccttcactccatcgaggggtcccccagctctctctcctcccttcccgagggtgcgtttcctcttctatgccgggatgggggttctcttcaagcctttcaggtccttccttaacccaccaacgctggctgggtgattttcgatctcactttcctttcacagcctctcccgaccagtgttttctccctgcacccaaagtcgcctttattccctcaccaggcctcatcatctctcctcctgtgattgaaagtctctttcagctttgtataaacatctctgtcccccactggtctcttccattgctccctttctcctccatcatttttcaggtctggggtggtctctttcatttaactcatgcccatcttctctcttccattttattttctgagacaggtttccctctgttgcccaggctggagtgcagcggtgtgcacttagctcgctgcagcctcgatctcctaagctcaagtgatcctcctgcctcagcctcccaagtggctgggactacaggcatgtgccaccatgcgcaactatttttttttttttttttctgtagagatggatctctttttgttgtccaggctggtctcaaactcctgggctcaaacgatcctcccacctcaacctcccaaagtgctgggattacaggcgtgaaccaccgtgcccggcctccctttcattttactcatccacatctccccctccctgtctctgcttctcctctttacgatgatttgctcagccaggcacggtagctcatgcctgtaatcccagcactttgggaggtcgaggcgggagaatcacttgaggtcaggagttagagaccagcctggccaacatggcgaaaccccgtctctactaaaaaatacaaaaattagccaggtgtggtggcacgcacctgtaattccagctactcgggaggctgaggcaggagaatcgcttgaacctgggaagtggaggttgcagtgagcagagatcgcgccattgcactccatcctgggtgacagagcgagactctgtctcaaaaaagaaaaaaaatgatttgctccatacttcaaggttatcatccatctcctgtttggggtgatcccttttctgtctcttccaccactccaacactccaccatcatctctcctccctcggtcaggaatgacctcttccctgattacacttacactttcccaccccagcccagcctcttccttctctatccactccccaccatttccacctcctgccagttagattcttcccctctcactatttctctgccccccacagtgtctttccttacccctcttctgcctaagaaagtctattaactctcacccctcccacattttccttctctttaggacagtgtcattttcagaattctgtgacaataatgatttctatcacaccacttatttctgttccctccatctcatgatggtctttccctctttcctgctctccactgatttcttcccacgctcccgtcttgagaaccatgatgatcccccctcagcatggtagtctcttccaccctgaaggtacaccccacctccccaccaggtcccaggccacatcctcttacttgaagtagccttcccgaccaggagcacacatgtgtccttgtcactgctgcaggtcttcatttggccatggcacctgctccccgccgccgtacatatttcgcagtgtagtgggcaccctgcagtgtagacagagggcgaggctgtagtcatgggtggtgtggt

SEQ ID NO: 1560863 - DNA, 4001 bp, Homo sapiens
aaaaagcaagcagttcacagagtcataaacgtgtggcatttctcaccagggccgtcctgcccccaggggacactgaacggtgtctgggtcacttgtggctgtcacaactggcaggtgctcctggcatggagtgggcagaagccaggggcgttgctcagcacccctaatttcctgactcaaaatacctctgccaaggcacagaagccccagtgaggcatgaaaccatctcggtgaagaacaagcaggcccctttatgtgctcacgtctctgtggcccagccaggcacaacctaaactcaccagcgctaacatcaggagggatggcgttggaggagtgaggcaactctgaattttaaacattcagaagcagtatatggccagctggggtcagatttctgtggatttcagggatgggcagagatgccagaccctgaccttccagccctccccggccccccacccccacccccccactcccccgctctcccaccccaccaccatgctcagtctggagctggcaactttatctgtccccggtgctcccagagcccctgataagatgaatggtcgcggtgtggttttcttttggtcagcgagtcctgggctactttgtctctgaccagctggggtcagagggctgacagcggaagttggggggcccaagaaaggaacccgggctggggcctggtgccctgcctgggttcctccaccatgtctcttgctggccaggccaggacaccggctgcccgcaaagaaaggggcgaggccactggctctggggaaggaaccgggtcacctaccaagcggttccagatggccgccgggagggaagccacgagtgtctttcaaggcggggggtgggggggggacttgatgacttccacactctctctctctccagacatctccccaactcccaggcagcacgcatcgcccgcccgcccgcttgcccgcctgccaaccaaggaagcttcgggaggcctggggggagaaggaggacggatgcccgtgtgggtgtctacagagacgctgctgctggctgcctgggaggagcagaggattttgtgaatccggaaacttccgatttgggagcttgtgacctcgactgagaaggaactgttcccttcctctgggctctgcacaccgtccccacagaagggaaggcccagctgccgccacctacccggctggaggtccaggaagcagctaaagggggcatgagacagccgtgccccccgcccagcccgcagccccaccagtgtgtcctgggggaaggctcggggagaggaaaagggggcgacagggcaccctgtgtgcacagccggggcggtggaggcatcttgagatgtaacccttttcctcccctcattttagcagggaggtaaactgaggcccaggaaggtgaggaaaggtcgcgcacccggactcaggtctggggacttacagaaagggaggtgacatcaggaggtgggcacgcacggcctcagagacccccgcctccacccaagcagccgccactcacacgacgggcagcccctgggagcgggtcaggcagaacggggatccccagcggcgcccacgccgagtcgcccccggcccgggagcggtgggaggtagcccctcgcaggcctcccgcttcccggcgcggcttcagccccgtcctccccgcggctccaggggactgccccgccccaggctcctggaaccggcggcgcccccgcagcgaccgtgcagcccccgccccggccccgcagccccgcgactctcggcgctcggacgagcccagcgggccgcagccccgggaggccgggccgttacctgccgccgccccgctctctgccgcccacgccgcctccgagggcacggcccccgcctcagcgctctccgcctcgtccggtacctccagctccatggccgcgcgcggacggcggcgggggcgcccgagggggacccgagctgcgaccgccgccgccgaacaacaagcgccgccggccaagggagggcgcgccgggccggcgcggggcggacggggcggggcctgcgtgcgtgcgacgccgcggacggcgcgcggccaatcggggctcgggggcggggcctgcttgcgacccgcagccaggagcgcctcgagtgccccctcgcgcccaggggtgggagtacagagccaggctcgccattccatcgtattaggtcagtaagattgacaggcacgatacgtatcaataacattgctgtgcacaacacataccaataacatggatctacacaacacatgacaataatatggatctatacagcacgtgccaataatatggatgtacacagcacatgccaataacatggatctaaacagcacatgccaataacagggacctgcacagcgcatgacaataacatggatctggccgggcgcggtgactcacgcctatattcccggcactttgggaggccgaagagggcggatcacctgaggtcaggagttcaagaccatcctgaccaacatggtgaaatcctgtctctactaaaaatacaaaaaatagctgggcgtggtggcacatgcctgtaatcgcggctactcgggaggctgaggcaggagaatcgctggaacccaggagggagaggttgcagtgagctgagatcgcaccattgccctccagcctgggccacagagtgagactctgtcccaaaaaaaaccacacatggacctacacagcacatgccaataacatggagttacccaatgcatgccaataacatggatatacacaatacatgccaataacacggatatgcacaatacatgccaataacatggatatacacaatacatgccaataacatgaatctatactatatcattgacatggatctacataaaacatacaaatagcattgctatatgcaatacatgccaatcacattgctatacacaatgaataccaataacattgatctacacaatacatgtaactaacattgatacacacactacatgtcaataacattgatatacacactacatgccaataacatggatatacacactacatgccaataacattgatatacacactacatgccaataacattaatgtacacactacatgtcaataacattgatatacacactacatgtcaataacattgatatgcacaaaatataccaataacagtgatatacacagtacatgtaaataatattgatctacacagggccgggcgcggtggctcatgcctgtaatcccaagactttgggaggccgaggcgggcggatcacgaggtcaggagattgagaccatcctggttaacatggtgaaaccccgtctctactaaaaatacaaaaaattagccaggcgtggtggcgggcgcctgtagtcccagctacttgggaggctaaggcaggagaatagggtgaacctgggaggcagagcttgcagtgagctgagatcgtgtcactgcactccagcctgggcaacagagcgagactccatatcaaaaaaaaatatatatatatatagatctacacaatacatgttattaacattgatctacgcaatacatatcaataacatttgcaattaactacctgtttattatcatattgcaaataatatttatattccatcgtttgtattacgtaagtatagatatgttattgttttctttatattattttatcaataataatacagtttgctattataagaaacatataattatagaaatacataataaattatatatatttatgcaaatgtaagtagcaatatttatatccttcttttttttttttgagatggagtcttgctgttgttgcccaggctggagtgcaggggggcgatctgagctcactgcaacctctgcctccagggttcaagtgattctcctgcctcaccctcccaagtaactaggactacaggtacgtgccaccacgcccggctaatttttgtatttttagtagagatgaggtttcgccatgttggccaggctggtcttgaacgcctg

SEQ ID NO: 1560864 - DNA, 4001 bp, Homo sapiens
ttcacagagtcataaacgtgtggcatttctcaccagggccgtcctgcccccaggggacactgaacggtgtctgggtcacttgtggctgtcacaactggcaggtgctcctggcatggagtgggcagaagccaggggcgttgctcagcacccctaatttcctgactcaaaatacctctgccaaggcacagaagccccagtgaggcatgaaaccatctcggtgaagaacaagcaggcccctttatgtgctcacgtctctgtggcccagccaggcacaacctaaactcaccagcgctaacatcaggagggatggcgttggaggagtgaggcaactctgaattttaaacattcagaagcagtatatggccagctggggtcagatttctgtggatttcagggatgggcagagatgccagaccctgaccttccagccctccccggccccccacccccacccccccactcccccgctctcccaccccaccaccatgctcagtctggagctggcaactttatctgtccccggtgctcccagagcccctgataagatgaatggtcgcggtgtggttttcttttggtcagcgagtcctgggctactttgtctctgaccagctggggtcagagggctgacagcggaagttggggggcccaagaaaggaacccgggctggggcctggtgccctgcctgggttcctccaccatgtctcttgctggccaggccaggacaccggctgcccgcaaagaaaggggcgaggccactggctctggggaaggaaccgggtcacctaccaagcggttccagatggccgccgggagggaagccacgagtgtctttcaaggcggggggtgggggggggacttgatgacttccacactctctctctctccagacatctccccaactcccaggcagcacgcatcgcccgcccgcccgcttgcccgcctgccaaccaaggaagcttcgggaggcctggggggagaaggaggacggatgcccgtgtgggtgtctacagagacgctgctgctggctgcctgggaggagcagaggattttgtgaatccggaaacttccgatttgggagcttgtgacctcgactgagaaggaactgttcccttcctctgggctctgcacaccgtccccacagaagggaaggcccagctgccgccacctacccggctggaggtccaggaagcagctaaagggggcatgagacagccgtgccccccgcccagcccgcagccccaccagtgtgtcctgggggaaggctcggggagaggaaaagggggcgacagggcaccctgtgtgcacagccggggcggtggaggcatcttgagatgtaacccttttcctcccctcattttagcagggaggtaaactgaggcccaggaaggtgaggaaaggtcgcgcacccggactcaggtctggggacttacagaaagggaggtgacatcaggaggtgggcacgcacggcctcagagacccccgcctccacccaagcagccgccactcacacgacgggcagcccctgggagcgggtcaggcagaacggggatccccagcggcgcccacgccgagtcgcccccggcccgggagcggtgggaggtagcccctcgcaggcctcccgcttcccggcgcggcttcagccccgtcctccccgcggctccaggggactgccccgccccaggctcctggaaccggcggcgcccccgcagcgaccgtgcagcccccgccccggccccgcagccccgcgactctcggcgctcggacgagcccagcgggccgcagccccgggaggccgggccgttacctgccgccgccccgctctctgccgcccacgccgcctccgagggcacggcccccgcctcagcgctctccgcctcgtccggtacctccagctccatggccgcgcgcggacggcggcgggggcgcccgagggggacccgagctgcgaccgccgccgccgaacaacaagcgccgccggccaagggagggcgcgccgggccggcgcggggcggacggggcggggcctgcgtgcgtgcgacgccgcggacggcgcgcggccaatcggggctcgggggcggggcctgcttgcgacccgcagccaggagcgcctcgagtgccccctcgcgcccaggggtgggagtacagagccaggctcgccattccatcgtattaggtcagtaagattgacaggcacgatacgtatcaataacattgctgtgcacaacacataccaataacatggatctacacaacacatgacaataatatggatctatacagcacgtgccaataatatggatgtacacagcacatgccaataacatggatctaaacagcacatgccaataacagggacctgcacagcgcatgacaataacatggatctggccgggcgcggtgactcacgcctatattcccggcactttgggaggccgaagagggcggatcacctgaggtcaggagttcaagaccatcctgaccaacatggtgaaatcctgtctctactaaaaatacaaaaaatagctgggcgtggtggcacatgcctgtaatcgcggctactcgggaggctgaggcaggagaatcgctggaacccaggagggagaggttgcagtgagctgagatcgcaccattgccctccagcctgggccacagagtgagactctgtcccaaaaaaaaccacacatggacctacacagcacatgccaataacatggagttacccaatgcatgccaataacatggatatacacaatacatgccaataacacggatatgcacaatacatgccaataacatggatatacacaatacatgccaataacatgaatctatactatatcattgacatggatctacataaaacatacaaatagcattgctatatgcaatacatgccaatcacattgctatacacaatgaataccaataacattgatctacacaatacatgtaactaacattgatacacacactacatgtcaataacattgatatacacactacatgccaataacatggatatacacactacatgccaataacattgatatacacactacatgccaataacattaatgtacacactacatgtcaataacattgatatacacactacatgtcaataacattgatatgcacaaaatataccaataacagtgatatacacagtacatgtaaataatattgatctacacagggccgggcgcggtggctcatgcctgtaatcccaagactttgggaggccgaggcgggcggatcacgaggtcaggagattgagaccatcctggttaacatggtgaaaccccgtctctactaaaaatacaaaaaattagccaggcgtggtggcgggcgcctgtagtcccagctacttgggaggctaaggcaggagaatagggtgaacctgggaggcagagcttgcagtgagctgagatcgtgtcactgcactccagcctgggcaacagagcgagactccatatcaaaaaaaaatatatatatatatagatctacacaatacatgttattaacattgatctacgcaatacatatcaataacatttgcaattaactacctgtttattatcatattgcaaataatatttatattccatcgtttgtattacgtaagtatagatatgttattgttttctttatattattttatcaataataatacagtttgctattataagaaacatataattatagaaatacataataaattatatatatttatgcaaatgtaagtagcaatatttatatccttcttttttttttttgagatggagtcttgctgttgttgcccaggctggagtgcaggggggcgatctgagctcactgcaacctctgcctccagggttcaagtgattctcctgcctcaccctcccaagtaactaggactacaggtacgtgccaccacgcccggctaatttttgtatttttagtagagatgaggtttcgccatgttggccaggctggtcttgaacgcctgacctcgtgatctt

SEQ ID NO: 1560865 - DNA, 4001 bp, Homo sapiens
ccccagcaggcagagggaggacacagccaagagcggggccagctcaactggggaagtccaggcagagaggagaggtggcctccctcagccccacctccagcagctgaggtctgtaatgcacagagggagggaggctgggctcctgggttctcctcccctgagtgactcacttctacccaaggcacaggggtcacctgagggccagcaaggcaaacccaggactcagggccctggcctggcctgtcctatggagaacccctgctcctccgctgcccaccatggagcggagacctcagacccagaggacctgcctcccataatccccatcttgccagagcagccagggacctagactcccacatccggagatttcaatgccttgggcgtttccggaatctggacaggacatccgtttgcaggacacagaacagacaggcacacgttgggacagacagagggacagggcagcaggcccaagcaaccatgagagagggatgaccaggagcggggaagagactggggaggagatgggaaggggggaccagggcgtgggtccagcctcgttgcaggaatcacagcctgtctgggtcatgtgtgggatgcgccaagcgcatgcatgcacccggggattcctacacagccctccctgggccgggggtagaggcagggaccccggcccatcccggccttgaggtctgaccttgtgtgatcggcaacaccagatacgcccagctcctcggcaaggccggcaggccatcagcaggactgggaaggcgggagggaccgggggttaccggggagacacaaaggggccgggggcaggtgcagaaggagacgagaacccagttacacaacaaccacaggacaatgaactggatggtgaggtgctaatggggacactgaggcacagacatttctcagatttgggtcacttgaaccaaagaaggttggcagtcaccctggccgtgcttgtcacagacggggaagatgagtccaggtcagtgatccccaccaggtggcacaaggggaatctggctgggcgggaggctggtgccagtcacgtgtgtgtgttagcagggtgggggtgacccagccatgcccagccaccatgcaaaaaagtaggattctatatatgggagcatccctggcctgttgactgagacactccccacccaggagaaggttccacctgacagcccaagggtgggagtgggggtccccattcccccgacctaatgcagtgactcgggtacttccgccaacaggtgccaatctgggtggcgtctggaacatcataaagctgtctagaggcgggggtggctggagctttgttatgcgggggaagggcacgggccgggcccagcagcctcctcccctcccagggcactgcgccaggcacgtgccccaggtggagcggcacctgccgggtacccaaccctggggagggggatgagtttgggggcggacgagaggcactgggacgcccagccagccacagacacccgaagtagagcctccgccgcgccccttctagttctccaggagaggccgagtttgagggtgtagcaggggttgcctccgggatcgcccccaaaccagcccagtccacatcgccacctgccgagaagggggcctcgctggctccacagtcccggcccagggagggggcgccgggcgctccggaggcccccgcccttgccatcgtcacccgagtcccgttccgggggctgggggggctcccccggcagcgcgcgggcggggtccgccggcgccgtccggtcgccccgggactccagacgcaggtgcgcctacctgcacggcgtcgctggccatgtcctcctgccgcccgccaggggtccccgcgcggagggaggggcggccagaggagcgcgcgtgcgccccgggcgtggcggggagggggcgggcgcggcgcgaccctccccggcgcgcggcccgctccggcctgctcggctcccgcctcgcctggccaggccgccgcgtccccgcgccgcgccctccggccccagcggccgccgggcctggtcacgtgaccccggaggtcggcgcccggggagggggcggggccgaggggggacgggttcccagaggcccccggggctgcggggtcccgcccgtccgccccctcggtctcccgagcccggagcatccccatcggctccccacctttcctctttccgggtcccgagacgaccgcacgctgccgaggggtcccccattggagcgcgcgggaacccgaggagaacggttccacgcgttcaagccgagagcggcggaggcctttgggcctcccgggacccctgaaaaaaacaaacagaataaccccccaccccaccctaccccggtgcatttgcaagctcgggacgcctgcatctgtggtcccctattcaagggcatggaagtttccccgttacctggagacaagctctgggcggatctgcattcaaatcctagcgctttacgccttgagggagacaaacccttccaggcacctcatctgtgaaatgggaatgatgcgctcacctcctcggtgttggtaaaattcaataagacagtgcaggccaagagctgagaacacactagacgctccataagtgttagctgctgtcacttttaatgttatcgtaattgtttgtttgttgttttgctatttttggacggagtttcgctctgttgcccatgctggagtgcagtggcgcgatctcggctcactgcaacctccgcctcccggattcaagtgattcttctgcctcagcctcctgagtagctgggattacaggtgcccaccaccatacccggctaatttttgtatttttagtagagacggggtttcatcatattggccaggctggcctcgaactcctgatctcaggtgatccgcccgcctcggtctcctaaagtgctgagattacacaggcctgagccaccgcgcccagcctctattatcgttattgttattaaaagaggtttgaatcccaacttgctgttcatcctggggacccctgtggcctctgagtctcagttttccccgctataaaatgggcatcgccttctttttcggggctgctgcatgcagatggcgctccataaatgcagactcgtgcccaagcggagagtggaggcctctgcggaatttctaggggatctccggggtctgcagagcgtgcagctttgttcgtggccgccgtcggaccctcactccttcggaaaccaggcgagggagccaaaccttggtctccggggctccggcagggagcgctccctggcggcggtgcctgcacattggcgccctttgggacccgaggaagcgccgtgggctgcgggtaccttggttacccgtggctctgcgtggtttcagtcgtcccagaaaccagggcgcgatgttttctctcttattttttcctctgagcaactctttgggagatactaacaacagaaagagagaaggaggagaattatgctgatccagaacccatccagccgggcatggtggcgcacgcctgtagtcccagctaccaggaggctgaggcgggaggatcgcttgagctcaagaggccgagaatgcatcactgtggggagaaatcatgatgcccctgcactccagcctgggtgacagagcgagaccctgtctaaaaaaagaaagaaaaaaaaaaacggctgggtgcagtggctcacccctgtaatcccagccctttaggaagccaaggtgggtggtggatggatcactggaggtcaggagttcgagaccagcctagccaatatggtgaaacccatctctgctaaaaaatataaaattagctgaacgtggtggcgcatgcctgtaatcccagctactcgggtggctgaggcaggagaatagcttgaacccaagaggcggagattgcagtgagccgagatcgtgccattgcactccagcctgagcgacagagcaagattccatctaaaaaaagaaaaaagagggggccaggtgtggtggctcacgc

SEQ ID NO: 1560866 - DNA, 4001 bp, Homo sapiens
gagcaagactccatctcaaaaagaaaaaaaatgttaaaaccaataaaaatgttttaaattaaaaaacaggctgggtgcaatggctcacgcctgtattcccagcatttgggaggccaaagcaggaggatcacttgaagccaggagttctagccaagccctggcggcataccaagaccctttctctacaaaaaaaaaaaaaaaaaaaaaaattaaattagccaggcatggtggtgtatgcctttagtcccagctacttggaaggctgaggtgggaggattgtttgagcccaggaaattgaggctatagtgagctttgatcacaccactgtactccagcctgggtgacaaggcaagatcctgtctccaaacaaaaacaaaaataaacagtctttggttatcatccatgtaactgtgggagtttctgggtattcgtgtgacagtgtgcacatccttgagtgttgcctggggtgttggcgtggctgtgtctggaggtattcgtgtgacagtatgtgcacccttgggtgttgcctgggtgttggtgtggctgtttttttaggtgtttgtgtgactgcatgcacatccttgaatgttgcctgggtgttggcgtggctgtgtctagaggtattcatgtgacagcatgcacggtcttgagtgttaccgggtgctggtgtggctgtatgcacctctctgggtgttggtggctacgggggtcatggcatgcatctccctgggggtccgtggagatgggttaacctggctctggagaccatgggtgagccagtgagcagtggaatccctggagtcccgcatccccagaggcatcccagctcaccgtgggtggccgccgggtcgggaagcaccacgtgggcgtgcagctcctgcagctgctggtgcagcaggtcgaggcggcgcgaggagccccgcagcagcagctctacggggcccaggctgcggcccaggtcagtggtggcccgccgcaggttctcagcaccctccttcagcttcagctccttgcggatttcccgccgcagccgctcccgctccagctccagctgctgctgtaccccgggggccgccaggtctgccccggccaggcccagctgctctagcagggaccagctgcgaggctcactctgcggaggacagaacagggtcagtggagctaggagaactccaggtgcagaccacatgcagccagcctggcccagcctctgccctggactggggctcccaagacagggcctgctctacctcctctgactcccaaaactggaaggtgacgaggccttgccactgcttcctgacctccccaaactgggaggtctcaagagcagggccttgtcacccccaccaccacagcgtcccccacattaagggggtctcaagaataagatctgtctcccttctgctgcctcccccaaactagagggtcccaagggaagattccttcttttctctgctgctccccgaaactaagagggcccaagggcaggccctgtcttctctctgctgtacccctaaaactacagggtcctgaggacaggccccatcttccctcacttgtaccctgaaactatggcatcccgagggcaggcctcatctttccttggctacacccccaaaactagggtatcccaagggcaggccaagtcttctctctgctgtacccccaaactatggggtcttgaagaccctcatctgctcttctcctatgttcaacaactgggaccctaaagaacagagcccggtctccttccttctgtctctccccaatctgggagccccgaagggcactggatactctcatcctccagagagagaactctgaggccagtgccccatctcctctccttgttcccaaactgagaagtacccggggaaggactactggcctgtgccacttggggcccccttctgcctgcccccacagggaccctggaccccacctccagctcctgctccgaggggttattggcctccgccatcctgggtccgggctgagggccccgccctcttcctgaacctcagccccaccagggcctctcggctgccacttcctctttcctgtcaactcccagcacccctcgcgcggggccaactccagggcatctaagggacctcctgttcctctagatgaaacccagggacagtccttgctccctgtccctagagaatgtccaaggtgcaggcagtttgtacattcacacactcatggtgtatccatgaggggacgcaggctccgagggctgacttgagtgtgcactaactttcaaatacatatgtggatatgcacagaacacaggctcacaaatgtttgcacgctttctttttctttcctttttttttttttttttttttttttgagacagagtctccctttgtgttgcccaggctggagtgcactggtgtgatcttggctcactgcaacctccgcctcccaggttcaagcaattctcttgcctcagcctcccaagtagctgggattacaggcatgtgccgccacgcccagctaatttttgtatttttagtagagacagggtttcaccatgttggccaggctggtctcgaactcctgacctcaggtgatccgcccccctcagcctcccaaagtgctgggattactggacgtgagctaccgcgcctggcctgtgtttgcacagttatggctgcaggtgtgtgcctgcaacacaggctcacatgtgtgcacactcccatgcctgtgtgtgtggatgaaacaaagatccacacacaggtgcacacttctacacctgcaggtgtgtgcctggaaaatgggctcacagtgtacccattcccatgcctaccacatatgcacttatttgcaaacacatacaagtgcttatgagcttccctctagaacccatacaagacacactcccacctgcccgagagggcatggcccacatgctcatgcgtgtgcacatgctcacacacatatgcacgctccccgaggcccctgcagcacatccatgctcccacagacctccagccctgcgactacctgcatatgtccctccagactctcccagccaccccttgtccccggcttccccttcagggtcagaacagccacttcttcagaggtgaggcccctttcctgcagacgggccctcccaacttcctgcttcctctcagtccagtcgccaactgttattgaccatagctgagaggcccggggtcccagccagcccagtggcacctccctcaggccaacacaattaggggacagcactgggggactgggataagaatttccaaaaccaggccgggcacggtgcctcacgcctataatcccagcattttgggaggccgaggtgggtggatcacctgaggtcgggaggtcgagaccagcctgaccaacatggagaaaccccgtctctactgaaaaaaaaaaaaaaatacaaaattagtcgggtttggtggtgcatgcctataatcccagctacttgggaggctgaagcagaatcacttgaacccaggaggcagaggtcgaggtgagccaagatcgtgccattgcacgccagagcgaaactccgtctcaaaaaaaaaaagaatttccaatttccaaaatcacgccgggcgtggtggctcacatctgtaatcccagcactttgggaggatgagcgaggcagatcacgtgaggtcaggagttcaagaccagcctggccaacatgatgaaaccccgtctctactaaaaatatgaaaattagccaggcatggtggcacgtgcttgtaatcccagctgcttgggaggctaagcatgagaatcgcttgaacccaggaggtggagattgcagtgagtcgagatcacaccactgcactccagcctgggcgacagagtgagactctatctcaaaaaaaaaaaaaaaaaaaaagaatgccccaaatcagcagcctacaaaaccacttgctaagcacacagtaacattcaagaacaacttatgatggcattacttcctgataagctcatcataagttgcaaat

SEQ ID NO: 1560867 - DNA, 4001 bp, Homo sapiens
caggaggtggaggtgccagtgagcagagatcatgccattgcactccagtctgggcaacaagagtgaaactctgtctcaaaactaaataaataaataaaaagtaaatgaatgtggcttcaatctctcaacaaggactgggggtcagttttctttgtctcaaagtttaactatgaattaaattcctctcatggtaattttggcctctgcactagaataagaaaaaaaaatctagcctgtgaggttagaaacaagatggtcagtcatgttagctttctctcattacttacatttctgcgaaggcagtttcaagaccccccttatgaaattaatcagcttccccccaccacctccaaattcatatgttggacttgtaacccccagaacctcagaatgtgactgtatttggacataggattctttttcgttgtttgctttttgagacagggtcttgctttgtcacccaggctggagtgcagtggtgtgatcgtggctcactgcagcctcagcctcctgggctcaagcgagcctctcacctcagcctcccgagtagctggaagtgcaggtacatgctaccatctccagctaaattttttatgttttgtagagatcaggtcttgttatgtcacccaggctggtcttgaactcctaggctcaagagagctttccaccttggcttcccaaaacgctgggattataggcatgagtcatcgcactcggccagacataggctcttaaaggggtgactaagttaaagtggggtcctgagggtggcctggaatttggtttgattggtttattttattttatttttttttgagatggagtctcgctttgtgccctaggctggagtgcagtggcgcagtctcggctcactgcaagctccgccttccgggctcacgccattctcctgcctcagcctccggagtagctgggactacaggcgcccgccaccacgcccagctaattttttgtatttttagttgagacggggtttcactgtgttagccaggatgatctcgatctcctgacctcaggatccgcccgcctcgtcttcccaaagggctgggattacaggcgtgagccaccgcgcccagcctgattggttttataaggagagattagggcctctgcaagaggcttcaggagaaaccaaccctgccaacaccttgatcttggacttctagcttccagaagtgttagaaaataaattcctagccgggcgcggtggctcacgcctgtaatcccagcactttggaaggccgagtggggtggatcacgagttcaggagtttgagaccagcctggccaacatggtgaaaccccatctctactaaaaatacaaaaattagccgggtgtggtggtgtgcgcctgtaatcccagctactcgggaggttgaggcaggagaatcgcttgaaccccggaggcggagcttgccgtgagccgagatcgcgtcactgcactccagcctaggcgacagagcgagatgctgtctcaaaaaaaaataaataaataaataaaataaaataaaataaaaaagaaaaagaaatcctgttatttaattgcacccaatccctggtacttggttatggccgccccagcgggatgaaacagccctccctgcccccacggcttgcctgagcctgggtctggggcgtgtgcgcatgcgcggtggagcttgtgctccggaatccggtgcggaggcttgggctccctgcgcttagcggtgtagtcgctggacagctccttcagccggaatctccgcgggtgaagactgcggggatcctcggtgccaaagcttctgtggtcctcctgctttccttttccccctgtgggaggaggtcgcgggctggaggtgtttcctcctggtcctgagcagggccaacctggaggtaaaatggcccctgcgcctttaaacagccctcctcggcttgtaggccctgcttggttgctccagctttttcagctgttccagagctcacccggagctattttcatccgtgggatcacgtggagggctgggactttccaggcttccttagtgatgtcacccttctgtcattaggcacccgagaccagtattcaaaaaaagaatgttgtcgttatataactatattggagataagtattcctcaaaacagattagctaatcctcctatgcatctggctgtctaataaccatcatatataatatcatactcaaatacccagaaaaagaaatattgaggccaggcgtggtggcttacgcctgtaatcctagcactttgggaggctgaggcaggcggatcatgtgaagtcaggagttcgagaccagcctggccaacatggtgaaacaccttctctactaaaaatacaaaaattagctcggtatggtggcgtgtgcctgtaatcccagctactactcgggaggctgaggcaggtgcttcatcctgggaggtggaggttgcagtgagccagatccttagggccaactctggttcatttaatgtccatttttagaaaacctgtgagctccattcacagtgaaggtttgaagcccagaagtggcctcccaacagggtaccacatttcccagcacctttgcagctaggtgtggtcatgtgagcgagttatgtggtcatgtgaccgagttccagtcagtgcaatcgggcatctgtggggagcaccgcttccaagagtggctcctagaaacctcccatactaccctcctgcctactcttcctgaagcccagcactaagcgtcatcccaactcgatgggttttgaattttttttttttttttttgagatggagtcttactctttgtcgcccaggctggtgtgcagtggtgcaatctcggctcactgcaacctccgtctcctgggttcaagcgattctcctacctcagcctcccgagtagctgggaacataggcatctgccaccacgcccggctaattatttttgtatttttagtagagacagggtttcaccatgttggccaggctggctcgaactgctgaactcaagtgatccacctgcctcggcttcccaaagtgctgggattacagttgcgagccaccgcacccagcttgaattcttattttttaaaaatagatatgaggccataatcctagcactttgggaggccaaggcaggagtatcaccaattttagaacaggatttcaccagggggaagatggtctcccctgctccccctaacgccaggctcacctcttcagtgcccgcaactccaaccatcgcaggatcttttcactcctagacctgaccatgccactgccccgcctgcgggataaggttctacacctcgcaggagctcatgaggctctccacagtatagttagtagttatagatgcagggtcaaggagctgacagcatggaccaaaccctggcccaccacttcctagatagtggacctagggaaggtaacttacatccctgtgcccctcagtgtcctcacctgttaaatggggagaataaaagtacctacctggtggagccatcatgagggtcactgaggagtgaggatgaccctgactagcttcagcagagggacatggcggccgtgtgtggcagatgtgttcctggggccctgcactggtgcagggaggaagagccaagcccaaaggaaccatggtctccacacaaagccagtaatgtggggatcccctgacatacaacatttactttttttttttgccttaaacattttatttgaaattgaaacacaaatgcacactaatttgccagttctttaaggcagagctgtatcaggaactcttagctatgagaaacaagtcttttttttttttttttttttttttgagacggagttttgctcttgttgcccaggctggagtgcaatggctcgatctcggctcactgcaacctcctcctcccgggttcaagcgattctcctgcctcaacctcctgagtagctgggagtaacaggcatgtgccactacgcccggctaattttgtatttttagtggagacggggtttct

SEQ ID NO: 1560868 - DNA, 4001 bp, Homo sapiens
atcgtcgaggttctagccccgccctttagctcttcctgaccttatcttcccgccccctagctcctccccgatgccataaccccgcccctagctcctcctcgaggctttagtccctccctctagctcctccttgagattctaacttcgccctttagctctccccgcccctagttttcccctgaggtcataactccgccccagtcccttcttgaggtttcagccccaccctgtagctcctccccgaggtcgtaacccccgccccttggccccttgaggtcctagcccagccccgtagctcctccccaagcttataaccccgcccctagcccctccttgaggttccagccccgccctctagctcctccccgaggttataatcctgcccctcaagagtctagtcccaccttctagctcctcccgaggttataactccgccctctggttacgcctcgaggttataaccccgccctctggctccgcctcgaggttctagccccgctcctagctcttcctcggtctgtaacctctcccgtagctcttccttgaggttccagccccgccctctggctcctccccgacactctctccccgccccaggctccgccccgagattgcagcccagtccctaggcccggtccccgacctccgggccttcccggacatccctttccagctgcgcgttcggagtatcccggagctgttactcattcccggcctcccgcggtctcgagcgctttccgggttattcatcgcggccccaacaccctgtggccacccgccctgactcagttccttctcgaattcctcgacccagagccccccacattttccggggaagtaagtgagagtcgcctcagtgagagggaaaggtcctgagggacagtcccgggtctccagcactggctctgcgccgctcagtcagcctccctttgggccttttgtaaaagggggtcctgtccccccgtttctcagagggggagacccagcagcgtggagagcgctggggggcgctgcagggtcagatcctgcgtattcaagcactggctgtgtgattttaggccagttatctaacctctctgtgccctagtttcctctgcgaaacgaaattaataaagtcccatcgcctagtttgaaattgcaaggaagaggcttcgaagaactccatttaaaaaaagaacacttgggccgggcgcggtggctcacgcctgtaatcccagcagtttgggaggccgaggcaggtggatcatctgaggtcaggagattgagaccatcctggctaacagagtgaaacccggtctccactaaaaatacagaaattagccgggcgcgatggcaggcgcctgtaatcccagctacccaggaggctgaggcaggagaatcgcttgaacccgggcggcagaggttgcagtgagccgagatcgcgccactgcactccagcctgggcgacagagtgagactctgtcaaaaaaaaaaaaaaaaaaaaaaaagcactcactaaattatgtaaagctaaatgcctttgctccactaatatttccttagctactgagtgccaggtactgcgccgcgtggcgttgcacaaagcacgagaattactattatttgattagggaggatgctgaggactgaaccgcattcctccaactcatcctctgacaacccccaaccccctcaattagaccctgttccaggcgcaggcgttcgggacccagcccctacctgggacgcaggtgtggagcagcagcagcagcggcagcagcggcgggtgacccatgtcgcgagggcagctcctgtgcgcggggtccctgcacgtcttctctccttctggcctcaggaaggaggcagttttgtggccccagggactcctcccagacgttttgcgaaagagcgagtcagccccagatgcgtgggcgcctccccctcctcccgtacgaacctcctccgccacaaacttcccttcccggggcgcggccggctggtggtgaaggggctggctcggccctgactcatggagttgtgatcacagctctgtccccagattgcctgggtgcaaatcccagttctctctcttcctaacgtgggacccggggcaatcgctctccactgctgtaaaatgaggataaaaactttgacggtaaatatgaatgtggctgattatttggctaacaggatttttgttagttttgtcaggagggatactggtattttggaaaatgtccttatctagagatgcatcctgaaatatgcatctcttaaacacttaaaacacttaacccttgctttgcttcccgctgtgcccccagctcctggaccagtgcccagcacgaagtaggtccttggtaaatgttaaaggaatgtgttgagccctccattttggccagcagctattccaggcattgcacctacattaaaacacttaatggtgaaaccccgtctctactaaaaatacaaaaattagccgggcgtagtggcgtgtgtgtgttacttaggaggctgaggcaggagaatcgcttgaacccgggaggcggaggttgggttgcagtgagccgagatcgtgccactgcactccagcctggcaacagaacaagactccttctcacagaaaaaaaaaaaaaaaaaaaaaaagacacttcagccaaaaaagtagatatcactgttacgacaatggctgtatgcttaggtgggattctggtttttgtttgtttgtttgtttttgcagatgcttactagagtatttagtggtgaatgttattgatgtctgcattttttgttgttgttgttttggggatttttgttttgttttttctttttcttttgttttcattttgatgtctgtatttattttataatattttagaagaggtcagatgaggtggctcatgcctgtaacaccaatgctttgggaagccaaggcaggaggatcacttggggccaggagttcaagatcagcttgggaaacataaagagccctcatctttccaaaagaaattaaaaataaaataaaattagctgggtgcagtggcccgtacttgtagtcctaggtagttgggaggctaaggtgggaggaccgcttgaacctgggaactggaagctgcagtgagctatgattgcaccactgcactccaacctgggcaacagagcgagaccctgtctcaaaaaaataataaataaataaatacttgagtagaaaataaaggcaaaatagccaaatggttgtatcaattatataaaggtaatcagtatataagggcatattatgccattctgtctccttttctgtgggtttgaaaaggcttataataagttttttctttctttttattatttatttatttatttattgagacgaagtctcactctgtcacccaggctagagtgcagtggtgcaatctcggccactgcaatctccgcctcctgggttcatgcaattctcctgcctcagcctcctgagtaactgggattacaggggcacgccagcacacccggctaatttttgtatttttagtagagatggggtttcaccatgttggtcagggtggtctcgaactcctgacctcaggtgatccacctgccttgtccttccaaagtgctgggattacaggcatgagccactgcacctggccaagttttttttttttttaagtaaaataaaatactaaagataaaattgtctccccgtcttaggatgcatctaactaaacagagcaatttaatgtaggtgcaatgcctggaatagctgctggccgaaatggagggctcaacacattcctttaacatctaccaaggacctactttgtgctgggcactggtccaggagctaggggcacagcaggacgcaaagcaaagttcccaccttttgttgtgttgacagtggggagcagatatgtgttatctaatctttcactgtctgagagggataagcaaactggagaaaacaaagcaggctgaaggaagtatctgggtgcaaatgaggtgtgagctgttttaggtgggtgatccag

SEQ ID NO: 1560869 - DNA, 4001 bp, Homo sapiens
cagtgtctagcagtgttgggcacatatatagtacatgcttaagaattatgtgcagaatgattaatttgtgttttcattcccatattgcagatgcagtaactgaggcgctgggaggttaagttagttgcccaagatcatgcagtttttttttttttttttttttttgagacggagtctcgctcttgttgcccaggctacagtgcaatggcacgatctaggctcactgcaacctccgcctctcagattcgaacgattctcctgtctcagcctcccgagtagctgggattacaggcatgtgccaccatgcctggctaattttgtatttttaatagagatggggtttctccatgttggtcaggctggtctcgaacttccgacctgaggtgatccgcccgcctcggcctcccaaagtgctgggattacaggcgtgagccaccgcgcctggcctattattattatttttttttgagacggagtctcgctcttgttgcccaggctggagtgcaatggcgcgatctcggctcactgcaacctccacctccccggttcaagccattctcctgcctcagcctcccgagtagctgggattataggcatgcaccaccacgcccggctaattttgtatttttagtagagacggggtttctccatgttgatcaggctggtctcgaactcccgacatcaggtgatccgcccaccttggcctcctaaagtgctgggattacaggcatgagccaccgcacccggccgagggtgacatggttaataacaatattagccaaaaacaccatgtcaagctgagcctaccacaagaataaactcacagaatcgtcacactcagccctgatgtggatgtccccgtgtgcattttgcagatgaagctgggattggaaaggtgccataaggcagtcaaggtatccagaggtgtagtggtggggctgggattctgacacaccccaggtaatgggctgcagtaccccgtatgttatgtgagatgtgacacggggaaatgacgaagacacggagggaagaaaaataactgtaaggctgggtggctccttatggggaaaactggaagcatgaggagtggatggtgactggtcagaggaacagtgatgccaagggagggacaaagacacaaggggtaatgatgacgtaagagttgcattagcgcgatttaagaagagcgatggggacagtagccatgcgaaggtgacttgggggtatgatgagggtttaaagagaaatgaggattttataaaggagaaatggcaacaaaagcaggatgcaggtaacatatggcgatgacgaatttaaagggagcgattacgacctatggtggcaaagagggcttacagggaacgaaagcgagttaagggcgttgatgacaacaagaggagttgtgaggatttaaagagggtgatggcgacagaaggagttgtgaggatttaagtgggatgagacagaaggagaggaatggtgacataaagagaccgaggacgacataaattatagcgtggaagacaacgctataattatatatattatattccatatattatattccatataatatatattatattccatgcattatagcgtggaagacaacacgaggagggtagccgaggcgccgcgcccccagatcgcacagtacctgcactccacgtctcccactccgagacccagccccacacgcaccttccaggctgtatccccgcctgacggcccctcctagccgcgcgcaggcgcactacggctagactgcaggccggcgggggccaggcatgcgcctttctcattggccgcgccgcttgctagcttcgggcggaggggagcgccgggccgacggtgggcggtcacgtgacggttacgactgcactctcgctggtgtcggtgggcggtcacgtgatggttatggccgcactctcgctggtggcggcctgttggggtagagcggccgcggacgagtcagttcagcttccggcggtgagaggatgcttccggggcgggcagcccgggccgggggaggagtgtctgacagttggcgccgccgggagggagggcgggcggcgcgagtgggcgcgggcccggtgggccaggtgaggcgcgggccgggggtggtgggactgggccggttgcggtagggacgggtggcgtccgggtgtctggactcagttcgggctccgttgtacggcttcggacttacgatttgtttctttgagcctcagtttcctcccctgtggaatgggggttagaatccgactgtatcaccggctttataaatgggagtgagaagtcaggtcgtgtacgttggatgccttagctcagcgcctccgcataacgctcacttcgttactatactattattattagtattgatgtttgagcgcttagtatgaaaaattgttgggtttggaagccgtcgaattttggttcaagtcccgctccactgtgcggcagtggggcctgtgtcttcgcttccttgaaccccgttttttctcatctgtacaatgagagcagatagtcccaatatcatagggtcgtcttgaggattctgatgaaatctgtgtgtgtaaagattttaagcagaggggctggcacagtgagagctcgtggattgggactataatgataatgattctgagagtcattggtgtagctgggaattccagggaagctgggggagaaagctcagagacagcaataggaaaaacttagaattggagccggggaaatcgacatcctgtcacttactatttgaccaattttgctgagtcctgaagtactagtttttttctttttcttgataatgactagtgcatttttttccccagtaagttaatttgagaaggcaaatttgcattgctgtcttcttcttttttttttctttgagacggagtttcgctcttgttgcccaggctggagtgcaatggtgcaatttcgtctcaccgcaacctccgcttcctgggttcaagggattctcctgcctcaaccttccgagtagctgggattacaggcatgcgccaccacgcccggctaattttttttgtattttagtagagacggggtttctgcatgttggtcaggctggtctcgaacttctgacttcaggtgatctgcccgcctctgcctcccaaagtgctgggattacaggtgtgagccaccgtgcccggcgcattgctgtcttcaatggaaaactagcattgctggccatgagaggaaggaaaagttcaggtaaaatacaatggaaactgaacagcccattacattgtacactgaaatggaaagataattgaaaaggaatactacgtattccctttgaatagggatactgttcagaacctgtactgtgtgattccctgttgtcagatcccatggacccccattaagttgtccttatacttgttcccagctcacactttgtataaaactagcattaagtcagtgactgtcccactgtttccctagcttactgaagatttgttttatttgatgcacacttaacatcgcacttaaccacctgccgtgcatctttgttctaaggactctgtttattaactcgtttaatccttgtaacacctttaagaatgggtccttggctgggcgtggtggctcacgcctgtaatcctagcactttgggaggccgagacgggcggatcacgaggtcaggagatagagaccatcctggctaacacggtgaaaccccgtctctactaaaactacagaaaattagccgggcatggtggtgggggcctgtaatcccagctacttgggaggctgaggcaggataattgcttgaacctgggaggcagaggttgcagtgagacgagatcacgccactgcactccagcctgggcgacagagtgggacttcatctcaaaaaaaaaaaagggtcctctttttttttttttaagatggtgtttttttatttttattatttatttatttatttatttatttatttatttatttatttatttgagacaaggtctcgctct

SEQ ID NO: 1560870 - DNA, 4001 bp, Homo sapiens
caaaggccctgagggaggaatgtgcctggtgtggatggagaagagtgaggatgccagtgtgtctgcagtgaagtgggctggggggagtgggagaggagatgtcacagaggtgatagggccagatcctgcagggctgcctggactgtgatgagtagaacagggtcacgtgtgggttcccagcagggaaggatgatgtgatctgcttcagatttttttaagagatggggatctccactgggcgtgatggctcatgcctgtaatcccagcactttgggaggccaaggtgggcggatcacctgaggttgggagttcgagaccagcctgaccaacatggagaaaccctgtctctactaaaaataaaaaattagctgggcatggtggcacatgcctgtaatcccagctactcgggattgctgaggcaggagaatcgcttgaacccaggaggaggaagttatagtgagccaagattgcgccattgcactccagcctgagtaacaagaacgaaactccatctcgaaaaaaaaaagagatgaggatctccctacgctgcccaggctactcttgaactcctggcctcaggtgaccctcctgccttggcctcgcacagtgcggggatttcaggcatgagccacttcgctgggcttcagttggattttgtagtgggttgaatggtggcctcaaaaaagatgtgtcccacgcaagcataatccccggaacttacgtgcatgtgaccttatttggaaaaaggatctttgcaattgtaatcagatttaggatcttgagatgagatcatcctggactaactggatgggccctaaatccaatcacaactgtcctcagagatagaacaggcagaaggtcatgtgaacagggaggctgacattagggtgatgtggccataaacccagcaatgcctggagccactagaagctgggagaggtgaggaatggaatctcccctccagcttctggaggcgcatggccctgctacaccttgagtttggacttcggctccaaaactgagagaatgaatttgttgtcttttttttttttttttttttttaagacggagtctcgctctgttatccaggctggagtgcagtggtgcaacttcaaatgatcgactgtctcggcctcccaaagtgctgggattacaggcaggagccactgcgcctggccatacattctgttgtgttaagccaccaacttggtggcaatttgttacagcagcccgaagaaacaaacacaggtgttacaggatcccctggcggctgtgcgtggggaacagactggggcagggcaagggagcccagggaggaggctgctgggagcatccagacaggagccaagggtggacaggaccagggtgtggtcagccaagtgtcgaagaaagggcggggtctggatgcattttgaaggtggaggggatggcatttctaggctggatgtgggtttgagagcagtaaaggagtgagggatgactgagttttggccgcagcaactgcaaggattggaggtgtcaacagctgattgggcaagacagggagacacaagtttggggaaaagaccaggagtttggttttgaacatacaacatttgagatgtctaaaatctgactgactcctctgaattaaaggagtcaacaggctgggaaaggtggctcacacctgtaatccctgcactccgggaggctaaggttgggggtggattgcgtgaggccaggagttcaagaccagcctacacaacacagcaggactcatctccacaaaaagtaaagttttaaaaaaggaattagcacacatataatgtgcatagaagagcccctgacatgcaggaggctctcagcaaaggtgactgtcaagtctcctaacagctccccacgcaaaggcatcccccatcccacccccagagacaagacggttgcttttcattgtaggtctttacttacattgaatttttttaaatgcacatataacttctatggaaactaaattataaagaggctcaggctcctagctagggtgccccatcaccagatcctagcctccagaggactgtggtctcagcgggagaaggaaatcaggccccctccctgctcagatccttgtgggagcagggtagggtgaaactgaaggtgggcacgggcagccggatgctggagttcctcctcagcccgtctcaatgcctgtattctcaggaccctagaacctccatggggctcccagcgcgccccatccaggttggtacttatgctctgcctccttgctggtatgacatgagatgaaatcaggtctcggtcgggcgcagtggctcacacctgtaatccagcactttgggaggctgaggtgggcaaatcacctgaggtcgggagttcaagaccagcctgaccaacatggtgaaaccccgtctctactaaaaatacaaaattagccgggcgtggtggcgcatgcctgtaatcccagctactcaggaggctgaggcaggagaatcgcttgaacctgggaggcggaggttgcagtgagccaagattgcgccattgtactccagcctgggcaagaagagcaaaactctgtctcaaaacaaaaaacaaaaaacaaaaaagagatcaggtctcatctgggagagggcactgccaggaagcgtgctctctcccagcccacagaataccccctagtccccttgccttgtggtcctgccccccttggagtatgacaccatagcccgcaaaaaggaggaagtaaaacccactgggtcacagatccctgaacaccccacccccaggggagggtggcagtgggagatttgattcctcctctacagcagccctttaaattggagagctcatggttcagatcacacctctgccactttcttgctgagtgatgctgagcatggggctttacttctgagccctgctggcctcatctataaaccagtattagccatattggcagggcgcagtggcttatgcctataatcccagcactttgggaggccaaggcgggaggatggcttgagctcaggagtttgagaccagttggggcaacaaggtgtgaccccatctctacaaaaacttaaaaaattggctaggcggctgggcacggtggctcatgcctgtaatcccagcactttgggaggccaagatgggtggatcacctgaggtcaggagttcgagaccagcctggccaacatggtgaaacctcgtctctaccaaaaatacaaaaattagcctggcatggtggcaggctactcgggaggctgaggtccaagaatcgcttgaacctgggaggcagaggttgcagtgagccgagattgcatcattgcatgccagtctgggcaacaagagcgaaactccatctcaaaaacaaacaaacaaaaagataattggctaggtgtggtagcccatgcctacgcctgtggtcccagccacttgggaggctgaggtgggaccactgcttgagtccaggaggtcaaggctgcagtgagccgtgattgtgccactgcactccagcctgggcgacagagcaagacacggtctcaaaacaacaaatgaaatgggtatcatcttatatgcactggagggtggtggctgggggatctctgaatggttaagggggtgggtctcagagtcccacagctcagacttcagatctcagctctgtggaactgggaaaagaggttcccttctctaagccacactttcattctttgaacaatgtggagattaataataccaacctcacatttgttgggaagtcaatgagatcatccatggaaggcaggaagcacagtaagcccttgaaacatgctagttggtgagatctgtgtacgccctcgtatcttgtatacattttaatcacacataatcaacatatgtgtcccttgctatgtccgtgtctgatttattcctctagctctagggcccagaccattgtaattgctcaaaaaatactgaaagcagaagaaatggagcagcagaatagaaaattttgagaggagatt

SEQ ID NO: 1560871 - DNA, 4001 bp, Homo sapiens
agagggaggtgttcagaggcaaggaagaggctgtagggaagcaatttggggatcaagcatccactgccaagaagcagatgcccttggccaccagagccagagctgtagtaggtcctttgggatctgaactgggactatgggctgggagggccccataatcagggggaactctcacgctgagtctccagtgaatcaaaggatgccctggtgccctgcggtcacaccccttagcaaccaagtacaaggagaggaagcctcaaatccctccatcctgcccggatggagcctcatctcctgatgcccacagatatctcaggcatccttagccaggtcccgacaatatgcccttccttggaagcggtggtactgaccaaggctgagatcagatctctgggctctgaacttgagaaacaatatgtgtggaacggcaggaggaaaaagaaatgagtgtctccctaagcttttggctgggatgccgatttgggatgcaagtatctggaggccccttgggtcttattgtcagagaagggtctctccttataggatttcattagtgggtagattggatggcgagagataggacagcaagttctggcactaatcaagagcagccactacttctcagaactcgaggggcctcatggctggggagcggctttatcttagcaaccagggtcaagggaggttgttactctggtttagaattaggaaaatacaaagggtggggacagagctgggagtgcctctgaattcctagctgcggtgtgtaggcaatttgggaccttactatgtctggcagaccccgttgctaaggatctttgtccttaacaaccagagtccttggggaaacagaaggatgggcggcccagagccccaccttcctccccatccccgccaggaagctcaaaccttggggctcaggctgctgagcgaggagatggtggaggcgctgctggccaggctcaggctgctgcgaggtcggctcccctccatcaagggctgggggagagaaagaaaggggctgtgtctctgcagtgacgggtgtgagacagagatggggtcaggggcttggaggtcggaggaggctgcagagaaagagcctgttgtttcgggacttggggggctgggggaggccatggcccgtgaccacataccaagagtggtgccaagagaggtaggcggccctggcagctgcgggagggggcagctgtctgcagcccaggccagagaataggggcttctttattcctgcccactgcactcaggccaggaatttgaccctctctgtgcttagggactccccattccctgcctccttccggctgccccaggctacctgtctcccgccctcccacatgcacccccaaaccacccctgccaactccccaagccaagccctgcggcaccaggaatgtgaacccagagagcccctcccagcccagccagggaacttacccagctctggggtcccagtgacgggggggcaagaggacggtgtgggtgctgcggcacctaggcagtctcccgcctcctttgtctcttagctgctgtctctcatagttctcaatctctctcctcacctgctcactcacactttttgtctctttgtctcctgtctcttacggtctctctctctctctcttccttttacactacctctctccccactctcactttctgtgtctccctctgatctctgtctcttccagtctctctctcactcattctctccctctctctctctctccaatctttctgtttctgtccaaatcttttattgtcagactcacagggtctcttccttaagtctctgtctcattctctctctctctctctctctgtctctcagtcatcccctgtgtcctctctccttcacactcagtctcttcctctttctctctggctctgccgtttcctcccttttctctttccgatttcccttctcactttctcccttcctccctctcccagtttctctttcctctctgctggtctttccctgcctctgccagccgcccacgctgctgttctcccctcccaatcccggctgtccccgccccttctggcctccccactacagcctgacctctggctcagctgcccccatagctgaagggaggggcttgggccccccaattcccaggtcccctaaggaccaaggttgggacttctcagtgtttggagagttggacttgaggcctgcactccagggcccccgtgggtttgctgctgtggttgggggcctgagccactggtgtcctaaacggaggaggcttgtgtcctgcaaggggtggggactcaaatttccaaagccctggagggaatgggttagggatccagactcctgggtgcccgagaaggtctgagctaggatcaggactcctgagtcgtgaaagagctgggggtctggaaacatggctgtgcttggaaggggccagggacggtttgtccaggtcccctagggagaaaaggggatggtcccagtagggcagggtgaaatggagagttccaaacctccacctcagatccaggtgagaattctcttctagactgaggacaactccctcaggagagagacatgattccttggtatattttgaggaacaagattatgcatccgtaggcaggggaggagagcggggggctggaactgtcacccagggcctggaacttgtagcagaagcgcccccacccgcacaaagagtgccacccaggcagaatcgcggcttgtgggggcagagctactgcctaagtctgaagcagatgacacccaggagtggagccttgtgcctgtgaccgggaaggaatctgagctttcggtttaactgccattcaccatgcacctgttgagcacctactgtgtgcaggcactgtctgttgcagccactgagaagaaagcagtgagccctggctgggtgcaatggctcacgcctgtaatcccagcactttgggaggccaaggcaggaggatcgcttgagaccaggagttcaacaccagcctgggcatcatagcgagaccttgtctctatttagaaaatgaatttcttttttttttttttttgaggcggtgttttgctctgtcgccaggctggagtgcagtggcgtgatctcggctcactgcaacctccgcctcccgggttcaagcgattctcctgactcagcctcctgagtagctggaactacaggcacatgccactgcacccggcctaaattaattattattattatttttttgagacggagtctcgctctgtcgcccaggctggagtacagtggcacgatctcagctcactgcaagctctgcctcccaggttcacgccattctcctgcctcagcctcccgagtagctgggactacaggtgcccaccaccacgcccggctaatttattttgtatttttagtggaggcggggtttcaccgtgttagccaggatggtcttgatctcctgacctcatgatccacctgcctcagcgtcccaaagtgctaggattacaggcgtgagccaccgcgctcagcctaattacttttttttgaaaagcattgagcccagcaaagtgcctgatctcatagtgcttacatcctcattctcatttgcaaggaatctggaccctgctgtgactatcttggtcaagtggcttcatttccaagcctgtttccccatctgtgaaatgggaacaatgacaccctcgcactcggggaggaaaccaaccacatgtgaaaataggagactctagccaggcgtggtggcaagctcctgtactcccaactactcaggaggctgaggcaggagaattgcttgaacccgggaggcggaggttgcagtgagccaagatcatgccattgcactccagcctgggtgacagagtgagacaccgtctcaaaaaaaaaaaaaaaaaaagaaagaaaaagaaaaaagaaagaaaagaaaaaaaaaagaaaatgggagactctaggctggggcctgtgggctaaattggggtaggaggccaggcacagtggatc

SEQ ID NO: 1560872 - DNA, 4001 bp, Homo sapiens
caaatatttatgagtcccactgtgtgccagacactgtgcgaggttacagccgggagctggagaccaggcccttcaggaatgcacacttcttgccagtgagactagaagtacattcacagggtcttttctgagagccagtgctaaacactgtgaagaaaaagactggtgcgcccagcagggcagggcctgggaggacggtggaggtcgaggaaggaaggccttgggaggaagtgaactcactccagcctgaagtcagctgtgcaaagatctaggggcagagctccggtcctggggagcagctcaaggtggaatgggtgaagtcaggctgcggaggaaggagcgatggggcaaggaggacagatgaggttgcagtgccggcaggagacatcctgcaggctcccaggccagcgtgaggatgtgaggttttctccatgtgcattgagactgcagcatcaggcgccaagcctcctctccctccagaggggccgcccctgggctctgtccagccctgtgattcctggaaggccctcctccgggaagagaccggtaatgaaaaacaaagcaaaacaaaactggaagtgccgccgactgagcacttagagctcaccaggcacaaagttaagcatattacgttcattatttcacttaatcctcacaaaagcccccttggggaaggtacttccaccacatcaaagtcactgcccaaggtccctgctgagtgatcaggaagctcggctccaaaataaccatgagctgtggaaagctgcactcaaccagagaccaaatcagaactccagaagtcagagtccagcgggtgttgcctgcgctccaaatgcctgatgcccaccccatcccgagcaggtccgtcagcttggctgggctgtcccaccctccaggccacactggccaatcccccttccttcctcggggtgggctgggttgggcaggtcccctagttcacccagggctgcctggcctgtgttttggcagcccggagggctgacgtgtgcagggacgcaggccgaagtcagagagtcatctcagctcacaacagactccagtgggaacgacgctgtgcagagggacgatcccagcgcattaggggactacctccccacctccttggcctctgaccctctctggccaggagataccagaggtgttcaaattccaaaggagtgctccccttgggctgcagagatcaagtttcagcgtggctcggaacctctctgctttcccacctgcaaagaggctgaccacacctctgccctacacggcccgccaggtgttggggaaacgagaaaggagggagattccaggccgcctctctctgcgggcctgctcaatagtttcctctctgagatgggagcagtgcccgaccctgtttcccttggcagctcccaccaagaatcacaaactcaactgctccagaggaactgggaccccagcgccccccgccgcgcccctgcccagggggacagtggtcccatccaggcctccagactgcagactggggctgagaagagaggtcccggcggccacacgaggccaggatcccggaaacaccaccagcgaccgggtgcgctgagacccctgcagtcccgggtggcccgcgacccccttacctccaccagcttacatctgcgcgtttccccggggattccgcctcggacgctctgacccctgaccgctctccccaggctccctgcaggttcaccccgcaagccgcccaggagcgcccttcccaggcctcttcttgggctggagtcagcggcactgcgccccgccggcccaggagccgccaagaccgcgcggcgggagagagctcgcttgtccgggggtggtgatgggagactcgcctcatgcgcctgccccgcgacccgcagcccggccgggggacggtggggggactcaccttctgcgccggccccgcgcccagccctcgagtccacaccgcagtagcccgggtccccgcccgctccgcccgggtcccggccagctccgccggacacgcccccgcggtggctcggccaatcggagcccgggaagcgggaggggcggggcttgggcgcggcgctcggagggcgcccgagcttgtgcgcgctgcaggtccggggctgggcgggactgtcgcccgtgtttgaccccctggccccgcccggcttccctttccgctcgccgctgccccacgcggagcgcgactgccgtcacccggtgggactgcgaccctggccttgggcaggggtggggtgggggcgcccgcgactgcgagacctgcgggacttggcggggaaaggggcagtgggaggcttgtgccttctggtgcctccggcgggcctcacagcacagtcaccctcagcggtcaataatcgtaatatgaaaatgcagcagcactttataacctttttttttttttgagacggtgtctccctctgtcgcccaggctggagtgcaatggcgcggtcacggctcactgcagcctgcacagaaatcatcctgaccccaggagaattagcccaccaggaccggctagtttttgtatttttgtacagacggaggtctcactatgttgcccaggctggtctcgaaccccttagctcaagccatcctctcgccttgacctcctaaagtgctgggatttcagtagtgagccaccgcacctggcctattttaagctttttatagtggaaaatttcaaactgaaggaaagagaatagtccaggggaccctggtgcccgtcacccaggtccaacactagcagcaagttatgtcacccctgactcaaccgcacctgagcctcctgtgcggctcagaaggaaattcccaggcctcagtgcccggaggccttcctggccctccctggcctcctccccacaggtcctctcaaatgggcttcttcctgttccttaaagcctcaggcctttgcttctacctccatcagacctcaaactgtcacctcctcagggaggctgccctggccacccaaagcggttccctgtctccaccccatctccctccacagtcacccgtgtttgtaattttgcaaagcatctcccaacccagagtcctctcctgaggccgctcgtgggattcagggctgcctaccaggctgtggcttctgtggaatgctcataaacaagtcatgctggtggcttgcctcccacccaggctgtgagccccacgggctagacagtaatttcttctcgtgttcagacaggactttcttctggttcacccctgcataccgagtgctgagaacgggcagcgcataggaggaacgcagtccctacctgtcacatagatgcaggttgtcttgccaaatagaactccacctgggcaccctgagaggggtggctcaggccggggcaggcctgctgggccaggaccaggtgagaggggagcagcggggggagggctgatgggctgtagggctgtggggctggagctagaagaggtgcctgctctcttggcagggggctatgggcgaggctgtgaggtgggcccagtgctggagacggtcctctcccagctgagaagggaagggaaagggggtgacggagggggagggagaggggacaggcaagtgagagggccaccagctgtggccttggggagccccctccccactaccacttcatggcgcccacccactaccgttgccctcatcagcaaggacagcttttatgagcattcaacagaagtcaccgcctggtaagtaaccctgaaccccacaagacccgaataatgtctgtttgctttcaaagtgtttaaacatttttaaaatgcattgctgtgaacatttcatatggggagagttcacataaaaatcaggatcttcagcttctcttaaatcagaagatttgagaatgcgggtcctctttagaggggccttgtgttctcccctccactatggtccccacactccctctggtttcccccttggggcactttacccccttttgcacctccagatgaatatacgtttgggtttacaagtcctg

SEQ ID NO: 1560873 - DNA, 4001 bp, Homo sapiens
cctggaggctgagcaggctggagtgggcccaggggctggatccccctcagagcccactgtgctcagggatgtggagctcccagaacctcggggggaggccatggtgggggctgcaggagctgctggggtgtggaacaggaggtcagagaaatctccccatgcacggacttccacagcctttcatgcgttcagcccacaccctcacccacacctgtccaacagctttcccacaggctccttcctcctctccccactgccctgtcttggtccagtcccatcctctcccatcagggtcctctctggacttctggcctccatttctctaatccacctccatgaatcagctaggtagacatttattaatttgtctatctgactgtattactcccgtgagtgtaaccccttcatgcccctggggataaagtccaaactcctcagatccacagggcactgggcaatgtggccaacacagatccctctagccagttctcttcccacagccacccctcttcttacactctggatgccagtgacactcaacttctttcagtcacttacatgcagccttttctcaccgctgggcctttgcacatgctgttccttgcatgtagaatactcttccttgtctttgcgcaactccttccccctaatcttccacttcccagttgagatgttcccacctccaggaaccttcccctgaccttccgagctcagaggatccacgatcacagccctgaccactctgcccagcgctgccccctctggcctgtcattgcctggggatgggcccgccttccccaccagactcggagctttgtgcgagttggcctggggttgtctccatcaccctgccttgacagcattgccaaggaataaaagccccacaggctccgccgcccctgcctctaggctcacctgtccgagtctcacacacggtgccacagtcacacacttcacctcttcggccacacccgaggcttgggctaggtttggagaggctcagtccttgggctccctcaggcatggctgagcggcccagcagagtcctgcagaaagagccccttcttggatatcaggaccccatgggcctctccgccgcccagactcacagatgggggctgggaattaggagcgtggtgtaaatccagggaggggcccctgggagtaactaatgggggaggcacaaagtgacagaaagaaggggacaaggagagagaacctggcgaaaaagatggaaaggctgagacaaagaagagtgagcggagcaggaggcgcagaagctgcgagtcccgtttgtctggggccggaggcttagggatcctgggaacgtttgggctccagctggagcggagggcgaggggcagggctgggaaaagccgtgggcgggaggccgcggggtcccaggggagggcggaggctgggggaccggatgccagggtcctgcagacggctccctcccccgccgagggctgcgcgctggggcgctggccccgagccctcgcaccccctccggccggtctctccgaaccccgatcgccgtccccacagccacagcctccccagcgccttcccacacccctccagcccccaactcccgccggcgcctcggctcgccccccgccggcacgccccctcattgttcagcagtggcgccgccccctcccccagtccgcctgggcccctcgcctcccccctcacctcccggggagcctccagccccggctcgaggcagcccggctcctgcgcgaccccgacgcggtccccagggaggtgcggagcccagactcaggggcgtgaacttcgggctctcaggctccaggaatagaatctggggtctctcggagactggggtcccgcagtcggaatttctcagtgttctacgtaggggatgctaggagcctcgactctggagtctcagatggcggcgctggggacccacattcctaagtcttctaggtagggccgtggggtgggggatggatttctgagttcccctaattctaggggcaggaatgaaactccctccaggtgggagcacaggggggtcccaaagtcctgggtccccttgaagcgatggccgctgcagcccgaaactggttggggcgcttagaagtccggatctcaagttcctccaacgcggggtcttgggatcggagccctggagggagtctgcggtcctggatcctgagttcttgaaacggggatacggggcgctcggcctccagggtctcgcggggtgacgtccgggctcccggctgctccaggagggggcgctgcgcacctggatggctcaagtcctccagcctgggcgccggggtctggacctcggggtctctcaggatgcggtgcagaaattccggacgcccgggtccgagcctctggacccctcgggctcccggctgggtgtcacggggctcgtgtgacggcggcggcgccacatctggggcgggagagtccgatcccagctgtgaggcggggggcggtcgcccggggcttcccctcccccgctgtcgccggggctcacatcctgttcccgcctgcgggggggggaggggctgccttccggccgacccgccagcgaagggttaagaccccaccccttgttttgaatattcatgaggaggcgtgtccttctggtaggcgacacccctacattccaaacgcctcgcggacttttcccttttacagcaagggccgcgaggcgtgagaatccggaactggcaatgcactgtctcctattggtcaatgcaaaatgtttaatttgcatatataacacaaggcggggccctccggtgaggtcacgtggctatgaaccactgaagaagaccccggcgcaggggtgcggccggagctccagtggcgcaatcggttagcgcgcggtacttatatgacagtgcgagcggagcaatgccgaggttgtgagttcgatcctcacctggagcactttttttccccatcagtttttataaacttacacatctaataaaccaaccaaaacatctacatcacttagatgaatgaacgtttctatcttttgaattattgggctcaaaagactcctagggctttggcgacggtcctttgggtgttctgtattgtagggaggtgccgtttccgtcccagccaccaggtgggggtatcgtctcttattagatgctctgggcatggaattgtgtgcaaacagtttgacttctgtagagatgtgggtcctcggcaaactgtatatgactctgcctcctctgtatttctctgtctttttaatgcctcctttacagatgaacatagctatctgtcttggagttttcgacctctgttgaaaaggaaaactatgtttttgagtcgacttgttttttcaataaatattgaacattcactatgcctggcttcctttagctgtgtgtaatacagcagtgaacaagtagtccctgcccctgaggacgcgacattctagtggggaggcagattgctgtcaacataagaattaagtacattttaatgttaggtggtgatgataaatgtcatggaaaaagtcgagcaaggtagggaggatggggtagttggaggtggggtgtggattgcaacagcagtggtcagggaggatctcacagagaaggcaacttttgagcagagacatgaaggaggggagtgagccatggggacaccaggggagtgttcaggcagagggaacagctagtgcaaagctcctatggatgaagcagaccagacttggtagagcagctaggaggccagtgtggctggagcagagtggccaagggggagggtaagcgatgggtgccagattgtgtgggctgtggggaggacttcggactttgacttttatgtgacctgactcaggtctcataacaggcttcctttggttgtctcgtgggggagtggagaaaggagagactgaaggcaggggctagagcagagactggggctggggctgctatgaagatgcaaatggcagacgatgttggctaggaccagggtgggggtca

SEQ ID NO: 1560874 - DNA, 4001 bp, Homo sapiens
accccccagaacccatgagtatggccctgtatataaacagggtctttgcatataaactagtcaaaatgaggttgtcgccaggtgcggtggctcatgcctataatcccagcgctttgagaggccaaggtgggaggattgcttgagctcaggagttcgagaccagcctgggtgacatggcaaaatccccatctctacaaaaacaaaaattagccaggtgtggtggtggggccttgtaggcccagccactccggagtcagaagtgggaggactgcttgagccaagggggttgaggctgcagtgagctgtgatcacgccactgcactccagcctcggaaacaaaagatcctgtctcaaaaataaagagggccgggtacggtggctcaagaccgtaatcccagcactttgggaggccgaggtgggaggatcacctgaggtcaggagttcgagagcagcctggccaatatggcgaaaccccgtctctactaaaaatacaaaaattagctgggcatggtggcgcgtgcctgtagtaccagctactcgggaggctgaggcaggagaatcacttgaacccgagagggggaagttacagggagccgagattgcaccactgcactccagcctgggcgacataccaagaccctgtctcaaaaaataagcaaataaaataataaagtgaagtaaaaaggggttgtcagggtgggccctaaattctgcttggcgtctgtgtagaaggggaaatgtgggcacagacgtgatgcaaggaggacaaggtgacgcttccacaagccaaggaacctggaggatactggccaccactaggaactgggagattcccctcggcctcagaaggattcggccccacccacaccttcatctaggatttctggcctccagaactgtagagaatgtttctgatatttaagccacctggcctgtggaattttgacagccactctgggcaaactagcagggactccatctttccccgcagaagggaatctcttaagacccaggagaacacccccctctcactcctcctacccccacctgggatttccagcccggggccatataacaatgctagacccatgctactcttggcagctggggaaacgctttgggtggggctggcccacctgccctgtaagtacagcctgggcccacagggaacaaagagcagagtctgggagggacccaagcttaagtggactcggcaggtgggaagggtggtgcccgccaggagaacttgaccttgagctgcccgtggacaatgcactcttgtgtttgaggagggtggcgccaggctggggacacagaggagaccttgggcgcccggggaggggaaagtgcggcgctgcgggtgccccgggctgcgggaagcgccgctggcttccctagccccactcactgatggagaaggtgccgggctcttcccggacgactctgcagcgctccagcagcagggctccgacgggctggaggagacacgggcgccgggacggggcagtgagcacccggcctccgaggggcccagcctgggacccgcccgcgcgcccgggacgcccctacctcggcctcgtctgtccgaaagtagaagaggaaattcaccaccagcttcaccagccgccgcttcagcactgcgggcacagcgcgcactcaggggcgcaggcagcccccgcccggaccccggcctcccgtccccggcgccccgacccggactccggcctccggcacccccgcccagaccccggccccggcctcccgcccctggcactgtctcggtctcccgggtcccgctcaccgctgcccttcttggggcccctcatgcccagctcggccgccatctcggccggctgccgggacagagcctgcagctccttctcgttgtaccgcatggctccgcggggaacgggaacccgggccgcgccctcccggccgccgtccccgctcaggctggggccggcgccaaaaatgtctcagggcgcagacacggaagcacccccagggctagtgcgcctgcgcaccttgggccagccatgccgcccgcctccgctgcgtggcgctggcgacccgtggctgctggcgtgggcggggtaccggttggtaggagagacggaccgttgttacataaccattaaactgaaataaaccggaccaaggtggaacagaatcaaggcaccccagcgatggctggcacccctttctagagcggccaggcgcaggcggagggagcgataacgtcgcccggagagtgtcagccgctccctcgcgaaagttggccccgtgcggccgcagcggaccgagggttcgttgagagcgttgtgcgcacgcgcagtttgccttccaggccgcgctttcagcctctccccctccagccttttccttcgcgcctcgggaccctctgactcacgccgctgggcgggccaggcatgcgcacaccagagggcccgtctcatttgccccggaagtgctttctttgcccgccgttcgccaaacgaagtcgtggaggtggcgaaacgaggaggagataacgcggccttgggctctggtgaggagtagaggcggttgagggcggcggccgacgcggaccgggggttccctgggggacagcggacgtaggagagaggcgcttgcgacaggccgcgggccgagggtggggcggcggcgtcgctcccctccctcctcccgtgagcgtccggccttgtgcatcctgaggccccgcgctgggcgggcctggagggtcgggcccgccaggaactctatttccaaactcctgttgggaggccgcgcgcggggcctcacgcctgtaatctcactgctcagggaggccttggcgggaggatcgcttgaggccaggagttcgagaccagcctggacaacacaccgagacccccatctctacaaaaaattttaaaaaattagccaggagtggtggttgtacctgtaggcccagctactcgagaggatcgcttgagctcggaatgtcgaggctgcagtgagccatgatcccaccactgcactccagcctgggcaacatagcgagaccccatcactgcaaaaaaaaaaaaaaaaaaaattagccgggcgtggttggtgacgcgcgcctgtagtcccagctactctggaggctgaagcgggaagatcgcttgagtccaggaggtcgaggctgcagtgagttgtgattgtgccgttgcactccagcctggacaacagagcaagaccctgtttgacaaaataaaaaagaaacaaccaagattcgttggggtcgaatcgggatcgcggctgaaatggtttcggccgccttccttgtagccgagaacgcttctgtatgctcatctatacctgttagttgactggggctctgtgatgtaattcctgtgagcctcagttcccttaaaatgggagtgacggcttcaacatcatgccaaaggcgaccagaacacgttagctggccccattttgcaggtgcaccccgctgtgaccgttgttcttgtgtatccttggacgacaccaaacagccaggcggagctctggaaaataggttgttggctaggttaaggagagaacggtgttgccacgaaaaactaattccttctcaatggtctagtcccaggtcccagaggccacttttcctcaattcttaagctcatttcccctggtcgtcatcggttttttgtttgttttgagacagggtcttgctctgtcacccaggctggagtgagtgcagtggtgcaatcacagcttactccagcctcaaactcccatgctcaagccatcctcctgcctcaacctctcgagtagctgggatcacaggtgctcaccaccatgtccggcgaatttttgtattttttgtagagacgaggtttcgccatgttgcccaggctggtctcgaactcctgaccaggtgatccacctgccacggcctcccaaagtggtaggattacaggcatgagccactgcacccggctaatttttgtattttttgtagagatggggtttta

SEQ ID NO: 1560875 - DNA, 4001 bp, Homo sapiens
ccacaaagatgtgttcatgtcctgaccccccagaacccatgagtatggccctgtatataaacagggtctttgcatataaactagtcaaaatgaggttgtcgccaggtgcggtggctcatgcctataatcccagcgctttgagaggccaaggtgggaggattgcttgagctcaggagttcgagaccagcctgggtgacatggcaaaatccccatctctacaaaaacaaaaattagccaggtgtggtggtggggccttgtaggcccagccactccggagtcagaagtgggaggactgcttgagccaagggggttgaggctgcagtgagctgtgatcacgccactgcactccagcctcggaaacaaaagatcctgtctcaaaaataaagagggccgggtacggtggctcaagaccgtaatcccagcactttgggaggccgaggtgggaggatcacctgaggtcaggagttcgagagcagcctggccaatatggcgaaaccccgtctctactaaaaatacaaaaattagctgggcatggtggcgcgtgcctgtagtaccagctactcgggaggctgaggcaggagaatcacttgaacccgagagggggaagttacagggagccgagattgcaccactgcactccagcctgggcgacataccaagaccctgtctcaaaaaataagcaaataaaataataaagtgaagtaaaaaggggttgtcagggtgggccctaaattctgcttggcgtctgtgtagaaggggaaatgtgggcacagacgtgatgcaaggaggacaaggtgacgcttccacaagccaaggaacctggaggatactggccaccactaggaactgggagattcccctcggcctcagaaggattcggccccacccacaccttcatctaggatttctggcctccagaactgtagagaatgtttctgatatttaagccacctggcctgtggaattttgacagccactctgggcaaactagcagggactccatctttccccgcagaagggaatctcttaagacccaggagaacacccccctctcactcctcctacccccacctgggatttccagcccggggccatataacaatgctagacccatgctactcttggcagctggggaaacgctttgggtggggctggcccacctgccctgtaagtacagcctgggcccacagggaacaaagagcagagtctgggagggacccaagcttaagtggactcggcaggtgggaagggtggtgcccgccaggagaacttgaccttgagctgcccgtggacaatgcactcttgtgtttgaggagggtggcgccaggctggggacacagaggagaccttgggcgcccggggaggggaaagtgcggcgctgcgggtgccccgggctgcgggaagcgccgctggcttccctagccccactcactgatggagaaggtgccgggctcttcccggacgactctgcagcgctccagcagcagggctccgacgggctggaggagacacgggcgccgggacggggcagtgagcacccggcctccgaggggcccagcctgggacccgcccgcgcgcccgggacgcccctacctcggcctcgtctgtccgaaagtagaagaggaaattcaccaccagcttcaccagccgccgcttcagcactgcgggcacagcgcgcactcaggggcgcaggcagcccccgcccggaccccggcctcccgtccccggcgccccgacccggactccggcctccggcacccccgcccagaccccggccccggcctcccgcccctggcactgtctcggtctcccgggtcccgctcaccgctgcccttcttggggcccctcatgcccagctcggccgccatctcggccggctgccgggacagagcctgcagctccttctcgttgtaccgcatggctccgcggggaacgggaacccgggccgcgccctcccggccgccgtccccgctcaggctggggccggcgccaaaaatgtctcagggcgcagacacggaagcacccccagggctagtgcgcctgcgcaccttgggccagccatgccgcccgcctccgctgcgtggcgctggcgacccgtggctgctggcgtgggcggggtaccggttggtaggagagacggaccgttgttacataaccattaaactgaaataaaccggaccaaggtggaacagaatcaaggcaccccagcgatggctggcacccctttctagagcggccaggcgcaggcggagggagcgataacgtcgcccggagagtgtcagccgctccctcgcgaaagttggccccgtgcggccgcagcggaccgagggttcgttgagagcgttgtgcgcacgcgcagtttgccttccaggccgcgctttcagcctctccccctccagccttttccttcgcgcctcgggaccctctgactcacgccgctgggcgggccaggcatgcgcacaccagagggcccgtctcatttgccccggaagtgctttctttgcccgccgttcgccaaacgaagtcgtggaggtggcgaaacgaggaggagataacgcggccttgggctctggtgaggagtagaggcggttgagggcggcggccgacgcggaccgggggttccctgggggacagcggacgtaggagagaggcgcttgcgacaggccgcgggccgagggtggggcggcggcgtcgctcccctccctcctcccgtgagcgtccggccttgtgcatcctgaggccccgcgctgggcgggcctggagggtcgggcccgccaggaactctatttccaaactcctgttgggaggccgcgcgcggggcctcacgcctgtaatctcactgctcagggaggccttggcgggaggatcgcttgaggccaggagttcgagaccagcctggacaacacaccgagacccccatctctacaaaaaattttaaaaaattagccaggagtggtggttgtacctgtaggcccagctactcgagaggatcgcttgagctcggaatgtcgaggctgcagtgagccatgatcccaccactgcactccagcctgggcaacatagcgagaccccatcactgcaaaaaaaaaaaaaaaaaaaattagccgggcgtggttggtgacgcgcgcctgtagtcccagctactctggaggctgaagcgggaagatcgcttgagtccaggaggtcgaggctgcagtgagttgtgattgtgccgttgcactccagcctggacaacagagcaagaccctgtttgacaaaataaaaaagaaacaaccaagattcgttggggtcgaatcgggatcgcggctgaaatggtttcggccgccttccttgtagccgagaacgcttctgtatgctcatctatacctgttagttgactggggctctgtgatgtaattcctgtgagcctcagttcccttaaaatgggagtgacggcttcaacatcatgccaaaggcgaccagaacacgttagctggccccattttgcaggtgcaccccgctgtgaccgttgttcttgtgtatccttggacgacaccaaacagccaggcggagctctggaaaataggttgttggctaggttaaggagagaacggtgttgccacgaaaaactaattccttctcaatggtctagtcccaggtcccagaggccacttttcctcaattcttaagctcatttcccctggtcgtcatcggttttttgtttgttttgagacagggtcttgctctgtcacccaggctggagtgagtgcagtggtgcaatcacagcttactccagcctcaaactcccatgctcaagccatcctcctgcctcaacctctcgagtagctgggatcacaggtgctcaccaccatgtccggcgaatttttgtattttttgtagagacgaggtttcgccatgttgcccaggctggtctcgaactcctgaccaggtgatccacctgccacggcctcccaaagtggtaggattacaggcatgagccactgcacccggctaatttttgt

SEQ ID NO: 1560876 - DNA, 4001 bp, Homo sapiens
gctggagtgcagtggcgcgatctcagctcactgcaagctctgcctccccggttcacgccattctcctgcctcagcctcccgagtagctgggaccacaggcgcccgccaccacgcctggctaattgtttgtatttttagtagagatgggatttcaccatgttagccaggatcgtctcgatctcctgacctcatgatccgcccgcctcggcctccgaaaatgctgggattacaggcgtgagccaccatgcccggcctttttttttttttgagacagagtcttgctctgtcgcccaggctggaatgcagtggcgtgatctcagttcagtgtaacctccatctcccaggttcaagcgattctcctgcctcagcctccagagtatctgggaatacaggtgcccgccaccacgtccggctaatttttatatttttagtagaggtggggtttcaccatgttggccaggctgttctccaactcctgacctcaaatgatccgcccacctcagcctcccaaagtgctgggattataggcgtgagtcatcctgcccagcccagaatgggttctaatcccagcttggcaactcactaggaataggagtttgggaaggcagcatcccctaggagtcttgcttgccacatctgtgaaatgtgtataagtgtttcacaagagcctggagtccctgtggactggaggagacgctgctccggggaagctcagatccgtgcccggcacatagtaagtgctccataaactatctcaccgcactctggcttccacggacaaaggggtaaagccagccaggaaccagcttcctgctaggtacaaaagtcccccaactgggaagtcaggtgagaagacatacctacctcccagtgatcattgcctaaatctgtgcttctcctcacctcctttggagcctgagctcacctgggcagggggccaggtaggcaggcatcaaactcctggcctcgaccgattctcaagtcccacttaggactcaggcagcttcctcccgtcccctctgtccaccatgacttcctggaactggtttaagcaagggtggccatggcagatgtcaacaccctatgaaacccctgggggtcagtgacctgccttgccgctggctccagaaggggagctccaggccagacccagccatccagcaacttcagagcatgctaagactggacttccaaaattccaagggccccaggtcccactgccaggcctagccgggacaagaaccccaaagcagttaacggataggccttcctacttttaagccacctcgtcgccacgcccacccgagggaagtgggcaggctttgcccaagacctccccagaatcagttgggggcgccaggagctggggcaacccccacccccacccgtggcaaaaccatctgtaggggagggggctttgcggtggcggggggtgtctctgaaaaccccagaagggagggcggagattctgcccgcaggaggaaacttgcctgcaaatggcgtttccaaaagcaaactgttcaaaatttagagaaaacctggtgggcggggggcggtatttagcccacccccttcaatatcaccccttctacggggctctttcgcccctcaaaagtcccaggaagtgagaagagggtttcaaagtctgagcttcgttgcagaagttggatttttctggggggaggggtgaccagcctgggctgaagacccctccccaggccgcagagtccagcaaatcccaccccgagaaaggccctccccgacccctccggcccctggggtgccccaggactccatggacaccgccccccagctcaactgagacgcccccgccactcaccgcggtcaaccggacgtcccaggaacagctgccgcgacttcaaaaccagcttggaaaccgtccgggccgaggcgggggtggcttttactgcgtggtaggttgggggcgcactggagtgacgggcgaggggaccaatcaggttgagggattgcccgcgccaggcccgcccctctcctccctgccccgcctccactaggccccgcccctcgccaagtcatgaagtccgggaaggactccacgccctgcccctgaaggggagggagcactcttggaccacgcctgtcccagccacgggacccccgctccgcagctggggaccctgtgaagttggccctgggaggtgagtgcgatcgggggcgccgcacaggtgctgggattccccaggtcgcccatttcccctatggccaaactgaggctgcgagaaccctgggagagttgcagggtgaccctcgccagcgcgtcaggggccacgccctccaccatgggctccgactcagctatatgtacacacacacacacacacacacacacacactttttttttttttttgagacacagtctcgctctgtcgctaaggctggagtgcagtgacgcgaccttggctcactgcagcctccacctcctggattcaagcgattctcctgcctcagcctcctgagtagctgggattacagacacgtgccaccacgcccggctaattttttgtatttttagcagagacggggtttcaccatgttggtcttgaactcctgacctcaagtgatctgcccgcttgggcctcccaaattgctgggatcacaggtatgagccaccgcacccggcccaacccagctatatgagtgacttgaaccaccacgggaacttgtccagcctccggcctgatctgcccaacatcagaccacttcatcctcccagcactgtattgtctttttaatcatccctattttgcagagaaggaaactgaggcctggagagggtcagccaggggcaatggaggggtcaggctccaggctctgtgactgctggatcaaccttttcctgaagctgcccccacttggattttaccccgcccctctccacctcccaaattatttatcctcttggtctataaaccaaggtctcaatctcagatggtccagggaggaggtgaatatttctgctgaggaggtggcagtgatgccctgcttagaggggcaggggagagcagtgccctatgggagacccacctggagagtcacagatccacaggaagttcaagctgtagacatgtcctgcctgttagggaacaattggaccaaatgaaacccaactggggctttgtccagcccaggggccaccagtttgccacctctgccaaattatttgaatagaatgaagcttctggtagctttagaaagaacatgggaaaaattgggtgtctgtgactgcatttttttgggggggtgagtggggacagggtctatgctagcactgtccaatagaactttctgcaattctagaattgtgtgccatccaacattgtagccaaaagcaccacgtggctaatgcacagtgagaagctgaatgtttaaattttttttttttttttgaggcagagtctcgctctgtctcccaggctggagtgcaatggcgcgatctcgactcactacaacctccacctcccgggttcaagcggttctcctgcctcagcctcccaagtagctgggattacaggcgcgcgccaccacacccagctaatttttgtatttttagtagagacgaggactaaccatattggccaggctggtctcgaactcctggcctcaagtgatccacctgcctcggcctcctaaagtgctgggattacaggtgtgagctaccgcgcttggcctgaatgtttaaatttaagtaacttcaggcagctagtgagattctcaagtgaatctgagaccccattccatgacatttgtaacaggctttttccttctcattcactcattcaaccatatttattgagtccttgcgctggggacagcggtgagctaaacagataagaattccagccctggtgacacacactacccagtgggagagacgaacaaggaacaacataagtgagagaactttacaatgtgtcacgtggtaggacagcaaaggacgagatgaatgtgggggatgcgg

SEQ ID NO: 1560877 - DNA, 4001 bp, Homo sapiens
tgctcggcaccctgcagtgcccaggatggccccaccccagagaatgatccaaccccaaatatccacagtactgaggttgagaagcccggaaattgtattctcagaacacatctcccagctttggctcaggtgggcaccttgggccctgtagttggagagacccaggttcaagtcccagctttttaccctctcctgctcccgacactcgctgtgtggccttaggcaagccacatgccctctctgagctaatatcctcatctggaaaatgctgattaaaacagatcctcttgccaggcgcagtggctaatgcctgtaatcccagcactttgggaggctgaggtgggtggatcacttgaggtcaggagttggagaccagcctggtgaaaccaacatggtgaaaccccgtatctactaaaaatacaaaaattagctgggcatggcggtgagcacttgtagtcccagctactcaggaggttgaggcaggagaatcgcttgaacctgggaggcagaggttgcagtgaactgagattgtgccactgcactccagcctgggtgaaacagcaaaactgcatctcaaaaaataaaagtagaagaaataaagtgcttacgctgctgtcgctttggtctcatcttgccaggcacagccctgtgtagactggaaccttacgtgattagagtggggtagcactgcacccatttcacagatgtggaaatagaggctcagaggggaagctccgcctgggatccccaggctgtctgccttccctcaggcccacagcagccccccagatagcaggaactgaaatgtcccaggagggagcagccccccagatagcaggaactgaaatgtcgcaggagggggcacccccagggctcctgccacatcagaccctgccctgcacatcctctcaccttttccgaaggttgcagctccttctccgtccatggggccgtctgctctgggtgggcagccactgtggggacaggggccggtcagggagagtgagggatgcagttagaaccatctacccggctgcccattgcacaatagccaggcacagcctaaaaggtcaggaatgtttcagctaccccgccagggacagcaggaggtgacatccacggctaccagccagacctggtcaccccccaaccccgctgggggctccccccaagcccagggccgctgttccctgaagtagggctctgtggaacttcctctgctgggtggacacccaccctgagtcccggggttcatatagcctggcatgggggaacagccccttgcccagcccgccccgcccccaccgcagctgcctgctgcctattgccaggccaaggcatgtggagcagaagtcagctgcctggggctctgggcccagagggaggcccagctcaggcggctgccccaaccctgggttccctgtcaccgtccctgatcgcccaagctgagccacaggaggctggggagcccctgggctgtgtgaccccaggggagctgttgctcctccctgggagtctggatctcactctgatgagctcagatgggcagagcacccagcctgggccatggtgcatcagaaacggagtgcagggtgggggaacggccgagggactgagtgggggggcattgcagggagacaggctgggttgaaagccaccttcggccactcaccccccatatttatgcctcagtttccccatccaccacaagatgtcctagtgtctgatgagagcacacagacaaatatggaggactccccaaatggctggaagtccctgcccggggagctccttctcccaggtccatgtgtagagtccccccacgcccccagctgggccagccactcaccctgagcctgtggttgggcagcctcggcagcaggcgctcctgtggggtcagcggccggccgggctctcgccgagctatgtgcgttggccaccaggttccgggcagagctgaagccaggcagggacccaaagaagctgcccagggtctgcatgggggcggggggtgtgcaggatgagcaggccaagcctcggcaggaacgggtcagaggaagcatcgattgatcagcccaatgccgccccggccccttgctcctgggtgacctcaggaaagtgtttcagccactcagcctcaatttccacacctgggcaatgggcagactcagcctgcctcccatgcacagaggaaaagatcgtctacccgatctccaaagaccttttccttccaggatccccactgcacagatggggaaactgaggctcagagaggggcggagctgaggccggcccaaggtcacttgctggggaaggtgtcgaggtctgcgtgggtcccccgcctccagcttgggtcagaaaggaagggattggcatcatggctcccagaccgcccccaccagcccaccagggaagcacctctccagattcgagaccccaggactgtggaggtcaccttccccggctctggggcatctccaggccccagcaagaatctgccccatttcccctctttaccttgcccttcggtttggggggatcccgtctcccttcgtctggagcagacatagtgagaacgtgagaagctggaagggggcagagaaggtgcgtgaatgggggttccctagcctcccatcccacacccactccccactgaaagcctgagcagcccgacacccacctgcaggcctggcctcaccctggtgtcaccgaagcagacgcggccccgctcacctggactgcgcggggtcccctggaggacggaccggcccggctggcagctggctctaccctcagctccctggccttatagggtccggggcaggcgcaggcccagccagcagcggcaggcggccaatgggcccgggggaggtggcctggacggtcacatggctacctgcccagcccagcatgggcccaggcccagcacctttcccctgtttcctgcccacagcttgcatcaggctgagtggctcacaggccagatgggctcccctcccgggcccctgagcctccagttccatccacgaggtgggtgtagttcaaatctctgctgcaccaggatgccttggccagttaccatctttttgcttcaggtttctctctcgtactccgcaccacgtcccgtaacatccagcttcttctctgctctcatctcccccagcttcctccttcgcttgcttcatcccagccacacaggcctcctcgctatgcctccagcgcacctggcacggtcctgccttagggcctctgcacgggctgtgccctctgcctggaacaccttccctgcaggttcccacagggcaccctcttccgcccacagaacagtgcctggcatacatttggcgcttaatacacgtttggctcaatggagcaacacagagagtggttgtgagcctctgtgagatgaggtcatgcactgaacaaatgctgccttcgcgttacccaggcagaagcggggtctcggggtctcggcaaggagcagggggtgtcctcagtgtggaggggagcccatcactctccggaagggacttgggccaaaacgcagaccaagatggagcaccagccaagctgggggcaccctaggagtggaaacccagcctggggggcttgggccaacccagggaggctccctggaggaggcgtcctgttccagaagtggtgaggatgggattcaaacccagaccctcctgttccaggaagtggtgaggacgggattcaaacccagacccaggaccttcgtgctgagcccagcctatgtgctgggctgtctgtgggtgggtgggcagaggaatggccgtaacgcccaccctgggctgtgtccccctcctacctgcccctgagacagggttcctagccctgtgttattgggggtgagagggcagaccccatgggtggctctgggcactgggctgggaggagggagggtacagccacaggatctgatgattcccaggccgtctgtctccttggagccgacactgtgtttgccaaacagtggg

SEQ ID NO: 1560878 - DNA, 4001 bp, Homo sapiens
gcggttctcctgcctcaggctcccgagtagctgggaatacaggcacccgccaccacacccggctaattcttgtatttttagtagagacagggtttcaccaagttagccaggctggtctcgaactcctgacctcagttgatctgcccgcttggcctcccaaagtgctgggattacaggcgtctgagccaccgcacccagcctgacctgtgcagttcaaacccatgttgttgaagggtccactgcgatctgtctgctcgagggaggagatgttagagtctgggggttcagagcactgcccctggagcacagtggcctctgttcacttctggttcagctgcctgcaagttgtgtgaacttgggcaagccactgaactgttcggtgcctttgtttccccatctatgaaatgggttactagggttgtgatgggtgttcaaggagccaatatacatgaaacggttggaactgtgactgatacagtgattgctgctcttactattgttgttactgagggcgccatgatggtggacgtggagacagaaggatacaggtggagacccagggatcaaaggagagggaaagggttgggtaggggccacagaagccagctgggtgtctttgagagacactcccctcccagggcctcattaagcccccactaggaaatagaccatcccctccatggaccaaaatattttatgactcaggttttcccagcaaggagaggagtggggcgggatacctggcctgaaacgctcctagaagggactgtcccacacaataccttctgtccctgctccatgggaggggcagccctcacctgctggtcctgctcccacacactggatctggggatctgagccgcctcttcttcagacatcgtgctgcaaacagggtcaccctgcggggcaggattgagtaaggggagcacctgcccaggcatcagatcctgtcaaattgggctctgtgacttgagcaactctcaaacctcttggggcctcagtttcttcatctgcataatggggcattctgtggagctcagacaatgcatgtccagagctctgtacacagagggtgtccaataatgagcctctggcaaggtagggttgccggagtgactcgaagcatggtctctgaggtgagaaagacctgggttcaaatgctaccattaattgcggtgttatttttattatttttttaaagacagaatctctctcgcccaggctggagagcagtggcgccatcccagctcactgcaatttccgcctcccaggttcaagtgattctcctgcttcagcctcccagttagctgggattacccacgtgccaccatgctcggctaatttttgtatttttagtagaaaccgggtttcgccatgttgcccaggctggtctcaaactcctgggctcaagtgatctgcccacctcggcctcccaaagtgctgggattacaggcatgagacactgcacctggccagctgtgtgatttttggcaagcaccttcacctctctgggctgcttcctgttttgtaagatgtgggaggtccctgctacccctgcggcccctgcctgggcccagaactgcccaagcaccctagacggctggaggtggtagctgctgggtcccagtccactcacagctcatttgacagacagggcaactgaggtacgcagcaggtccatgctggtcccaaggtcacgcagccagctagagttacagggggggagctcgacctcgggcctcagacctgccgcctgcgatccctccggttgccaccccgcgtcctctgaggcctggtcctcgcccaactgggtcctgagctggggccaaccgggccaagggtcccagccacctgctctggccggtcatacccgtcccacgccgccggaccttcgcccaaccaccctatctggagctcctctcctaagcccgggggggcgctcccggacgccgccctcagggcactcacctgggcgcgagcggcttcagacaccagctgtctccgccgaccccaggctcgagtctccacacccccgccggtcccgcccgcccttcttatagctgctcgcgcagtgggggcctccggaactgaccaatggggagaggccgtgcgggggcgtgcccagggggcgtggctccaggcttccctcgccctctccttgagctggcccagtgccctacggttgccatagtaattcgggagcgctagattcaaaagattgagctattatacgttcccggaccaagtttggccacctgtcatcctcactgctgttgccatagagacagtccatgcgatcacagcccccatagccctgctgagtgaccttggccaactcgctgatgacttttcttattaattattattatttatcgatttttgagactgggtcttgctcggttgcccagggctagagtgcagtggtgtgatcatagctcactgcagccttgccctcccaggctgaggtgatcctcccgcctcagtctcctaagtagctgggaccacaggcacacaccaccacccccagctaactttttaaactttttgtagagacgagatgtccctgtgttgaccaggcttgtcttcaacccctgagccccaagtgatccttccacctcagccttccaaattgctgggattacaggtgtgagccattgcacccagcctctttttatttcttaatctgccccttaactaagccagaagccaggccttccctttccctaggatccccatttcacagatgagcaagctgaggctcagagatcataaaacacttgccccgcataccacagcaagtgagggatcctattccttttttttctttttttttttttgagacagagtctgactctgtcgcccaggctggagtgcagtggcgcgatcttgacacactgcaacctccgccccctgggttcaagtgattctcctgcctcggcctccggagtagctgggattacaggcgcctgccaccacacctagctaatttttgtatttttagtagagacggggtgtcaccatattcgtcaggctggtcttggactcctgacctcgtgatttgcctgccttggcctcccaaagtactaggattacaggcatgagccaccgtgcccggccagggatcctattcaaacccagccctgctggacctcagaaccctgccttttcattgccttgcctggaatgaccacagatgtaggcatggtctttttatttttatttttatttttgagacacagtttcactctgtcgcccagcctggagtgcagtggcgtgatcttggctcactgcaacctccgcctcccaggttcaagtgattctcctgcctgaccctcccaagtagctggtattacaggcacgtgccactgtgcctggctaatttttgtatttttagtagagacagggttttgccatgttggccagtctggtctcgaactcctgacctccggtgatctgcctgcctcagcctcccaaagtgtttggattacaggcatgagccacggcgccaggctgcatggtcattttttagggagctgggaaaactggacatgcccccaagccccagggtcttccaaatccgattgcagcccccacatggccaatgctgtatcagcaggtgggcccgggaccctgctcatcccttcagccccatcctgcccctgcaaccttgcccgggggcaggtgcccccttcgatgatctcaggtcagcatgacaaatcgtttggagacctgggcaatctggtttaacttaaaccttctcctaggacacaagccctggcagaaatccactggtaaaatgacacccgggcaacagtcaaggttttatttccagttaggtcccaggatgggggaagggagaggagaagtcacaggccattgatcccaactgtcatcccctagggagaccatatcccacaccccagggcctgggccatgcctcttttcctccttcaccctggagtcctgggaagttgatttgagaagatgctaggaacacaatg

SEQ ID NO: 1560879 - DNA, 4001 bp, Homo sapiens
cgcaggtgaccacaggtaggcacaggggcatgctggtgggtacaggtgggcatgggtgagtccaagggggccaagaagaagcaaacacattctgatgggcccaggcggtcacaggtgagtctgagacgggcctgatgagcacagcgtaagctgggcccaggtggatcaagagagcctgggtgtgcccaggtgagtaaaggatggacacaattggccctacgtaggcgtaagaagcgctggcgaatggacagcagagggcacacaggatggtacggggggcagcggcgaggtgcagatggacacggggtggacagagacgggcacagctgacatgaatcctgccctctccccgcccctgggcacctggcggctgcagtactccagcaccatgtacacgtggtcgcggtcagcaaagtgtccgtggaaagccacgatgttgcggggtcgcaggcggctatgcagggcaatctcacgctccacctgcaggcacggccccgacatgtacccgcctgcagcggggcacaggctgcaggatgctcgcctgcctcctgtacgatctcatggccacccagggctgggaccaaagggcagggccttcttcgggacacgctgcgggctgcggactgtgggccctggggaccgatggggacacgcacctttccctgcgggcgaagccacccggccccagccccgccacacggcaccaccttgagggcgaacacggcgctggtggacatgtctgtcagcttgtagcagcggctgaaggcgccctgtggggaggggtcagcagatcagtgggcaggtgtgcacgggtgtgcaagctggcagcgcgtacagaggcacagggcagccagggacgcaggcgcgtccaggtctctccacacacacaccggggaaaaaacaacacacagctcccaccctcccgcctggacacacaagacatgatgcacacaagaaggcacagagacacagacacagacacatccacgcctggtgcatagaggccacggaccagaagacagcaccggatgcacaacaccacgcctgaatacgacacacaaacacgcaacgcccagacacagagtcaccatgcatggacacacaacacaacacccagatacacaacgcagcaacacacaaacacatgaatatacaatgtctggacacacagtcaccacgtgtggacacacaacacaatacccagacacagcacaggaacacacaaacacatgaacacacaacacctggacacacagtacaacacatggacaaagacacagatacaaacacatgaacacacaactcctagacacaccacatatgaacacacaaacacacaagcacaccacatgaacacacaacacccagacacacaacacaatgactggacacacaaaggcatgacgcacaaacaacaggtgaacaagcaacacaacacccagacacacacacacacacacacacacacacacacgaacaccgcacagcacccagacacttggaagcagcgggcacagacgcggcacactcagaccctcgccaggctcgcacacacacccaggggcaacacagcgtcgcatcccgaggccgagccgcacgcccacaccccggacacgcaacccacggacacgacgcacagcgcgctcaacacggttcccgccatgcgaaaccccgcacgggaggccccgcggctccggacgcgcgcccgctccagaccccgcgctcgcagggacgcgccgcgtagaccgcgcaggatcgcccgcgcgccccgggaccccagcccagcccggtccggccccgtcgcggactcggggcgcgggcctcccaccttgccgatcagcttcccgcgcctgtacacgcggcccgagcccgggtctcgcaggaaggcggcgaccagggggcgactcctgcgccgccgccgcggccggggctccatcgcgcggactctggcgcagccgggccgagaccaccgcgctgcggccgctccggggccgctctgagggcgcaggagccgccggggagcgttttattggccgcgggggcggggagggggcggagcccgggcgcaggtccagcccggggaggggcgggaggtgcccggccgtggagtggggggcgcgtgagcggcggggacgccgcggctggggaagttccacggaccagagcgcgcccgagtcccgcacgccaaccgggcgccaggggccgcgctcagcccgcgagctcctccgaccctgcacacccgggctggctgggaaccgctgatacgcccgctttaccgagcgggaaactgaggctctctcgcgcgtggggggttgggggcttccgggggcttctcccccacagtgcgcttgaggtatgagcctcgacgttctgaatgtgtgccatttcgggtcctccctgctggcgggtccctggggcccacatgaaaacctggggcttgatggccctgggcactggggagccacagcagaattcggagcggcagagaagcccagcgtttgtgatgctggggctggtggggagggcggtgaggcctgggacagggacccaggaggcaggaccggggcttggggacgcatgggctggggtcctacagtgtagtggatgtcccatatgagggagcttcagcccggagaagggatgggctgtgtggagcagcaggtggaccctggctggggtttgcacggacagccaggtggggacgtccttgaaatggcgacctcagagagcatcagaaacctcagagaactcagagaacagctgggtgggaagacagtggggggcttgagactcccccggaatcgtgggggtggttgctccaagccctgccccagactcaggtgcacccctttcctggtgaggtcttccctcacccttccacccagcctgggacacaaaaacgggccttgtccccattgtacaggcaagacattgagacccagggacgcaaagtcgctcagtcagcccaggaaagggcagcgctgggtttgaatcccggcagccgcccctggacgcctgcggtattaatccccaaatgttacataacaccaggaatggggaggggttaccaggctccgtggggctggaattttccagggaccagatttcggaatctggcccggccacaccactagggacaggaaacaccttctgagccgtcacgtgtccacctggtgtcacgaatggggcccccgtgcattggacggggctgagctcgggcacctttgcggggtttctggtcccagggccagggcggaagattcctggccagcctggggccaccgggttgcagctggggagcccaagtcccctgctgatgagaatcaggtgaggtggctgcaaggtgggctgctcggggcccgagtgtctgagctgtcacacgactgtcaccctggaatcctccaggggcagaaagccagttccttgcttttttttttgtttgtttgtttttttgaaagagagtcttgctctgtcacccgggctggagtgccgtggtgtgatcttggctcactgcaacctccatctcccgagttcaagcaattctcctgcctcagcctcccaagtagctgggactacaggtatgcaccaccacacccagctgatgtatttatttatttgtatttttagtagagacgggtttcaccatgttggtcaggctggtctcaaactcctgacctcaaatgacccgcctgcctcggcctcccaaaatgctgggatgacaggcgtgagccaccaggcctggcttccggttccttcctgatagcaccagtccatcctggcatcagttcaggcatttgttaagcacttactgcatatgggcctgtgtcaggctgtgcgagcccaaggcagacccagccctgtcctcgtaaaaggaccactgcttaacggactgcaagaacgtccaagacttcaccaagtcaggggtcaaggaaagctttggaggtggaaggaagtgagccaggcccgttctgggcagtaacttgtccctgaggcaggtgctg

SEQ ID NO: 1560880 - DNA, 4001 bp, Homo sapiens
tgcatagtaagttatgggctcaggactgccaattaacacacaggaggagaattaaacttggattccaaaaagacaatgaatattattttcaaaattatatctcaaatattgcatggaatatacttacagtttaaaaaaaatgttgctggctgggaatggtggctcatgcctgtaatctcagcactttaggagggtgagcctaggagttcaagaccagcctcagcagcatagtgagattctgtctctaaaaaaaagttagccagggcaccaggtcagggcacggtggctcatgcctgtaatcccagcactatgggaggccgaggtgggtggctcacttgaggtcaggagtttgagaccagcctggcaaacatggtgaaaccccgtctctactaaaaatacaaaaattagctggcatggttgcacacgcctgtaatcccagctactcaggaggctgaggcaggagaatcacttgaacctgggaggtggaggttgcagtgaggcgagattgtgccactgcacttcagcctgggtgacagagcgagactccgtctcaaaaaaaaaaaaaaaaattgccaggtgtggtggtgcccacctgtaatctcagcactttgggaggtccaggagggaggattgtttgagcccaggagttcaagaccagcctgatcaacatagcgagaccccacgtctactaaaaataaaaaatgacctgggcatagtggcatgtccatagtgccagctactcaaaaggctgaggcaggaggattgctggagcccaggatgtcaaggcttcagtgagctatgctcacatcactgtgctccagcctgggtgacagagtgagaccctgcctccaaaaaaaagaaaagaaataaaaaaaatttagctggacgcagtgccccacacctgtaatcccagcagtttgggaggctggggtgagaggattgcttgagcccaggagttcgagactagcctgggcaacatagtgagacctcatctctgctaaatataaacatattagctgggtgtggtggtgcacgcctgtagtcccagctactcaggaggctgaggcaagaggatcacttgagtccaggagattgaggttgcagtgagctgtgatagcaattgcactccatccagcccaggatacacatggagaccctgtctcttaaggaaaaaaaaaaaatctatcggccgggtgcagtggctcacgcttgtaatcccaacaatttgggaggccaaggcaggcgtatcacttgaggtcaggagtttgagaccagcctggccaacatggtgaaaccccatctctactaaaaatacaaaaatgagccggttatgatggcacatgcctgtaatcccagctactcgggaggctgaggcaggagaatcactccaacccaggaggcagaggttgcagtgagccgagattgcaccactgcactccagcctgggagacggagcgagactctgtctcataagaaaagagagcattggtcctgtgatcgtccccctctcttggatgaggaaactcaggctcagagaggtgagggggcttgctcagggtccccagggcgagtgtcctgcccacagccttacccggtcaccctggcactggcggaagctggcattgatgcggtccaggtcgcggcgagcattcagccacatctgcatgatggcatccttggcgcgggtggtgaagttgagctccttggtcaagttggactgggaggccgtgagccctaggagctgactgtataggccctcggctcggcgctcggtggcctgcaggttggactctgtgctcacgtgcacgttgccatagaccatgaagagcacgagccccaggatgatgaggaattggatgagggagacgaagaggaagaagtagcgcaggtaataccagcagccccgagagctgccccccgcccgagcgtaggaccctccgtgctccatggccagacccatttgctcgatcccgccgtccggtgcaccgtccctgctcaccaccaggcctgctctggcccccgcctcgcaggggggagtgcttatattactcctcttaatacttcctctgcctggctccttcctggcccggaggaaacgggggctgcgggttatcacaacactcccactctggctgtgagaaggcgggggtggggctgggggcccagagccagggcaccggctggacccctctgattaatgctgggtggggcgctggctggctggtcaggcattcctggcctcttcgagcctcgcgttcgcctttacttgctggcgggtgctgttctcagtacctgctgtgattaggtcgctgaatcatgccaggtctgttgctgtctcccttgtgtggcggaggaaactgaggcacagggaggagaaggggttgcctcggggtctcacgctgttagttcagcgaacttgacttacctcaagacaggctggctacagacgtgcacccacttcaccagggcggtgctgattaagtgccacaaaacgtgggaaatgtgccaggcacggtggctcacgcctataatcccagcactttgggaggctgaggcggacggatcacctgaggtcagaagtttgagaccaacccggtcaccgtggtgaaaccccccgtctctactaaaaatacaaaacttagccaggtgtggtggtgctcgcctgtaattccagctacccaggaggctgaggcaggagaatcgcttgaacccaggagtcggaggttgcggtgagcagagatcgtgccattgcactccagcctggggtatagagcaagactctgtttcaaaaaaaaaaaaaaacagaaaaagtgtgaaactcttagctagcctagggatggagaagcagtaggtgattagtaattgcataggagggcgtcacggagggctgagccatggatggcggtggcgctggctccccaagctctgtcattgcccccagtgccctgttcacttagatgctcagtaaatgctccaggaaactgcagcacaaggaataatgaacttggagcggggaagagctggctttgtcccgggagagctcgggcaagaggcctcgcatgtctgtgcctcccttttcccctttgtgagacggggtatacccagtgcctcgtcactctgtggctgttgttatgattaggatcatttcctgctggaggcactgctgggggctccgtgagatggtgaatgacaagtggtggatacgtgggactgagattcctcccccgacactcaaaaccccatgggcggccgggcatagtggctcacacctgtaatctcagcactttgtgaggctgaggcaggcggatcacctgaggtcaggagtgcgagaccagcctggccaatatggtgaaaccccatctccactaaaaatacaaaaattagccgtgtgtggtggcgagcacctgtaatcccagctgcttgggaagctgaggcaggagaaccacttgaacccgggaggcggaggttgcagtgaagcgagatcgggccactgcactccatcctgggagataagagagaaactctgtctcaaaaacaaaaacaaacaaaccaaaaaaaccacgggagttttctggggtcgctgtgggtcaccccccagttgggcctggaggggatttggggacccggaagcaaaggattctgtgtgtcctgcctatctcccaggatcaggagctccagggaaaccctccctggagtcccttctttgtttgctccatgctgggtgatgccagggccccccaagaggtgtcagtcccaacctcagccacaagcaactcccagtcttgggagacagactgggacaggtaccccccaccctgtggagtcagggtgggctggaggaacaggagcagggagccggaaaggaggctggactccggacaggtgacaatcatgcaattgctgtcctctgtagggcaatgtgaaggctggggcgtggggacccgtccccccattagccagggtaacagagtggggaggggtcgttgacagagcggaggggt

SEQ ID NO: 1560881 - DNA, 4001 bp, Homo sapiens
ttggaacggttacaggttttcagccttgtccgaatcttttttttttttttttttttttttcccctggagatataggcttgttttgtcgcccaggctggagtgcagtggtgcaatcttggctcattgaaacctgtgcctcctgggttcaaacgattctcctgcctcagctacccgagtagctgggattacaggcacccgccaccatgccccgctaatttttgtatttttagtagagatggggtttcgccatgttggccaggctggtcacaaactcctgatctcgggtgatccgcccgcctagcctcccaaagtgctgggattacaggcgtgagccaccgcgcctggccgccttgtccaatttctaaggtcttggacaggtacccaccccactgaaacaggcaacacttctttctttactggacacatccccttctctcccagccatattttttcttttctttttttgagacaggttctcgctctgtcacccaggctgaagtacagtgtggtgatcactgctcactacacccttgacctactgggctcaagggatcctcccgcttcagcctcccgattaggaactacaaggacgcgccaccattcccgctaattttttagagagacaggtttcaccatgtcgctcaggctggtctcgaactcctgggttcaagcgatccgcccgcctcggcctcccaaagtgctgggattacaggcttgagccaccacgcccggccccaatcagattttcctaatgtaccccttcactgacggcttgcaattcctccccaaatcccatccccaggccttgctggcccttgcagaggcactgatacctgtttcactgccactgtccgggtctcaggatctgcgaccagctccactgaggattggaggggtggagtcaggatttgcatccttgtgtgattgggtccctcatttctggggagtgtggcctgcttcaggctatagcatccagggagtaagaggcagtttatttctacatgggattggctccttgacatgcagtagccagatagtggcactaggattgcctgacactggtccttgcaagggacagggaggtacttttctctacagaattggtttcctccttgacaaaaaatgtggctagatataggtccggggcttggcctgttaccatccatcccaacctagcgacatttacttttctccacaggatcatttttctcttgacgaaggtcgtcgcctgtttctggatttcccgatggcctgagcatcatccgcgcagtgaacatcctccctaaatcggctcgatcccctctcccccaaaggatctagctaattctaaatcaagcacaaactttatcttcctgtactccctagagagcaccttccgacttcggggctggctgcaccactgcaatcccgcgtagcagccaagcgtccctctggattgttcccgcttttgcagcaggccacaccccctccagctcaggccccgctcaccttgagttctggagcacttccggtccgtaacctgggtcaggggtcccctgcccaggaccagggcttgcccgtccgagggcaggaagatggggggcgctcccccaggggggctctcgagccacaagcggcccggggcctccacctcgcccatcctgggtgccggcctggggagcaggtaaacgggcttgagcggcgcacagccccaatttgctgcaggaagtcccgcctcctcccacatccactagaaagtttccccaccattaactgctccggaagtcccacccgctcgccttccgcgggtcgacccgtttcccaggcgacgacgcgtgctccatccctccccgagttgcaatccccactttccagcgtacaggcagagagcctcgcacatgcctccgccccgccccgtactcacccgggaccgcggcttgggctcacggccacttccgaccagggaggtcctgcccgaggtgccccgcctgcaacccggccggcggcggtcggttcctcggcggacggaaatgactcgtcccctcgtgggtggggggcggggcctggcctcctcccacagcagccacgccccttccccgactcccggcccccagggtctctcggcagccctgaccttcatctctcttgctgcaacgcgaggctcaggccggtagcggggactggatcctccgttagcagatttgcctctttccaccttgacttctaattttcatcccagggaggaagatttttttcccatctgatggtcattgtcagtcgaggaaacctccgcccccgacagcgcccctaagtccttctttggcttcaccctcgatgttctagtttcctcatctataaaaaggataatcgtttccgcttcgtggggttaccatgacgattaaaggagctaacacgtgacaaaagctttaaaaaatgggtggtagtgagccctgtttaagtctttttttttttttttttttgagacggagtctcactctgtcgcccaggctggagtgcagtggcgcgatctcggctcacctgcaagctccgcctcccgggttgacgccattctcctgtctcagcctcccgagtagctgggactacaggcgcccgccaccacgcccagctaattttttgtattttgagtagagacggggtttcaccgtgttagccaggacggtctcgatctcctgatctcgtgatccgcccacctcggcctcccaaagtgctcagatccgtttaagtcttatttagtgttagcattctttcggtagtggtctggtgggactacgtttacctagtcctaatttcggacgaggttccacctgctttctaacctccagccatttttttttccctttggagaaggggtctcactgtgctgcccaggctgatctcgacctcctggtgtcatgtgatcctcccgccttggcctcccagcgtgttgggcttataggcgtgaggcaccaagcccagttgctccagtccttttataatagaagactcccggctggagttcctggctttgctggtgaatatgtgggctctgtctccaacactcacctcctcaagattgggttccatggtcacataagactgggatgctctcctccaccccatgaacctgtgtcttcatatctataaaatgggcacaaagccaggcgccgtggctcacgcctgtaatcccagcactttgggaggccaaggcgggtggatcatttgaggtcaggagttcaagaccatcctgaccaacatgatgaaaccctgtttctactgaaaatacaaaaattacccgggcggcagtggcgcgtaatcccagctactcgggaggttgaggcaggagaatcgcttgaacctgggcgagagtgggaccctgtctcaaaaaagtaaataaaatgggcacagtaattccaacccccagctattcactgataatcagacgctgccattcggtttcagaaaatgttgaatgaacactcacaacacacttcacatttatctcagaggtaaaactctttaatctcagagcgcccctcccaactgccgatcccccaacccctcactctctcccccacaccagggccggagagtgagggcccctgccccccaccttgggtggacgagggccctttaaggcacctgtggaggtggggggcgaggggcgggagctggtaccatcctggatgcagggacgggcttcgattggcaggctgttgtggggatggatggaaccaatgaaagggggtgccagaggcagggacagtttggggccatccctgagggggtcagggaacaagttgtcgggacgtgggcaaagacgaccccagtccccgtagtgtaaagaacgtaaattgaaggccccgggccaattctgggaagaggagggcttggccacgcccccaggaagctggagccaattgggagggagaactcaggaaaagcggacggtgactatgtagagactggtcaagccctttacaggatttgagccaatcaaaaaaagagctgtccagcgactaggg

SEQ ID NO: 1560882 - DNA, 4001 bp, Homo sapiens
accctcctcaactggtgtgtcatccacctcctgccatgcaccagggtcctcctcatcacccgcttgacccaccacctcctcgggctcctctgccccacctgccactcctgctcctcctgcctcatccacttgctggcacgagcccagtcacttctgctatcattctcaccattggtggcacgccgaggagagccttctggcttggccttcggacccctagaggttgaggctgttgcctcggcaggctgctggccccgaggggccttctgatctgatgcctcccttcttgagcctggccctttctttggcatcaccggcttcttcctgccatcttctgagtcaaccaagacgtaggagacagggcccaagctcaccttcttcttcttcctcatgggagcggggttcttggcagacacccaggccacggccttcttctttggtgggctttcatggccaccatcttggtctgactcagaggcgcctcctgggctctcggcttctgcccgggcatcctgaggtggctctctgggacccttccaggcacatttcgccatgggcttcttcaaagccaactcctccttattcacacagggctttctgctgcccttgatcggctctgagatcgccatgctttcagcatcacccacctcaggatcctccaagttagctgtgctgttggaattgatgcctttgggttttttccagggcactgcttcctgcctggagttcttcttctgcttctttctcctggagcgagacttagctccagccctgcgaaccaaaggtttggtaggctcatgctggtcttccgtggcattccagttgttgggggtctctgcctttaaggcagaacccacctctgctgcaagccccggttctttcttcaccttcctccctgctgctaaagcccaggctgccatctcctcgaattcagcggcctcctgggccctggcttcctcccggctgcggatctcggcatccatgcagaagatgatctgcaccactgctcccagaagcacccccagagcttctgcccagttctctgggggctgatgctggttctgggacagggtggggtggttgagctggagcaggcggaccacatcctcccaggtgcgcccctcggcatccaggaattcattcagattttttaaaaactcggcatcctgggtagggtctctacagaccactctccagacaccaccccttcctgggaattcacgggggatggtgctcagattcacaccttcaccaacctcaatgagggcagctttaacattctcttccctcacaaaaatcttgttgagcacgcggtacgggcccagtggggagaggaccccattcaaggtctcctcaatttctgcctgcccacagtcctctgggatgcctgtgaccaacaaggacctgtggatgtccacttccattcccctgcaccaatcctccagaaggttcatcgccatggtcttggacatttagcggctctgaacctactatgtgtagtaaatagtctatcaggtggacgtgggctgcagcggtctccaaacagtaatcctgcaaggtgacaagggagcgaggtcacgttcccaggaagatgaccaagctcacagatcctagctgccccctccgcggctggcctgcaggaggcctggcgctttcccaacaccctcctccccaacccaggccccggtgctcacacgtgtccctgaatctgcagcaaaaggccctaggaccctcccccgggcctgacgctccgcctgcccagccgggacttacttggcagatcagcctccgaccgcccagccaggccaaggagacgcagtggaatgcagccgtttcccagtcgctggctccggctaccccggcgccgctgctagaggcagaaagggccaagaaggcgccgtccgcccccgctccggcccaggcgggtcacggggcgtccagactcgatgccgttagcggcgagaagccgaggttggcgtcgcagcgcgcgcctgcgcactggctcccgcaccgccgctcgggggtcttgggctgcgcaggtgccgacgtctccatggcaaccgggcgtgggttgctagggctgagcccggccggcgcgccggcgctgcaattggacctagggagccgggtgcaagagtggcctgttcaggtcgcagagcaagcgggtctggatacactccggtggcgcctccacggaggccctctttcaacccaagtgggcctcgcgaacgggggttaggtcgatgagaagcgccaacacctatggctgcacccactgactgtattatcctctgccccacctgttggattcacccaacgcaactcttgggagacactagaaatcaagaaaggaggaaaacgaggctttaatcttcttgggttcctccaacagcaggtgcagttcctgttgggcttgtagccttctctcttacaagctgctgggttcttccaggaatttccagaaacttctagaaatttcttagtctcctccccgaccccttctagcatgaggataatgcctcgccttttcttgtttcctcaacgtgattcagggcaggttcttggcatcctccaggcaggggacaatgttacagctcagtgactgcccctacagagaagtgttagtccaaactgcaaccattttgtaagccctgactattttgcagatcttggtcaaagtgaaatattccacgggggttcgggccaatgagaaacatcctgcctaatcacctgaccacaaggcggacaaaggcccagctaaagaaacattatcataccctatcgtgcaaaggcccaactgaagaaacatccctatcatattctgctgggagaaagtgcagagaacaccacattccaccagaacaagggccagaaccgcctcatcatggaaccatcttatcaacatcctgctgggcagcaaaccatactgctcagacccctcccacccataactataagtacccccagcctataagcagcagtgggctctggcattaggctggttacccacttccacaggtgtctgcagtatacctgagttgctgttgagccgccttctgtctgtgtgtctttaaccctcaccttccctccaaaacctaacaaggagggctaccctctaggcagtgtgctgagaatagcacctcggggcaaggctgcagtcacatttatacccacttttaatgacgtgctaattaaggggtgggttttcagaattagcaaattggcagtaacttatgggtgttgccatggcaatggtaaactgtcatggtgctggcaggcatgtcttatggagagaggctttcggtgccttttccaggttttggccagtcttcaatgtgatcctcagtggagtcccctgggcctcctacctcaaccttgctgcccatgagcaagaactttgttaatagtttattaatgcccagtgctgtggctcacgcatgtaatcccaacactttgggaggctgaggagggcggatcacttgagctggggagttcgagaccatcctgggcaacatggcaaaaccccgtccctaccaaaaacgcaaaaaattagccaggtgtgataggggtcacctgtggtctcagctattcgggaggctgaggtgggaggattgcttgaacccaggagaccctgtctcaaaaaaaataaactaattaattaagcactcctatgagactcggttggactggccatctgtttttttttttttttttttgccagtccctcactgatccacctaccaatgtcccttcctggctgtgtgatcttagagaaataatttgaccccgctgagcttatttcttttctctgtaataggaattctaataaaaaatcttcctgatttggaagttttgaagattcggggggatctcatctgaaagatgcatggaagtacaatttgggccttggtattcaaccaaaatctgttctttgggttcatttttgaaactgacatttgcaaggccaaatagccaaatgttcatttcactgtcatctctgg

SEQ ID NO: 1560883 - DNA, 4001 bp, Homo sapiens
gtgtcctccgactcctcctcggactgttcgtccgaagcctcctccgacccctcgttggaccccatgttctcccgggcggccaggagcgccaatacctcccccagtttgcctttggggtatttgtacttcccgccttcccaggcgttttctttttcctccttcatcacctccgccatgtcctgggcagccaggagcgccaccagctccagaagacccccttcgtcctcacggtgctcgctccagcccccgaagaggccacgcccagccttcttcgcctggggagggagatccggctgcgccaaggtggaaatgcactcccggaggtccccgtcatccccggccttgcgcaggaccacggcgtccacctcgcggcccgcctcttccaccttcacgcgggtcccgttagtgtccttggacatgacggacaagacctgtcggagggggtctcgcttgtctttctcgtcgctccagcccagcgactcgataacagaagcgattttcaacatctcctcccgggcccaggggtccgacgggtcggtataggccacaatggccacgaactcaggattatccaactcctctgtttcttggtccccactttcctgcgagtcgctctccgaagtgtcgctgtccaccggctcctcgtccggggtgtctctcacagccagcagggccactaagtcggggacaccatttttgtcttctttggtgttcaagcggatggattcggccccagctggctccttctctgcctcttctttcttcgatttgtcggtgacggtgaccagagccaagaactcgcggggaccgtcttcttccccctcggagttgcagggcgcccactgcctaaccagctccctggcagcggcctgcagcgtggcgtacagcgcgctctggtcctcttctccgctcaggtcgccctggtcgatctcctcgatcacgatgcccaggctctcgtcggaagagtcctcggcctcactcctcgcgggagcagacggccgtcctcctcggcttctcttcttgcccttctgggtcaacctgttgcgtctggttctgtttctgcgaccccgacggcccctccttgggttcctggctgccccaagaagcgagccagcctgccctgttacctccccagaatcctgggcctgcgtctccgaagcgggaggggtgggtgcctccccgggggtcccagcctccgcggcctgcgtgggcccgtcatccagcagcaggcgtctcatctgcctcaggaccctcgtgtcctgcgcacggtccttccacagaaccctccagaccccatccttgcctgggatctccctgggaatggcagcgtgattgacgtcctccacaaactccaccagggcggcctgggccttctcgttcatcaaagccttcatgtgtcgcaacctgaacgtgcccaggggcaggagggtcggctgcaggacggcttcgacgtctgcctgctccaggccctccgggatgccggtgaccagcagggccctgtgcgcgtccacgtccaggctccggcaccagtcctgcaaaaggctcatggccatggtgcagcccccttggcgctgatcttggggcagcagggagcccgagataggggtgggctgcagcgcacggtgtcaatgcaaccctagaaagccacttgcagggcttagagtcccggttccggtgaatgtggcaaggctggagtggggctcggggctcgggggctctagctgcctgctggccggctggacgcagtgaccttcccccgggacccctctccagagctgtctgaggatccgcggggggcttacgtgtctgctttccaggacagctccctccctctctccctgacacaggcctgagtgactcggcaccgcagccaggtgcaggggggcggcgccgagtgcacctggagaggcgtgggaggtagcagccgcagcttgcctggcgctcgcgccgcgtctgagcgcgcaccctgggcctgaatctcagcagttccgctgcgacgcggctgctcgcgcgtgcgcctgcgcagagggagccgcacaccctcccctgtcccccgcccaaccgtctccatggcaacggtgcagccttgagctggggtctgcgtcgctgtggcctgagacgcttttcttaaaggtcccgatgacaaggacttggggcctggaagcaccactttcattaaccagcaaaaaacaaggccgaaaccacagagggccagaaatcactcaaggatacccgacctcattcaggggatagaggcctccttccagagggtaccggcatcactgggggttacaattcccccttccaggggccaggtggaattcaggattatataggcctaaatcaaagggcactggccttgcagcgtaggaccaggacttactcgggatactggcctcattcacagtatatgggtctcagtatcaaataggggggcccaggcaccacctgtgagcaagacaccattcagggtatatgggcctcacttgcagggtacaggccccactcgatgggaccggccctcactcccatacacgttcctgtattctgaactatgcatgcacaataaatcctgtggttttgcacacgctttgagcatatgtatgattgtgagaccaggcatgaattttgcaagaaagcatttcccttgactgggacagcagactggggcgtgtgaacgtcagtcatagctactgtaaacatgcatttgcttctctgtcccttgttggccatgaggctgtcccctactctatatgaatctggctctgtagaccagctggtaggtttatatctcaaccatcatccctacctcaaagggttttgtttttttgttgttgtttgttttggagatggagtcttgctctgtcactcaggctggagtgcaatggcacaatcttggttcactgcaacttccgcctcccatgttcaagcggttctcctgcctcagcctcctgagtagcaaggatgacaggcctcccaagtagctgggattataggcatacaccatcacgtctggcaagtttttgtattttttgtagagatgggtttttaccatgttacccaggctggtctcaaactcctaacctcaagtgatctgcccgcctcagcctctgaaagtgctgggattacaggattacatggtgagccaccatgcctggcctcaaagggttctcatgaggattaaagggaataatccaggaaagcatttagaagagcagctggcccacagctggtgctccatgaaagatggctaagagaagtatttgttgagaacttaccattataaaagcatctgttttgttggtttgtttttgagatggagtcttgctctgtcgcccaggctggagtgcaatggagcaatctcggctcactgcaacctccaccacccgggttaaagccattctcctgcctcagcctcccgagtaactgggactacaggcatgcaccaccatgcctgactagttttttgtttgtttgtttgtttgagagagagtctcgcactgtcactcaggctggagggcagtggcgtgatcttggttcactgcaacctccgcctcccggcttcaaaccattctccagcctcagcctcccaagtagctgagattacaggtgcccgccaccacgcccagctaattttttgtatttttagtagagacggggtttcactatgttgggcaaccttgtctcaaactcccaacctcgtgatccgcccgcctcggcctcccaaagtgctgggattacaggtgtgagccaccgtgcccggcctagttttgtatttttagtagatggattttcaccatgttggccaggctggtctggaactcctgacctcgggtgatctgccggcgtcggcctcccaaagtgctgggattacaggcacgagccaccgtgctcagcccaaagcatctgttaataaacaaataaataggaaaccaaaacacctcgagttttttgtttttgccaccaggcccaaccccttacttttgtgtttggattttttt

SEQ ID NO: 1560884 - DNA, 4001 bp, Homo sapiens
tctgcccgccttagcctcccaaagtgctgggaattacaggcatgagccacagcgcgcagccaatatgggaagacttccacaacactttggtgtaagctgattactcaaaaggcccctgagataacccctaataccaggtcacacccagcacagccttacttcttggcaatgttgagcatcttcagtttcttcctcatgcgtggccgggaggtggcggagacagaggtatccacgagggaggaggtggattgtgacacctgggagaatgaaggcggagatgggtgaattgctaattcagaccttggagaagaggcagacggatccagggggtctccatcaaggaaggagcggtggcggacactaagaagtgtaaatagggaaggggcgcggcctctgtgtggtcagggcggaccccaggggtcccggactcaccttccgcataatcttccggccatagaagagcactttgtccctcttccggaaccgataccgggggccatccggggctggggtttctggggataggtggggacaggggcactccgagctctgtgcagactccaccctgccagagctggggtaccgcgaacagacgccagcaaatccccatctctgccgcctcgggacccgggcatttgggccccccaccatacagcctcccaagaggggcccctcgggtgctcacttggcactcgcagcctccgcaccaccaggaggatgagcacggccgtgaccaccaccgccactccggccccgatcatcacgccaagcacctgagggacgaacggcactggctgcgcaccgcaaatccgtcccgccgagccttccccgggcgccaggacgtcctggaacccatccctctccgccaccttcgcccccgaggagttcgtagccagcccgtgactcgatgtccccatctgcagaatgggccagtgctgctccctccccgggggcgcgactcttccctgaggcccggcggcccgcagtgcatgccgggaaacgtagttccgcccgagcggacgcagcgcgttatcgccagaccacgtaatgcgcgctgagcacgccgggagttgtagtcctcttggcgccccacgccggcacctacccggtctccgccccaccccttaccattccagtttgcagcggagcctccatcggttgattccagctggacggccgatctggtagcccggagtcctgggaaatcaaggagtcgaaggaacccgtgcaagtcgtcaatctgggcccacctctcccctgcctcaagccctgcccccagctcaagccctgccctctggggtggcgggggaagcgtctccagctgccaggggcgaggctagaggggcgctgcgggactaagggatggagcaaaccgacctctcggccctggccaggagatgaggcgggtccccggcttcctgctcccttcgcctacgcgtagggcctaccagacgcccgcctgtccaaccccaccccggggccaaaggccgacctggtacccactgtcagcagcctgcaggcaggtccccacagggcacggtcctctgcacctggtgacttcctcccgggtcactgccctctgcagggttgatcaagcctgaccaccccaccccccaggccgcaccccctactccgtcgaagactgaatgccccaccccaggaaaacgggcccgcaaaccgtggggtccgggagtgggcacctagatactcggctcccgacgcaagcctgccccggggaagacccaggagctgggaggcacgggagtactgccggggcatccgcggaaggcgtctgatacccacgtttcagaagagtcctgggatgcttggggtggcgtgggcttgcaaggcgctgctggtttttgccggggatttactatcacgtagtagtgaagttatgggggctctatggcacagagcatcactgggactccgggaccgatggtggcgccattgctgggaggcgtaaccagagacgctgggattagtgggtggggatgcggggtcactggaaagttactgagattctgaggattacaatactactgctgggaaaaccaggaggtgggtgggcacattcctggggtgcttatgagagcgggcctggggagggcgtccgggctccttggaagatactgagagatgctggaatattactgggatttttctgggaagctgaggatgtttctgacatcgctagaatattaatggaaattcgggggccgggagataggaatcccggagactccgagtcgttacttggaaaattcctgggtggccggtcctcttccacctcagggcacagctggctaccggtgtggaaacacctgccgagacgtggggggtatgggaacatcagaaagtctagagttaacaggaatcggaggacagatcgtgggaaagcggaggctcgctaacgaccctcgaagggacacccctgcgaggctaacggaaacccagactcacccaggggccgcagccggggtccactccgcgccaacaccgctagcgttccgcccggctccgcaggcacggcccctttaaattattcactcctagtcgcaccgcagtccctcccgaccctcccacccctcctccccgcgccatgcttggaaggccgactgaggccgccatgctgagtgtggccgcgccttaaagggcctcacaccgcttaacgcaaggactgctcctcccgctaaaaatgaaaacgacacatttattttcccttttattcaacaccctccccacccagtctccccgcccccaagggtccgacacgaaaggtccaggccctcctcgggcgcgacagggagccgatccttaaaagcaaaccctacaaataaataagcggggtcgggggcgggggtctctgcagtccagggcctacggtccaacggcagtcaggtcgaatcaattcaccagcagcgaatgctcctccgaggggtccctggaggaaggaagcagggaagaggggcgtcagttttctctggctcgctcccctttccccattccctaacctccaatctgaatgtgccagacccgggactcgaaccttccgcagcagcagagaaggctgcaggccgagccgctcccgcggcggaacttgccggaggtggggctgtcctggcactgtgcgatgtaggcctgcagctcgctctcctctgcgcctgcgccgccgggatgctggggagagaagccgggaggctcagcctgaaagtggctcccaacctccaaggcccttgaagtccgccctcccctccagccatatctgcatcgcttcccacctccgggcctttgcacttgctgggcctgctccacccgttgttccacagtttgcttgcacagagggaccttccctgacccctgaacctggatacaagctgtgtctttgccagtctgtgtctttgccttctgctgtaggtccagcacctacagacctagagccagggctgacatgacctcgatgctcagaaaccatctattgagtgagctggatgcacgctgagcacagcagtgggagcagggcctgagactgcccacctgagtggatgcatgtgtgtgatgtctacgtgctaaggcaagacaggaagtagttccaagggcctgagtcaatgtgtctgtgggacagctgaatccatgcatggggaaaagggggtgtacccatctgccggtgacattggatgtggcagggtcccagccaaggcttccttcctctcactcggcctcatggaggggccatcttttctccaagttttttcaggctactagacctttgctttagctattccttcccctcggtgcactgcccctgggctcccatctcttcagtctagaggcgatggaagtattcaatatctatgctgtccaatatggcagccaccagccacactggcttttgagcactggatacaggatggtgcaagtcagaggctaaatttgcaattgtacttcatttgaattaaaatttttaaaaaattgttgttttgtctttgaagcagagt

SEQ ID NO: 1560885 - DNA, 4001 bp, Homo sapiens
actttgtccctcttccggaaccgataccgggggccatccggggctggggtttctggggataggtggggacaggggcactccgagctctgtgcagactccaccctgccagagctggggtaccgcgaacagacgccagcaaatccccatctctgccgcctcgggacccgggcatttgggccccccaccatacagcctcccaagaggggcccctcgggtgctcacttggcactcgcagcctccgcaccaccaggaggatgagcacggccgtgaccaccaccgccactccggccccgatcatcacgccaagcacctgagggacgaacggcactggctgcgcaccgcaaatccgtcccgccgagccttccccgggcgccaggacgtcctggaacccatccctctccgccaccttcgcccccgaggagttcgtagccagcccgtgactcgatgtccccatctgcagaatgggccagtgctgctccctccccgggggcgcgactcttccctgaggcccggcggcccgcagtgcatgccgggaaacgtagttccgcccgagcggacgcagcgcgttatcgccagaccacgtaatgcgcgctgagcacgccgggagttgtagtcctcttggcgccccacgccggcacctacccggtctccgccccaccccttaccattccagtttgcagcggagcctccatcggttgattccagctggacggccgatctggtagcccggagtcctgggaaatcaaggagtcgaaggaacccgtgcaagtcgtcaatctgggcccacctctcccctgcctcaagccctgcccccagctcaagccctgccctctggggtggcgggggaagcgtctccagctgccaggggcgaggctagaggggcgctgcgggactaagggatggagcaaaccgacctctcggccctggccaggagatgaggcgggtccccggcttcctgctcccttcgcctacgcgtagggcctaccagacgcccgcctgtccaaccccaccccggggccaaaggccgacctggtacccactgtcagcagcctgcaggcaggtccccacagggcacggtcctctgcacctggtgacttcctcccgggtcactgccctctgcagggttgatcaagcctgaccaccccaccccccaggccgcaccccctactccgtcgaagactgaatgccccaccccaggaaaacgggcccgcaaaccgtggggtccgggagtgggcacctagatactcggctcccgacgcaagcctgccccggggaagacccaggagctgggaggcacgggagtactgccggggcatccgcggaaggcgtctgatacccacgtttcagaagagtcctgggatgcttggggtggcgtgggcttgcaaggcgctgctggtttttgccggggatttactatcacgtagtagtgaagttatgggggctctatggcacagagcatcactgggactccgggaccgatggtggcgccattgctgggaggcgtaaccagagacgctgggattagtgggtggggatgcggggtcactggaaagttactgagattctgaggattacaatactactgctgggaaaaccaggaggtgggtgggcacattcctggggtgcttatgagagcgggcctggggagggcgtccgggctccttggaagatactgagagatgctggaatattactgggatttttctgggaagctgaggatgtttctgacatcgctagaatattaatggaaattcgggggccgggagataggaatcccggagactccgagtcgttacttggaaaattcctgggtggccggtcctcttccacctcagggcacagctggctaccggtgtggaaacacctgccgagacgtggggggtatgggaacatcagaaagtctagagttaacaggaatcggaggacagatcgtgggaaagcggaggctcgctaacgaccctcgaagggacacccctgcgaggctaacggaaacccagactcacccaggggccgcagccggggtccactccgcgccaacaccgctagcgttccgcccggctccgcaggcacggcccctttaaattattcactcctagtcgcaccgcagtccctcccgaccctcccacccctcctccccgcgccatgcttggaaggccgactgaggccgccatgctgagtgtggccgcgccttaaagggcctcacaccgcttaacgcaaggactgctcctcccgctaaaaatgaaaacgacacatttattttcccttttattcaacaccctccccacccagtctccccgcccccaagggtccgacacgaaaggtccaggccctcctcgggcgcgacagggagccgatccttaaaagcaaaccctacaaataaataagcggggtcgggggcgggggtctctgcagtccagggcctacggtccaacggcagtcaggtcgaatcaattcaccagcagcgaatgctcctccgaggggtccctggaggaaggaagcagggaagaggggcgtcagttttctctggctcgctcccctttccccattccctaacctccaatctgaatgtgccagacccgggactcgaaccttccgcagcagcagagaaggctgcaggccgagccgctcccgcggcggaacttgccggaggtggggctgtcctggcactgtgcgatgtaggcctgcagctcgctctcctctgcgcctgcgccgccgggatgctggggagagaagccgggaggctcagcctgaaagtggctcccaacctccaaggcccttgaagtccgccctcccctccagccatatctgcatcgcttcccacctccgggcctttgcacttgctgggcctgctccacccgttgttccacagtttgcttgcacagagggaccttccctgacccctgaacctggatacaagctgtgtctttgccagtctgtgtctttgccttctgctgtaggtccagcacctacagacctagagccagggctgacatgacctcgatgctcagaaaccatctattgagtgagctggatgcacgctgagcacagcagtgggagcagggcctgagactgcccacctgagtggatgcatgtgtgtgatgtctacgtgctaaggcaagacaggaagtagttccaagggcctgagtcaatgtgtctgtgggacagctgaatccatgcatggggaaaagggggtgtacccatctgccggtgacattggatgtggcagggtcccagccaaggcttccttcctctcactcggcctcatggaggggccatcttttctccaagttttttcaggctactagacctttgctttagctattccttcccctcggtgcactgcccctgggctcccatctcttcagtctagaggcgatggaagtattcaatatctatgctgtccaatatggcagccaccagccacactggcttttgagcactggatacaggatggtgcaagtcagaggctaaatttgcaattgtacttcatttgaattaaaatttttaaaaaattgttgttttgtctttgaagcagagtctcggtctctcgcccacgttggagtgcagtggcttgatctcggctcactgcaacctctacgtcccaggttcaagcaattctactgcctcagcctccggagtagctgggattacaggtgcctgccaccacgtccgctaattttttgtatttttagtagagatggggttttgccatgttggccaggctggtctcgaactcctaacctcaggtgatccacccccaccccccctcggcctcccaaagggctgggattacaggcgtgagtcaccgtgcccagccggaattaaaatcaaaatttaaatagctgcatagggctagagactagtgatggatagaacattctagaagctctcctggatctcctgtcataccaatctaaagcaggggtccctctgcaaccttccactcttccttcatacctgttacaagtaggtcattggtcatgggatgtctgttcctgtgc

SEQ ID NO: 1560886 - DNA, 4001 bp, Homo sapiens
ttgccatgttggccaggctggcctcaaactcctgatctcaggtgatctgcccgccttagcctcccaaagtgctgggaattacaggcatgagccacagcgcgcagccaatatgggaagacttccacaacactttggtgtaagctgattactcaaaaggcccctgagataacccctaataccaggtcacacccagcacagccttacttcttggcaatgttgagcatcttcagtttcttcctcatgcgtggccgggaggtggcggagacagaggtatccacgagggaggaggtggattgtgacacctgggagaatgaaggcggagatgggtgaattgctaattcagaccttggagaagaggcagacggatccagggggtctccatcaaggaaggagcggtggcggacactaagaagtgtaaatagggaaggggcgcggcctctgtgtggtcagggcggaccccaggggtcccggactcaccttccgcataatcttccggccatagaagagcactttgtccctcttccggaaccgataccgggggccatccggggctggggtttctggggataggtggggacaggggcactccgagctctgtgcagactccaccctgccagagctggggtaccgcgaacagacgccagcaaatccccatctctgccgcctcgggacccgggcatttgggccccccaccatacagcctcccaagaggggcccctcgggtgctcacttggcactcgcagcctccgcaccaccaggaggatgagcacggccgtgaccaccaccgccactccggccccgatcatcacgccaagcacctgagggacgaacggcactggctgcgcaccgcaaatccgtcccgccgagccttccccgggcgccaggacgtcctggaacccatccctctccgccaccttcgcccccgaggagttcgtagccagcccgtgactcgatgtccccatctgcagaatgggccagtgctgctccctccccgggggcgcgactcttccctgaggcccggcggcccgcagtgcatgccgggaaacgtagttccgcccgagcggacgcagcgcgttatcgccagaccacgtaatgcgcgctgagcacgccgggagttgtagtcctcttggcgccccacgccggcacctacccggtctccgccccaccccttaccattccagtttgcagcggagcctccatcggttgattccagctggacggccgatctggtagcccggagtcctgggaaatcaaggagtcgaaggaacccgtgcaagtcgtcaatctgggcccacctctcccctgcctcaagccctgcccccagctcaagccctgccctctggggtggcgggggaagcgtctccagctgccaggggcgaggctagaggggcgctgcgggactaagggatggagcaaaccgacctctcggccctggccaggagatgaggcgggtccccggcttcctgctcccttcgcctacgcgtagggcctaccagacgcccgcctgtccaaccccaccccggggccaaaggccgacctggtacccactgtcagcagcctgcaggcaggtccccacagggcacggtcctctgcacctggtgacttcctcccgggtcactgccctctgcagggttgatcaagcctgaccaccccaccccccaggccgcaccccctactccgtcgaagactgaatgccccaccccaggaaaacgggcccgcaaaccgtggggtccgggagtgggcacctagatactcggctcccgacgcaagcctgccccggggaagacccaggagctgggaggcacgggagtactgccggggcatccgcggaaggcgtctgatacccacgtttcagaagagtcctgggatgcttggggtggcgtgggcttgcaaggcgctgctggtttttgccggggatttactatcacgtagtagtgaagttatgggggctctatggcacagagcatcactgggactccgggaccgatggtggcgccattgctgggaggcgtaaccagagacgctgggattagtgggtggggatgcggggtcactggaaagttactgagattctgaggattacaatactactgctgggaaaaccaggaggtgggtgggcacattcctggggtgcttatgagagcgggcctggggagggcgtccgggctccttggaagatactgagagatgctggaatattactgggatttttctgggaagctgaggatgtttctgacatcgctagaatattaatggaaattcgggggccgggagataggaatcccggagactccgagtcgttacttggaaaattcctgggtggccggtcctcttccacctcagggcacagctggctaccggtgtggaaacacctgccgagacgtggggggtatgggaacatcagaaagtctagagttaacaggaatcggaggacagatcgtgggaaagcggaggctcgctaacgaccctcgaagggacacccctgcgaggctaacggaaacccagactcacccaggggccgcagccggggtccactccgcgccaacaccgctagcgttccgcccggctccgcaggcacggcccctttaaattattcactcctagtcgcaccgcagtccctcccgaccctcccacccctcctccccgcgccatgcttggaaggccgactgaggccgccatgctgagtgtggccgcgccttaaagggcctcacaccgcttaacgcaaggactgctcctcccgctaaaaatgaaaacgacacatttattttcccttttattcaacaccctccccacccagtctccccgcccccaagggtccgacacgaaaggtccaggccctcctcgggcgcgacagggagccgatccttaaaagcaaaccctacaaataaataagcggggtcgggggcgggggtctctgcagtccagggcctacggtccaacggcagtcaggtcgaatcaattcaccagcagcgaatgctcctccgaggggtccctggaggaaggaagcagggaagaggggcgtcagttttctctggctcgctcccctttccccattccctaacctccaatctgaatgtgccagacccgggactcgaaccttccgcagcagcagagaaggctgcaggccgagccgctcccgcggcggaacttgccggaggtggggctgtcctggcactgtgcgatgtaggcctgcagctcgctctcctctgcgcctgcgccgccgggatgctggggagagaagccgggaggctcagcctgaaagtggctcccaacctccaaggcccttgaagtccgccctcccctccagccatatctgcatcgcttcccacctccgggcctttgcacttgctgggcctgctccacccgttgttccacagtttgcttgcacagagggaccttccctgacccctgaacctggatacaagctgtgtctttgccagtctgtgtctttgccttctgctgtaggtccagcacctacagacctagagccagggctgacatgacctcgatgctcagaaaccatctattgagtgagctggatgcacgctgagcacagcagtgggagcagggcctgagactgcccacctgagtggatgcatgtgtgtgatgtctacgtgctaaggcaagacaggaagtagttccaagggcctgagtcaatgtgtctgtgggacagctgaatccatgcatggggaaaagggggtgtacccatctgccggtgacattggatgtggcagggtcccagccaaggcttccttcctctcactcggcctcatggaggggccatcttttctccaagttttttcaggctactagacctttgctttagctattccttcccctcggtgcactgcccctgggctcccatctcttcagtctagaggcgatggaagtattcaatatctatgctgtccaatatggcagccaccagccacactggcttttgagcactggatacaggatggtgcaagtcagaggctaaatttgcaattgtacttcatttg

SEQ ID NO: 1560887 - DNA, 4001 bp, Homo sapiens
tgccagtgcactctagcctagtgacagagcaagactccatctcaaaaacaaacaaacaaacaaacaaaaaagaaaggactgccattgcaggactattgatcatggagagccctgccctggtgtgaagaaacccttgaggcagacctccaggtagactacatgacgcacagggatcccagagccagcacccaacttgcaaagagagttggagagcctttctcgcagaccttgctgccaacagggatctctgatgcatccttcctatatttctagtgcaagaaaattcataagatagcccctagggaacagaaactcctgagacagcctccttagtgtgggaagaacttcaaggtccataacataggaaagatgccttctgatgtacagagatgcctgagataacccccggagaagagaggctggaggctggagatagcccctttaggagatcgtagaaacacaattacctcagtgaggtaccctggaagaaaaccactcatgtgaagagactcatgaaataacctacatggaaacccctgatgtagacccccccactaagtatatggcaagacctctgagatattgacttgggaacaaatagctcagatactccagtggaaggagaaggtcactgaggtagccctcagggaagagataccctagagacagcatgtctggtgtggaagagctctgagaggagagtccagagatgtctctctgaaacaggaagactttcttcttcttcttcttcttttttttttttttttttttttttttgagacagagtctcactctattgcccaggctggagtgcagtggcatgatctcagctcactgcaacctccacctcccagattcaagtgattctcctgtctcacccttctgagtagctgggattacaggcccatgccaccacgcccagctaatttttgtatttttagtacagatgaggtttgccatgttggccaggctggcctcaaactcctgatctcaggtgatctgcccgccttagcctcccaaagtgctgggaattacaggcatgagccacagcgcgcagccaatatgggaagacttccacaacactttggtgtaagctgattactcaaaaggcccctgagataacccctaataccaggtcacacccagcacagccttacttcttggcaatgttgagcatcttcagtttcttcctcatgcgtggccgggaggtggcggagacagaggtatccacgagggaggaggtggattgtgacacctgggagaatgaaggcggagatgggtgaattgctaattcagaccttggagaagaggcagacggatccagggggtctccatcaaggaaggagcggtggcggacactaagaagtgtaaatagggaaggggcgcggcctctgtgtggtcagggcggaccccaggggtcccggactcaccttccgcataatcttccggccatagaagagcactttgtccctcttccggaaccgataccgggggccatccggggctggggtttctggggataggtggggacaggggcactccgagctctgtgcagactccaccctgccagagctggggtaccgcgaacagacgccagcaaatccccatctctgccgcctcgggacccgggcatttgggccccccaccatacagcctcccaagaggggcccctcgggtgctcacttggcactcgcagcctccgcaccaccaggaggatgagcacggccgtgaccaccaccgccactccggccccgatcatcacgccaagcacctgagggacgaacggcactggctgcgcaccgcaaatccgtcccgccgagccttccccgggcgccaggacgtcctggaacccatccctctccgccaccttcgcccccgaggagttcgtagccagcccgtgactcgatgtccccatctgcagaatgggccagtgctgctccctccccgggggcgcgactcttccctgaggcccggcggcccgcagtgcatgccgggaaacgtagttccgcccgagcggacgcagcgcgttatcgccagaccacgtaatgcgcgctgagcacgccgggagttgtagtcctcttggcgccccacgccggcacctacccggtctccgccccaccccttaccattccagtttgcagcggagcctccatcggttgattccagctggacggccgatctggtagcccggagtcctgggaaatcaaggagtcgaaggaacccgtgcaagtcgtcaatctgggcccacctctcccctgcctcaagccctgcccccagctcaagccctgccctctggggtggcgggggaagcgtctccagctgccaggggcgaggctagaggggcgctgcgggactaagggatggagcaaaccgacctctcggccctggccaggagatgaggcgggtccccggcttcctgctcccttcgcctacgcgtagggcctaccagacgcccgcctgtccaaccccaccccggggccaaaggccgacctggtacccactgtcagcagcctgcaggcaggtccccacagggcacggtcctctgcacctggtgacttcctcccgggtcactgccctctgcagggttgatcaagcctgaccaccccaccccccaggccgcaccccctactccgtcgaagactgaatgccccaccccaggaaaacgggcccgcaaaccgtggggtccgggagtgggcacctagatactcggctcccgacgcaagcctgccccggggaagacccaggagctgggaggcacgggagtactgccggggcatccgcggaaggcgtctgatacccacgtttcagaagagtcctgggatgcttggggtggcgtgggcttgcaaggcgctgctggtttttgccggggatttactatcacgtagtagtgaagttatgggggctctatggcacagagcatcactgggactccgggaccgatggtggcgccattgctgggaggcgtaaccagagacgctgggattagtgggtggggatgcggggtcactggaaagttactgagattctgaggattacaatactactgctgggaaaaccaggaggtgggtgggcacattcctggggtgcttatgagagcgggcctggggagggcgtccgggctccttggaagatactgagagatgctggaatattactgggatttttctgggaagctgaggatgtttctgacatcgctagaatattaatggaaattcgggggccgggagataggaatcccggagactccgagtcgttacttggaaaattcctgggtggccggtcctcttccacctcagggcacagctggctaccggtgtggaaacacctgccgagacgtggggggtatgggaacatcagaaagtctagagttaacaggaatcggaggacagatcgtgggaaagcggaggctcgctaacgaccctcgaagggacacccctgcgaggctaacggaaacccagactcacccaggggccgcagccggggtccactccgcgccaacaccgctagcgttccgcccggctccgcaggcacggcccctttaaattattcactcctagtcgcaccgcagtccctcccgaccctcccacccctcctccccgcgccatgcttggaaggccgactgaggccgccatgctgagtgtggccgcgccttaaagggcctcacaccgcttaacgcaaggactgctcctcccgctaaaaatgaaaacgacacatttattttcccttttattcaacaccctccccacccagtctccccgcccccaagggtccgacacgaaaggtccaggccctcctcgggcgcgacagggagccgatccttaaaagcaaaccctacaaataaataagcggggtcgggggcgggggtctctgcagtccagggcctacggtccaacggcagtcaggtcgaatcaattcaccagcagcgaatgctcctccgaggggtccctggaggaaggaagcagggaagaggggcgtcagttttctctggctcgctccccttt

SEQ ID NO: 1560888 - DNA, 4001 bp, Homo sapiens
gcagactccaccctgccagagctggggtaccgcgaacagacgccagcaaatccccatctctgccgcctcgggacccgggcatttgggccccccaccatacagcctcccaagaggggcccctcgggtgctcacttggcactcgcagcctccgcaccaccaggaggatgagcacggccgtgaccaccaccgccactccggccccgatcatcacgccaagcacctgagggacgaacggcactggctgcgcaccgcaaatccgtcccgccgagccttccccgggcgccaggacgtcctggaacccatccctctccgccaccttcgcccccgaggagttcgtagccagcccgtgactcgatgtccccatctgcagaatgggccagtgctgctccctccccgggggcgcgactcttccctgaggcccggcggcccgcagtgcatgccgggaaacgtagttccgcccgagcggacgcagcgcgttatcgccagaccacgtaatgcgcgctgagcacgccgggagttgtagtcctcttggcgccccacgccggcacctacccggtctccgccccaccccttaccattccagtttgcagcggagcctccatcggttgattccagctggacggccgatctggtagcccggagtcctgggaaatcaaggagtcgaaggaacccgtgcaagtcgtcaatctgggcccacctctcccctgcctcaagccctgcccccagctcaagccctgccctctggggtggcgggggaagcgtctccagctgccaggggcgaggctagaggggcgctgcgggactaagggatggagcaaaccgacctctcggccctggccaggagatgaggcgggtccccggcttcctgctcccttcgcctacgcgtagggcctaccagacgcccgcctgtccaaccccaccccggggccaaaggccgacctggtacccactgtcagcagcctgcaggcaggtccccacagggcacggtcctctgcacctggtgacttcctcccgggtcactgccctctgcagggttgatcaagcctgaccaccccaccccccaggccgcaccccctactccgtcgaagactgaatgccccaccccaggaaaacgggcccgcaaaccgtggggtccgggagtgggcacctagatactcggctcccgacgcaagcctgccccggggaagacccaggagctgggaggcacgggagtactgccggggcatccgcggaaggcgtctgatacccacgtttcagaagagtcctgggatgcttggggtggcgtgggcttgcaaggcgctgctggtttttgccggggatttactatcacgtagtagtgaagttatgggggctctatggcacagagcatcactgggactccgggaccgatggtggcgccattgctgggaggcgtaaccagagacgctgggattagtgggtggggatgcggggtcactggaaagttactgagattctgaggattacaatactactgctgggaaaaccaggaggtgggtgggcacattcctggggtgcttatgagagcgggcctggggagggcgtccgggctccttggaagatactgagagatgctggaatattactgggatttttctgggaagctgaggatgtttctgacatcgctagaatattaatggaaattcgggggccgggagataggaatcccggagactccgagtcgttacttggaaaattcctgggtggccggtcctcttccacctcagggcacagctggctaccggtgtggaaacacctgccgagacgtggggggtatgggaacatcagaaagtctagagttaacaggaatcggaggacagatcgtgggaaagcggaggctcgctaacgaccctcgaagggacacccctgcgaggctaacggaaacccagactcacccaggggccgcagccggggtccactccgcgccaacaccgctagcgttccgcccggctccgcaggcacggcccctttaaattattcactcctagtcgcaccgcagtccctcccgaccctcccacccctcctccccgcgccatgcttggaaggccgactgaggccgccatgctgagtgtggccgcgccttaaagggcctcacaccgcttaacgcaaggactgctcctcccgctaaaaatgaaaacgacacatttattttcccttttattcaacaccctccccacccagtctccccgcccccaagggtccgacacgaaaggtccaggccctcctcgggcgcgacagggagccgatccttaaaagcaaaccctacaaataaataagcggggtcgggggcgggggtctctgcagtccagggcctacggtccaacggcagtcaggtcgaatcaattcaccagcagcgaatgctcctccgaggggtccctggaggaaggaagcagggaagaggggcgtcagttttctctggctcgctcccctttccccattccctaacctccaatctgaatgtgccagacccgggactcgaaccttccgcagcagcagagaaggctgcaggccgagccgctcccgcggcggaacttgccggaggtggggctgtcctggcactgtgcgatgtaggcctgcagctcgctctcctctgcgcctgcgccgccgggatgctggggagagaagccgggaggctcagcctgaaagtggctcccaacctccaaggcccttgaagtccgccctcccctccagccatatctgcatcgcttcccacctccgggcctttgcacttgctgggcctgctccacccgttgttccacagtttgcttgcacagagggaccttccctgacccctgaacctggatacaagctgtgtctttgccagtctgtgtctttgccttctgctgtaggtccagcacctacagacctagagccagggctgacatgacctcgatgctcagaaaccatctattgagtgagctggatgcacgctgagcacagcagtgggagcagggcctgagactgcccacctgagtggatgcatgtgtgtgatgtctacgtgctaaggcaagacaggaagtagttccaagggcctgagtcaatgtgtctgtgggacagctgaatccatgcatggggaaaagggggtgtacccatctgccggtgacattggatgtggcagggtcccagccaaggcttccttcctctcactcggcctcatggaggggccatcttttctccaagttttttcaggctactagacctttgctttagctattccttcccctcggtgcactgcccctgggctcccatctcttcagtctagaggcgatggaagtattcaatatctatgctgtccaatatggcagccaccagccacactggcttttgagcactggatacaggatggtgcaagtcagaggctaaatttgcaattgtacttcatttgaattaaaatttttaaaaaattgttgttttgtctttgaagcagagtctcggtctctcgcccacgttggagtgcagtggcttgatctcggctcactgcaacctctacgtcccaggttcaagcaattctactgcctcagcctccggagtagctgggattacaggtgcctgccaccacgtccgctaattttttgtatttttagtagagatggggttttgccatgttggccaggctggtctcgaactcctaacctcaggtgatccacccccaccccccctcggcctcccaaagggctgggattacaggcgtgagtcaccgtgcccagccggaattaaaatcaaaatttaaatagctgcatagggctagagactagtgatggatagaacattctagaagctctcctggatctcctgtcataccaatctaaagcaggggtccctctgcaaccttccactcttccttcatacctgttacaagtaggtcattggtcatgggatgtctgttcctgtgccatccttgcccacaggccttggacggatcatgcacacctgattttcctccatgcccagaacccagcacagatcttggcccttagatatat

SEQ ID NO: 1560889 - DNA, 4001 bp, Homo sapiens
tgggaagcagaggtgggaggatcacttgagcccaggtgttggagaccagcctggacaacttggtgaaactccgtccctacaaaaaatacaaaaaattaggccgggcgcggtggcttatgcccgtaattccagcactttgggaggcctaggcgggcggatcacctgaggtcaggagttcgcaaccagcctggccaacatagtgaaacctcgtctctactaaaaatacaaaaaattaggcaggcgtggtggcgcacgcctgtagtcctagctacatgagaggctgaggtgagaggatcatctgagcccggggtcgaggctgcagtgaaccgtgatcacgccactgcactccagcctgggtgacaaagtgagactctgtctaaaaaaataaaataaatgaggtaatgtatacgaatatgatgcacggagcggaccttcaacaattatttttattgctatgatctgcataattggcacaacagggccctgccacatcgaactgtttaagctcagaaccgtgtctgtcacatgtggagcgatccatgattgatgctatcattatcaccaccatcatcccaccaacccgcccatcggaaacaagctttcatcgaatcccatcgttttttccttttttgtaaatctctttcctcggcctggctctgccgcccaagtatgctcgtcaggcctttgcccacctggaccgggcgcgggcagcccggggctgaggattctcgagccttggtggaccacaggctcccgtcgccccgcccaagggcctggaccgcctgtggtctccatggaaacccgccagccacagggggcgtgacgccgttgagacagacagagatattcacctatcagatcaaagttatctgggcagggcgaacaaacgggacctccgagtggtacgtccttaaggcggggcgggaatacggcaacgggccgcgggggctgttactgtcgctaccaatcaagagtcgagatggctttgatggacaggcatagcgcgagtgcgggctttcgcccaaccggcgggccgctgtcccgaaaaaggaccaatgaggaggcggcaggggtggggcgaaggggccggttgctccggaagtggagggagggggtgaaaatggcgcccagctcgaaatcggagcggaacagcggggctgggagcggcggcggcggccccgggggagccggagggaagcgggcagcagggcggcggcgggagcacgtcctcaagcagctggagcgggtcaaggtgaggcctggagccggagtggggagcgcgccggagggtggggagtagggacgagggaggcggagggaggagggcgttcgcggggtgaggggttgggggcggggccccaggggagggggctcggatgcagggcctgggcggggcccgggggagatggcttggatggagggggctcagttgggggcctggatgcaggtggttgtgtcgggtgaccggcaaaggggctgggatggagggggttgggggcggggccccagggagggggctcggagggaggcgaccccagaggccgcagggagaatcaggaggaagggggcgatccaggcttttcaaagctctgctcccatggttgctccataatggaaccttcccgccccctttgcagagcccctgccgctggctttgggcttcctccgcctgatgttcctctccctgcccaagccccgaccacacatgagctgggagttccagtacctgggtgggcctccccattgaaagtgtgggagctccctggatagggctgagtcttcccccgcagagtgagagttaccgaagcaggctctgtctcctccatcagactggaaactcccagagctgggggatgatgtctctctcccccatcagtttgggagctctggagggcagaaatgtggatctcttgcaggtgggcagtaactggggcaaggctgtgtctctgtggacagggactgcgccttctccgtgaggctggtagctttgtaagggcagtgctgtgtctcccccttttgactgggagctccctgggctgggacagtctccgcccttagcctgggagctccctgggcttggctgtggttccgcccttagcttggaagctccttgggcagggactgtgtctcccctgtcggcctgggcctggctggccaggctgtttcctccgtcagactgagacctccatgtggacagggctgtctcccatcagacagggagcttcccagacaggactcttcccatcagattggaatgtcttgaaggcagagttgggtagcaagactgaggctgttcggatatccctgtgcctggcttctgcctgtcagtccccgcagatccttccgcggtgaagttttggggatgagggattcccttggattccgttggaaggcggtagttaattgggaagggggcgttgggtcattggttaggctcacccttctatctgcctcgactggcccccagcagaggccagagctgccccggggaggaggagcccccttgtttgaaggctggtgggttgggaacagatgggtgcaggtcaggactctgtcccagcctccttagtaggataaatacccacagcttagggacagccttcagggagggaagcaggtggcccagcgtgggacagggtgattggggaactttcttgggggcggtgacgctgggctcagtcaagagggacctgaggctgaagaggtatggaactgggaaggtggcctgggtccctggtggagatgaaggctcaagcgcggtccatctggctttactgtccccatctgcctcagttgttcccaccttccagagcttggccttcttttgaccattatggtgggctgggccggtctggacccggtgagagccgctctgcctctctgccgtgggtgagggggctgggggctgcagatggtgcctgaagtgccctggccaccccttccccagatcagcggacagctctcccctcgcctcttccggaagctgcctccccgggtgtgcgtgtccctcaagaacattgtggatgaggacttcctctatgcagggtgaggctgggcccaggcaaagggggcaggtgggcgggagtggtgggctcgccctgacctggccgctgtgccccctccacccccacagacatatcttcctgggcttttccaaatgcggccgctacgtcctctcctacaccagcagcagtggggatgacgacttctccttctacatctaccatctgtactggtgggagttcaacgttcacagcaagctcaagctggtagggaggcttcaacaccaggctggcccttcagatggtgtggttcagcaggtcacagcaacctctgagcctcaggttccttgggtgtaaaatgatcatcatgtactcctggggtcatcatcaagattccatgtgttagatccaaccatatgaaattaccagggcctggcatggtagctcacacctgtaatcccagcactttgggaggccaaggcgggaggatcacttggtccgagtagttcaagaccaggctgggcaacatggcaaaaccctgtctctactaaaaataaaaaaaaattagctgggcatattggcgtgtgcctgtagtcagctcctctggaggctgaggcaggaggatcacctgagcccaagagtttgaggctgcagtgagccatgatcacaccattgcactccagcctgggcaacagagtgagaccctgtctctaaaacaaaacaaaacaaaacaaaacaaatgaaggctggccacagtggctcacgcctgtaatcccagcactttgggagcccgaggtgggtggatcacctgaggtcaggagttcaagaccagcctggccaacatggtgaaaccccatctctactaaaaatacaaaattagccgggcatggtggcacatgtctgtaatcccagctattccggaggctgaggcaggagaatcgcttagaacctgcgaggtggaggttgcagtgagccgagatcgaaccactgcactccagt

SEQ ID NO: 1560890 - DNA, 4001 bp, Homo sapiens
ggggtgttcacacccgtgaccccgtgaccaagtgaccccaagcactgattctcaacttcccatcagcccaaaccagccccataccatcatcacccccacagttaatcccaaacaccccatcactctgacccagtcttataactgccaagatgtcaaaccccaaacccccacaatcgaccccaaatgtgccatcacccccacaatcgaccccaattcccccaacacccccacaatcaacccaaatgtgccatcacccccacaaccgaccccaaatgcaccatcacccccacaatcgaccccaaattcctcaacacccccacaatcaaccccaaatgtgccatcacccccacaatcacccccaaatgcaccatcacccccacaatcgaccccaaatgccccaacacccccacaatcgaccccaaatgcgccatcacccccgcaatcaaccccacatgccacaacacccccacaatcgaccccaaatgcgccatcacccccgcaatcaaccccacatgccacaacacccccacaatcgaccccaaatgcgccatcacccccgcaatcaaccccacatgccacaacacccccacaatcgaccccaaatgcgccatcacccccgcaatcaaccccacatgccacaacacccccgcaatcgaccccaaatgtgccatcacccccgcaatcaaccccacatgccccaacacccccgcaatcgaccccaaatgtgccatcacccccgcaatcaaccccacatgccccaacacccccgcaatcgaccccaaatgtgccatcacccccgcaatcaaccccacatgccccaacacccccgcaatcgaccccaaatgcgccatcacccccgcaatcgaccccaaatgcgccatcacccccacaatcgaccacaatgcgacatcacccccacaattgaccccaaatgcgccatcacccccacaatcgaccccaaatgtgccatcacccccaccatcaaccccacacgccacaacatccccataaccccaaactccccatcacactaactccaaacaacactataaccgccaagatgttgaccctaacaccactaatcctcagtccccgacaacttccagcatgtccacgctcacccctctcatcttgggcatgcagagccaatctgccaaggcaaagctccatcacagcctgctctgcaccgccctcctgcaagtgtgttcctataccccaccacgctcctcagctctggggcacccctccagctcccctcaccactgggtctcagccctgcatgcccccactcccctccgtgggccccacctgcagggagaggtgctgagcggctctggtgatgttgtccgggaacactcgaaggtccaagccatcacagtccacagtgtcgactcgggggcaggagcagcgcaggggacaggcccggggcaggggctgcaagctctcccccaggtgggggaaggcagcgtcttccaagccggcgacgggcgggggccccggcaacagcaggagcagcagcaggctcggccactgcgggggagggagggtcagcgtgtctccaggctgggcgcagggtcgccatggtgactggagcatcccctcctcggggagggtcttggtggggaggcagtggccagttggcagagcaggggtgggggggcaggcaggccccaccctcagaccctcccgtgccccaccttaccatggccagccctgactctgccatctcgcccaagctgctgaccaggacttcctaatggaaaccaggcggtcacctcctggagcctctgctgtggccaccaccgccccccatctccagacccatgccaccccccacaacagcctgttctcccggggctttgggggagctggcccacccccttccccgccctggggaggacgggcaggcggccggatggggtggtgaggacaggccagcccgtccccttggtcccccccaacaaccaccccatctctgctttcgtaacctcagccagcctgggccgggccacaagaacaaggaatgtttggggaaaagctgagattcgtcctgtctggtatttgggacgaccgcaggagtaggggtggggatggagggatggggggagcttcggggcacaggagagttccgagaagcaggggcgggcagcagcgagggattagggaggcctgagcttagcctggcagcccagatgccagcctgggagctcctgaccaggtctgctgcccggcacccacctcccctctgctggctggtcttgctccagacacccgccccctcctccccccgcaaatggccacagccgcctggaaggaaattacatatatccaggcatcagcctggtggttaagagtgtgagcttggtgccagcctgcctgggtttgaacctgggctgtgccacctctcagggccttggtttccctttctggggtaatggttggctcaccaccccacactcccccacagtgttgtaaggattatacgaagtgtgcattcagaacagtgcctggcatatcccagggctttggcacccgtggatgggggtgacaagctggtctccacatgaggtcaattctcccagacccacaacttaccaacagggcggcttcagacaggtccttctcctgcccagacctcagctttcccacacataaaatgggattgacaggctgggtgctggggtttatacctgtaatcccagtgctttgggaagctgagacaggaggatctctcttttgttttttgagacagagtctcactctgtcactctgtcgcctaggctggagggcagtggcgtgatctcggctcactgcaacctccacctccggggttcaagtgattctcccgcctcagcctcccaagtagctgggattacaggcgcctcccaccatgcccagctaatttttgtatttttagtacagacagggtttcgccaagttggccaggctggtctcgaactcctgacctcaggtgatttgcccaccttggcctcccaaagtgctcggattacaggcatgagccaccacatctggctagaaggatctcttgaggccaggaatttgagaccagactgggcaatatagtgagaccctgtctctaaaaataaatttaaaaaaaaattagcctgggctgggctccatggctcacacctgtaatcccagcactttgggaggcttaggcaggcggatcacctgaggtcaggagttccagagcatcgagcccaacatggtgaaatcctgtctactaaaaatacaaaaattagctgggcatgatggcacgtgcctgtaatcccagctactccagaggctgaggcacgagaatcgcttgaacctgggaagtggagatcacatcactgcactccagcctgggcaacagagcaaaactctgtttcaataataataataataataataactaacctggtatggtggtgcacacccacagtcccaggtactcaggaggccaaggcaggaggaacacttgagcctctgggctcaagtttgaggttacaatgagctatgtgccactgcacgccactctgggcaacagaataaaaccctgttattaaataaagaaaaaaaaagtggggggatgacaaaccccccccctcaaagagctgtcttgaagcagaacgaggcagtgggtagaacattttaagaatggtggctgggtgtggtggctcatgcctgtaatcccaacacttttggaggctgaggcaggaggatggctctaagcccaggagtttgagaccagcctggtcaataatggtgagacccccgtctctaaaaaaattttttaaaaactttgtggggggccaggcgcggtggctcacacctgtaatcccagcactttgggaggccgaggcaggtggatcacaaggtcaagagatcgagaccatcctggctaacactgtgaaaccccatctctactaaaaatacaaaaaattagctgggtgtggtggtgcgcgcctgtagtcccagctactcaggagcctgaggca

SEQ ID NO: 1560891 - DNA, 4001 bp, Homo sapiens
tctactaaaaatacaaaaattagctgggcgtggtggcacacacctgtaatcccagctactcggaagcctgaggcatgagaatcgcttgaacccgggaggtggaggttagtgagccgagatcgcgccactgcactccagcctgggcgacagagcaagaccctgtctcaaaaaccaaaaaaaaaaagacatgtgagttgaaactccctgtgaatatcaaccactctggtgagtcttccctgagcgcacaggttcttctcttggctcccaaagactatcactgctccgccatagctcagcgcactctggactgaaatctcctgtccttccccaaccaaactgaatgatcattggctccccagtgctcagcagagggcctgtccaaacagcagctgtcagaaacacataagagagggaagagcatttcagggggagggaaggaacctctctagggggaagagagacctgtgggggggaagtgcaggaaggaggagaagcggccgtgcgtggtggctcacgcctgtaatcccagcactttgggaggccgaggcaagtggatcacctgaggtcaggagttcgagaccagcctggccaacacggcgaaaccccatctctactaaaaatacaaaaaatgagctgggcatggcagtgggtgccgtaatcccagctactcaggaggctgaggcacgagactcgcctgaactcgggaggcggaggttgcaatgagctgagtttgcaccactgcattccagcctgggtgacagagcaagactctgtctcaaaaaaaaaaaaaaaaaaaagagaagacagtggcaacaagttccttcagtggaagggctgaggcgaggcactgacatcgccctgcccactcctggctccgctctaaaccctgcccactcactcccccactaatctttgccttcagagcggcaaccccaacctgcttctcccttagccttccccatccagcctgctgctcaaaccacaaacccaggagtcatcctggactcttccccttgctcctacgcccagtccatcagccagtccccctgtctccgcccgcaaaggtaaccggagcctgattctctgcctgcaggacgctctccctcctaacagatctccctccttccattcttattcctgctacaatccaatttccactcagtggtgagtttttcaaaacatggggcgaatcgtgttgtttccacgctcaaaccctcccacggctccccgctgaacctagaataaaggagaaattccataccaagttttacaaggccctataggatctagttccccatcatgactccgacctcatctgtgtttctctcgtcccctcggctcctgctacaaatacgccaagctccttccacctcagggctttgcacttgagggtcccagagcggtcgattctggaccactccagctaaagcaacaggctcttcgctcattatcacgttaccctgcgttagtttccttctgagagcatctcacagccccagagcactgctttactgatctattaaaactcatcacttgtctaccgtctgtcttcccgagacagggacttctctgacttgttcctgcttccagaaaagtgcctggcacagagtactcaaacacccagcgaatccaggatgacaccaagcccgcacgtgcaccacccagtccccccagctcctcccgggccacgtcccgccccacggtgcccggcgcatgcgccccctgcccgccgaggaattccacccccaccccggccttttcctgctcgtccccgcgccctcgcccaggaaacccctggcccctgccctctcctgcgcgcccccgggccaaagggtgccctcgcaaccgtctctcagatctatgtgcctggctgctcaagccccgttccctaccaggcccactgccccgaactccctttttcccctctactcacccgcttcaaacagcgtttcccgccacagcctacgccgccgtgacccctgactcccgcgcgcgcaagcccagagccgcggcgctcagagacgggccacgcccccgcctgcccaagtgcgggcaaggccacgccccgcttgttcgactgcagggcaggccccgccccctctctcagcttccgaagtggcctcgcccccttgctgaaaaattcccttaactccgcctccccatgacctgtctgcccgaagccacgcccctccgcgcggctaccttcacgacctcgtgcggtctgggcgcgccgcggttctgttctctctcctcccaccctcgggtgttgcgcgcgcatcctccgcgtccccccgcccgcctctcgcccggggccgtgtagggagcgctgccccgtcgctgcccagcagccagctggtgacctgacgcccaagatccccgcagaggctggccgataagcggtagagtcctggcttgatctgttctccttcatcctagcttcagtttccctatacgtaaattagactcaacaacgcatgatagggacacttgtggggcgcccggtacactactcttaggataaggtgatcattggtaactactctcacttccgctgttccccgccccaaataaatacacctttaagttgcatccctccatccaacccccctttcgccctcgattggaattgctcattcagctccttcagggctggcacaggggcaggaaggattggaggaacttcgtcgcttcgctccgaactcctggcgtctctcctttcaaactttgcacgtgctgttccctcaacttggaggcccagcccccaggctcttgttttaggtcccagcgattgcctctgttgtgataccttccctgatttcctctagccccaccacagtgccacgctcattaaagtccctatcccccgagtcttggtaggaggatggttatcttgttcacagatgtttccagtgcctagaattgtgcctaactgtagttaatgctctggaaacatttattgggtgaatgtctccatctctagaatggccaacccagtgcctggcccacaggaggcctcagcaaacacttgttgttcggacagaagtccaggtcccctcattcacttaaatcctgtttatccttcaagggtgagttctgattcaccttgtccagggaggtgaccctgaggctgaggcctctgtcctgaactttcacagcaggcgacacaccacccaacactgggaccctatgtgccacccttttcccaacagcctggggacacccagtcccacctgctcaatcaggttcgggcacccagtgtcactgaggtccctagaagcccgcgccctctccatcttgcactccagctccgggctggattgtattcatattttattttcctgtttctgtttttagtttttattaaataaaagcagaggaagaggaaggccctggtctcccgggctaggggggagagccatgggtcctcccctccctctgttcaaggtgcactgcgtgctgggcttgaggtgtaagctggggagggagggcagccgggaagggtcagtggtcgggacctgcaaccctttcaccccttctggaagactcgctgggcagggagggagcctcctggacctggactggggcttatcccaagggatgagagccgataggtctacaggctcggcccagggccccttccaccctaggaagaggaaggggtgccggcgtctatctgctggagggtggtcaggcaaggctgtggggctgggtggccagcccctcactcgtggacgtcccagatctccgacagcagaggcggcagcttcttgtcctggagccgcaaggcgaagacctgctccgagtgcacagagctcagcgtgcgcaggctcaccagcttcatgagcatgcgcgggaagcgcagctggtcctgagggaggaggcaggtgggcgctggctgagcccctgccctgccaggctttgggaggcccaccccaacagaaaggagggcccctccccgaccaggcgtgggagccagcgtggggcccgcctctgtgcttgga

SEQ ID NO: 1560892 - DNA, 4001 bp, Homo sapiens
gggtcccaggggtcctgggaaaagaggcccgagcacaagctcgagggacgagtaccggacgctgacaggggagagggggcatggggtgcggaggaatgggctggggcgggcaggggccgcagctcacaaggaggctgcgctgacccagacggggcctcctgggccaggccaagaagctggaagtgcacccaacggccaggatgggggagccaagggacactagggcaaaggacatggggggctgggggtgagtggggaggcccttgtgactctcctcgttggcaggaagagagaaggggactgagagggaaactagaaagaagctgagcatgagaggggtcagagatcaacggcatcacccacagcaaggaaggggaggggagttttcctcccagactgggcagagagacaaatgctgggcaccaggcgagtgggggtgggtgctagcgaccggctcctcggcaggtgctctggtggcttcaccggaactcccccgggacccgctgctcacctggaaagaacacaaacatctggtcggtggggtcatcgttgtgggccaccagcacggtgaggtccgtgcgccgcggccgcccctcactcggcttgtccccagattgggctttgaactcctccagggtctggtcaagctcgtcctgggtcaccagatagccacggtcgtggcacagctgcagagagaaagaaccagctgaccccagggcagagagaggaaggcggccaaagctcgtgacccggaagtcagacctgcggctgctgcagaggacagaggtgaacagcaaacgggatgaacactcactgtgtgctccatgacagccaccccggcccccacagcctcacaccacaggatgggaccagtatgatcctgagaggctcccagagatgtccagccttgaccaagaccgtctgtccacccagcctcacagaaacctggcagggagcaaagccctccaaaccactttgcagagctaccctaaaggcagggacaaaggcggggcgcggaggctcacgcccgtgatcccagtacttagggaggctgaggcaggagggttgctggaggccagttcaaggatgcagtgagctatgattgcaccactgcactgcagcctgggcgacagaatgaaaccctatctcttaaaaaaaaaaaatgacagggaccgaaacagatgtgacttcaggctgacaatgtttgaggatcggagaaagaagaatcaggctgcggggggcttcgctgaggacaagggcaaagggtgggaagcaagacaaagcaaaagctctcaaacggccccaatggctgaggcaataccctgaaccgcaggtcctcaggcctgtgcccggcttccaaaccggactcgacccagtggcctccatctgccccagaccccaaggcacgggttccgagctccacgtccccatcgaaagccccagctcgcccgctgcttcccaaccaccaactctgccagcctcggatgctgaagactccatggggttcaggacgcaaggacaaatagcgacgctgaatcacagagaagggcagagtctgggggcgccccccgtccccattcgcggcttcctcctcctctcgccgccacgcgcgccgcaccagcccaagccgcccacccacccctaagcaccgcacccagacgtctcgaaaccccctcccttccccgctgccggctcaggtcgggtccagcgcctggtatccccggcgacctctgggcctcccgtatcggcccggcccttcatcgctgctgctccgacgagagtacgaggagacgccgtgctcgaccccacctcgggcccctacacccgccgcccgcgcccccgcccccaacaccaggcgcggctcacctgcatgatggtcttgcggattttccagagccggtacgtctcctcctcgtcgtccatggcagcctccgccgccgccgccgctcgcaccccttctccgcgcgagaacccgcgcggactgcgcctgcgccgaatccgaatcaggccccctccgcctaaccccgccccgcgctggtctgtcgtcggcgaatgcctgaatgcagcaacgtctcggatcggcagcgccaagggcagcccgagccttacgagagcggcagttggctgagcgagtctctcgcctccgtagttctcgtgtgtctttggccgcacagcctctcgggagttgtagtttccgttcaactcccaccttggagcaacagtttagaatcccacgaggcgggggcgaagtgtgagcggggaaactgaggcctggatggggtcaaggggcagctcggctcctagggatggtctgggagcctagtgggaactctataaatatttgtgcatcaaactgtacagggtttcctccattggctcctggccaggtcagggttaattcccttgggcctcagtttccctacctgtgcaatggcaataaagtgtccctactttagacggttaactgagagtcttaggcatctctctaggtgcttattaagtcccctcacctctgtcctctcccctgagcgccaccagcctagcctgggtatctccccagcctagcctgggtatctccccaccccagactcttcctgtctttgcaaacctcctcacttccccaggttcacggagaaccccagcccaacacttcctgtgtgcaggctatcagtaacttattcagtgatgcattcgttaattcaacatttactcagcaacctacagtgatggtgaataaaacaggccaagtatcccttgcattcagataaagacaggatttagtaaaatataataaataacgtggccgggcgcggtggctcatgcctataatcccagcactttgggaggctgaggcgggcagagcatgagatcaggagttcaagaccatcctggctaacacggtgaaaccccgtctctactaaaaatacaaaaaattagctgggccaggtggcaggtgcctgtagtctcagctacttaggaggctaaggcaggagaatctcgtgaacctgtaaggtggaggtttcagtgagccaagatcgtgccactgcactccagcctggacaacagagcaagactctgtctcaaaaataaaatgaaatgaaataaaataaaataaataacaacgttagaaagtgacaaagctacggaagaagaaagagcagggaggctaagtgacatggggagaatgggagaactgcagtatcacatggggaggtcagggaatacagtgaggatagattcaagcaaaaatcccattagcagtggtggctcatcactgtaatcccagcactttgggtggccgaggcaggcagagcatgagatcaggagttccagaccagcttggccaacatggtgaaaccctgtctctactaaaaatacaaaaattagccaggtttggtggtgggtgcctgtactcccagttactcgggaggctgaggcaggagaatcacttgaacccgggaggcggaggttgcagtgagccgagatcgcaccactgcactccagcctgggtgacagagcaagactccatcgagaaaaaaaaaaaaaaatcccattgggcgcgatagctcacacctgtaatcccagcactttgggaagctgagaggggaggatccctttgttgtagttttgtaatttttagttgtaagtcacggacttttttacactgatatttgagattctttttggggggctgtcaggggctactttttttttttttcctgacacggaatctcgctctgtcccccaggctggagtgcagtggcaggatctcggctcactgcaagctccacctcccgggttcacgccattcttctgcctcagcctcccgagtagctgggactacaggcacctgccaccacgcccggctaattttttgtatttttagtagagacggggtttcaccgtgttagccaggatggtctccatctcctgccctcatgatccgcccgcctcggcctcccaaagtgctgggattacaggtgtgagccaccccgcccggt

SEQ ID NO: 1560893 - DNA, 4001 bp, Homo sapiens
agcagatggtgggtcatgggcggaagagtctgaagagcttggaataggtaccagaaatgctcaacactggaaagcagggtgggggcgctttagtccagagcccattgccctctctgtccagccctcccctctgcgcccatctgtgcagggatccggcccttccgctgcagtgcttgcgggaaagcgtttacgcagcgctgctccctggaagctcaccttgctaaggtgcatggacagccggccagctacgcttaccgtgagcgccgcgagaagctgcacgtgtgcgaggactgcggcttcaccagctcccggcccgacacctacgcacagcaccgcgccctgcaccgcgcagcctgatacggtgtgccagcgtcctccccacgaggcaaataaacacagaaaactcacgcatggaatctggtgtttattacactcgggggagagaggaggtcactcggtccagcggtggccgcagtgtggggctgtgcacacgtagtaaaggcgcatggcgtcctggcagaaatgatgcatggttaggaaggatttggacccagcagcgccttaccccaaaagaacaggcaagagaacttcaccaataggtaagggcccggcagagttccaagaagcgcagggtcacccacattgatatccccgcccccagaaaggaccaaacaagccccagatacttagaaagccctcgcgccacttacctcggcccgcgcactgtgtgactggaagaacacagcctccttgtggccgcacctgagagggtaggggctcggtcaccggaggcttcacacccttccctcctcccttcgcccagtgaggagacgagcctcactttacctccccagtaccagctgaacgctcacttttggcacgggtggtcctcggtccgcggcaacgtggggtcctgggacacgtcggcgataatctgggtcagttcgctgcagggacgcgggggtgcaaaattacgctcagacccagcctccagagccaacacccccgcccccagctcagggcccgccactcactccacttcgtgcgtgatcttgttgacatagatgcagctgttgtcggcctcctgctggtaatcacagttccggcactacgagagggcgagtgtgggggaaagggggtcacggaaggattccagacaagattgggaggagagggcagggtgatcccggaggatatgacgacaggactctctttggggatgggcaggacatgagagtcaggatcacttgaggtgcagcggagggcgaacagggagtccgatcacagaggcagggggcagggcggggccacgctgggaacaggtggacctgccggggaagaccccggcgctcaccgcgtagagcagaatgcggttctccttgtcttccttggggtacagcatgttgttactgtggggagggggaggtgccaggggttagttctggagccattcctcgcccgccttctaacatcacccgctccctccgcctcaccattcctggcagaagcgaatacccacgaagcccggctcgtaagtcccgtcgggctccatggcgacgcgcagcccgcgcagccctcccagccttccgcgcttgctccgccgcgctacaggtcgcgggaggggccaggcctaggtgcttcgccaaaagagggcggagctgcgcacacgtgctggctccccgccgcctcgggctcggctctctccgcgcagaggtttcatggcttgcttcaatcttttgatatcttagagtaattgcttccaatttttgggcatcgccgcctcagtttacagaatagtatggatctggtgccagagccgggaaaacgatgcgcatcgtaaaccgcaaaacactgagcatccaggacagaagccaaggcgcttggcttggttgaaggccagtgcgcatgcgcgagtttacccttcgcggactgggcgagctcttgccactcctacctccgggcttcagtcttcgccgcctgttctggtcctttcccgggccgctattggaagaaccgtgaactatggaaggcccctctggattggctgggctggcccaagagtaaggagagccctcttcctggcggtggggaagggacggcggcgattggcggacgctcctggcaggagagcgcggattggtcaggcacggagcaggaggcggggctgatagcccagcagcagcagcggcggcggcggctgcggagcgggtgtgaggcggctggaccgcgctgcaggcatccgcagggcgcggcaagatggaggtgacgggggtgtcggcacccacggtgaccgttttcatcagcagctccctcaacaccttccgctccgagaagcgatacagccgcagcctcaccatcgctgagttcaaggtgtggccatgggggcggggtccggaggggcggggcgaagaaattggggggttcccggaagggggaggctgggaggggccggggagtgactgggcgggcccggaggtgatcccaggctgcggaggctggggacccggtcgcggcggggcgggtccggagagaactcgagagtgcagagatgagggccgggtccagcgaaaaatccgacggtccagagggcgggggcaagaggcgaggggctggattgcggccccgtgcgtcctgactggggggtcttttggaggaaaagggacgtggcgatggtcattgatgcaaggggcggggcctccgtggcctccttcttctcaccctgcctcctcctcacagtgtaaactggagttgctggtgggcagccctgcttcctgcatggaactggagctgtatggagttgacgacaagttctacagcaagctggatcaagaggatgcgctcctgggctcctaccctgtagatgacggctgccgcatccacgtgaggactctctatctgggacactcccccaccccacctttcatttggttattcaacagacacttgctgggctttgccctcagtcatacccgagataggtcctgccttcgtggagcctccagtgcagcctgacgagagacagacccatcattagacagggacagcctagagtggtctgggctgggatcaggaaatcccaggggactggagccaccaagaagaggtgcctgactccacctgggagaatcagagagggcttcctggaggaagggatgtctgagctgagggatgaggaaagggtgacttaagagaaagaggtggaaaggagggagcagggtgtacagaggcctagaatgtgaggtaggtcacagtgagcgaccaggctggacagcttgggagaaaccagaacacaggatctctttgtgcatccactcagtacatcctttctgtctttttttgagacagagtctcactctgtcacccaacctggaatggagtgcagtggcactatcgggctcactgcagccttcacctcctgggttcaagtgatccttgtgccccagcctcccgagtagctgggattacaggtgcccacccagctaatttttgtatttttagtagagatgggtttttgccatgttggccaggctggtctggaactcctgacctcaagtgatcagctcaccttggcctactaaagtgctgggattacaggcgtgagccaccaagcccagcccctttctgtccttattccctcccgacctcactcagtctgtagcagccacattgctccttgcacagtccaggtgagctcggcctctggatcctgggcctgaatggttcttttgtcatatgcctgcgtgcctcacccttccttcctgtcttaatttaaagtgtcagtattctagtgaagtcttcaccggcctcagtgttaacgtttacctcattcctttccccttctttgctttattttagatttttgtgtttacaagtaattctcctctgacacactctggatttctctcatctggtttatttactctctgtctccctggattcgagtgccctgagggtggaaattttgatcactataattcactactgtgtccccagtacttgga

SEQ ID NO: 1560894 - DNA, 4001 bp, Homo sapiens
gcggaggctgcagtgagccaagatcgcaccattgcactccagcctagcaacagattgagaatccgtctcaagaaaaaaaaaattgctgaaataaaaagacaagcgtgatgtccgccttcagagtgctccaaaactcaggagatacttttaggattaacagttgagagctttgttttgttttgttttgtttttgagatggaatttccctcgttgcccaggctagagtgcaatggcatgatctcggctcaccgcaacctccaccttccgggttcaagcgattctcctgtctcagtctccccgggttcaagcgattttcctgcctcagcctcctgagtagctggcactgcaggcgttcaccaccatgcccagctaatttttgtatttttagtagagacagtgtttcaccatgttggccaggctggtcttgaactcatgacctcttgatccgcccgcctcggcctcccaaagtgctgggattacaggcgtgagccaccgcaccaggcctcggacccttgacctcttgatccgcccaccttggccacccaaaagtgctgggagtacaggcgtgagccaccgcaccaggcctcgaacccccgacctcttgatccgcccacctcggccacccaaaagtgctgggattacaggcgtgagccaccgcacctggccaggttttttccctttataaaggttctcccgcctctcccttcccggctgcctaatggacgcagacaggatgtgggacagaagcaccggcgggaagcaagcacagggaagctcccacctccctcccacaccaccagccaggccaggacgagggcctgccaccgctggagcctgggctgtccctcccaagtttcgcagtcatccagtctccattaggcgcctaccccccagagccaagccaggacagctgagtcagttcagggttcacatcctggctctgcacatgtggccttggcggcggggccggggggggggtctctccagacataatcttgggcctcacctatgtccctggaaagtgggagcacctggtggggttctggggagggggaattacgagagctccaggaaggagcctgctcagcaaggacagggcccatgagcggtgcaagagatgtttcagcaacgccgtctgggcgtgtcctgggacccgagaggtggagaccgccctcagcctgtctcagaatctgagcctttgccttttctcccggcagcagggagcggactctcctctcccgggccgccgtgggggtcgcgctcaccctccagcagctccacgtggccccagtccttcctgcggtcttggtcttgctcctgggggctggcggacgagctcctcctggggccgcagacgccaccggcggtccctgcgggaaagacgagagcggctgagcggggccgggcgtgtgggcgggggcctccataaaggcagaagccgaagggtcgaagggcaaaggagccctaaacgcagcggaaactctcggagcacgggcttaagttggaaagaaactaagacagcgaaggtggaagggccccgccgcggcgaacacgggcgcggaaccgccgagagagggttcctcgcactcgaggtgcagcaggtcaaaggttaagagccctaaacaccacacctggggtcaggaggctgcataagaaaccacgagtcaaaggtcagactgcacggaggagcctcagtcgaaaagcgggcaagggcgagtggaaagcggggccgggtcggtgggctgcgcacgcccaggtgcaaagaggcaaaggtcaaagcgccaaaggccccggccgcgcggggaggagcccacgccgtggcccccgggctgcctggccgtctccctttgtgttaccttctttgccggggagtcccgggcggccgcaaggccgtagggctcgtttgagccccgccgctccgcggccccagcaaagtgccgacattacgcacgccgctccaggccaccccaccggcccgcgcctgcgcatgcgcccgcgccgcctgccgggagttgtggtttcatggtcgacggaggctgcgaagggaaaccccagccggaagtagactcccaggatgcagcggaggcgcgaaggcatgcgccggtggacgctctgattggttcctcctgctgtttttaaagggagggggcgggacagagctgttgccgtggcaactgggaggcactctcaggctgttttcccgaggacctcaaatccggactttttttctgtttttctttcttttttggttttgttttggacgcgttgtggcccaggctggagtgcagtggcgtgatcatagctcagtgcagcttcgaactgctggggtaaagagatcctcgcccctcggcttcccaaagcgctgggattgcagacgccgccaccgtgcccggctttttttttttttttttcaaggcatactcatctaataacgaggacagcatctgcaatttagagattcctgtccgcaaccttcattgctccaacgacaacttttgggtaagagtcattaggatgccgtctatcatggaggaagctgaggctcagagagggccaccaagttgctggaagacacagcacgtgcgacctcagggaggctgcaaggagagaaagccccagtccgcgagactcccagcctccagcttcagtttaccctccaatccccaagccctcaggggcaggagccgaatggagcggcaggcttggattcacctgctaagtggggtgaggtcaagggaatgaaataaacctcggagcctagagcctgccctggtctccgcgtgatcctgcctaggaggagcagggcgggagctttagaatggaacctggaaggtgtgcccacctgtgtcgttcagccggggcagcaggccagaggcgggagcgcctgctgtggggcagtaggcttgggaagggtgagaataggaatatctgggggtaactgtgttccaggctaatatcccagttgcaaaggggagctggtttggtggctcaggcctgtcatcccagcactttgggaggctgaggcgggcggatcacctaaggtcagagttcgagaccagcttggcaaatacgcaagcatgcctggcaacatggcaaaaccccgtctctagtaaaaatacaaaaattatccgggggtggtggcgggcacctgtaatcccagctactcgggaggctgaggcaggagaatcgcttgaacccgggaggcggaggttgcagtgagccaagatctcgccactgcactccagcctgggtgacagagcgagaacctgtctcaaaaaaaaaaaagtgcaaagggaggtcagttcagtgcctcaggcctgtaatcccagcactttgggaggctgcggcgggaggatcgcttgagcccaggagttccagacaagccttgggcaaccgagatactgagacccagtctccaccaaaggaaaaaaagaaattagccaggcatggtggtgcacacctgtggtcccagatactcgggaggctgaggcaggaggactgcttgagcccaggaggtttagactgcagtgagctgagatggcgccactgtactccagcctgggttgacagaacaggaccctgtctcaaaacaaaacaagtgcaaaggccctgaggcaggaacaagcgtggacagaggagcaatttgagcagagtggggctggggagagggagcaaagatgtagctggggctcagttagggggcctgaccacacgggggctcgggggcctcagctcaagctatcctccatccccaaaccctggcacttcagtttccccatcagcccagaacgaggactcgacctcactctggaagggcctggcagcctccttacagcacattccagacgctgctgccgacgcctgcgtgagcgcactgatgccaccggctgggaatgttttcgacagacggcagcaccctccctcacctgcctcagtccacctcagggtgccccagcgggctgtgacctcagacctcacccactactggggtcacctgcctg

SEQ ID NO: 1560895 - DNA, 4001 bp, Homo sapiens
agaaaagaaaagaaaagaaaataactacacttctacacttatagcagaacaactgcttattcagagataggagaagatgaggttggtattaagagcaaagctttcttggatgcctcttatcccaccctctggccacatctatgctagaagttccaagcacatggtttaaaaagaatgcttctcaaaatttaacgtgtgtaaaaatctctgggatcttattaaaatgcagattattggtctcctaccctagatcctgagtgtttaacatattcccagatactactgcaggtcagtgaatcacattttgagttgcattggtttaaaataccccaagttagaagcttgagcacttgctaacaaggtaactcattaaaagttatatgatatagctgtctaggatgtagatggttagaaataggttttgttaactgtaagatgtttaaaaagattcttcacattttaatatgaaattataatgtgtcacataatcgatggtgtcctgaactgataaaatacaagtttttcctttaaactcaaaatatacattggtcaataaagtttcaacctctaaaataaattccacacttctgtttcttaattttttgaaagaagaaaaccatggcactggggacagagtacaggtgtgaatggaataagaatgggactactaaggcctggtttatgagctaaatagctagaaaatgtaatttacactatactctgtaaatttaattccagctttcttgtacttccctgagaatgtttgatgcaaggtggttacaagttttttttttttgttgtttgtttgtttgttttgatactgggttttgctctgttgccctggctggagtgcagtggcacaatcatagctcactgcaacttcgacctcctggtttcaagtgatcctcccacctcagtctcctgagtagctgagactacaggtgtgtgccaccacacctggctaattctttttttttttttccagtttttgtagagacagggtctcgctatgttgttgcccaagttggtcttcaactcttggcctcaagtgatccccctgcctcagcctcccaaagtgctgggaccacaggcgtgtcccaccacacccagccaggtatgtttgtttgatcaagcaaaccaatgtggttgcaagttttatatatagcatctagttctccctcaaatggaagatggggattataaactgtagagagcaacttgcggggcctgataactttgcttcatctgttacaggtgcttagtaacagacttggaagtctttctgcaacaatacacatctaacaattactgaacatccattacttgccagaaacctcattacaaggtacacatattttttctcattacacttatgtgcatgagcaaactgaagctcagacatgccgagacaatctacttgatcatataggtagaaagtggcagagatgaaaaataaaaattctgattgaaggcccagtcttaacggtgtctacacgcccctccttggcacatgtcttctacccctaaggaccaaagctttgggttagtgatatcattccccagcagctctcggcgctttgcatcaggttaagagtgtgaaaccagctcgcagaaaggagcaggatcttgaccgcggtcaccccgggagatagtggccaagttgagccaaggcctggaaccctcctctagcatcgcacaccactgagcagcctccgggagaacctgcctccagccctgacatccctccctagctcagaggtcgagccaggctaacccgtgctccagccctcagtttttcttaggtagggtgggcccattcctgtagcggttctgttaggactccgcagcaacaggtagcccggacccatttcacccaccagtaccaagaccccgacccttaacgtccccaaccctctccaacttcgcggccccgcttactcttcattctcggaccgcttccggcgctctctgatgacgcactggcagctgctgtcgcagactctcggagctcggagatggcgctatgcgtgacatcaccggcgctcgcccacctcgggggcgcatgcgcctggaaagggattcggctactgagaacgtcgtaggcggtgttgctgagcagtggggaggagtgggctcgcttcctggggtcttttccgcctgcatcttttgggggacaggcagtagggttggggtaaaggcatgtggaatgcttgctaaggcctggagtggagcgaggcgaggcgacttggagaggactcgaaggaggttggggatctgggagggcggaaatgggacggggacggtggggtgaggtctttgtcgtccctaatcagcgcccttacggatgagccgaggcagcttccgctgtgagcacgggcaccgaagctgggacagcaggcttaggttctagttccgtgtctgctgctaactagctgtttaacctcgcttagggcacttcccatctgtaagcctcacttgcagtctgtgctgtgagtggggtcggcctcacaggtagtgatgcgccgcctgggtccctttgatagtttcagaaagctttcttgagactcagaatatttattagtttttatcaataaaaaaatcatagcaataagatcaaaggtggctcacaccgtgggaggcgcaggcgggaggatctcttgagcccaggagttcgagaccagcctgggcaacatcgggagaccccatctctacaaaacatttaaaaaaaattatccaggcgtggtggtgcgtgcttgtagtcccaactactcgggtatctgaggtgggaggatcagttgagcccaaggagtttagggctgcagtgaacctggattgcgctactgcactccagcctgggtgacagagtgagaccctgtctccaaaataaataaataaattccatataaataaataaatgaataaacaaactccattgctcagtggaaaggtgcaggaaggcctggtgcagacttctcagcagtgacccagtgttgggcagaactgtggagccccaatttctgctgagcactgggcctgtgctgggtgggagagaaaagaaatacggtccctttatgctaagtcagtggttctcaactttgagtacagtatacatttctttacaggggattctgggagtatgtccaaaggttttagtttgagaaacattggcttaaacaatttctttggtggtgaccttgtaccattttgattttaaacattagactgcaggcactgaaattggttcatcccagtgaccccgcgtgcattgactttataaaatttatgtattagtttttgcatatgtagtacacttatgcatttattttatacgtataaaatttggaaagaccacatttaaaccaaaacatgctgcctttgcagatgcctgaaaattgtaatttatgggactgatagagaacttttattatttttaaaattaaccaataagaattgtatgtatttatggtatacaatatggtttgaaatgtgtatacattgtgtaatggctaaatgagctatgagcgatgctaatacactcattttgtgatgagaacacttcagacctactctcagtgaaattcaggttattaactgaaattcactgttattaactatagtcaccatgttgtacaatagagcccttcacaaatgtgaactttaaaatcaaatgagacagcagaagatgttagccagtttcagagctgtgtactcaaggggggcccttttaggcaagacctctgtgattatggagattaatgagaagacctgtgtctttgaaagtttttttctagggttgttaggactcttaactcccagttgactccttctgggatccctggataactgccagtctcccctcgaattccctgatggtggtggggtgggtcgtccttgagttgcaattacaacatagttccttcatcattaaaatatttttttttttgagacggagtcttgctgtgttgtccaggctggagtgcaatggtgtgatctcggctcac

SEQ ID NO: 1560896 - DNA, 4001 bp, Homo sapiens
ccccagtcttcccacactgggctgttctgtgagaaatcccaagtaaagggtttagcctactgcccagcacctctgaggtccccatttaaccccagagaggaacgagtcagtgggagcagacaccctggatctctgtgtctacactgtatggacacacacacatatacacagttgcatacacagtcacctcaacaaataaacatgtcaccctgcaaatagtcttcctttcatcccacccctctcctcaccgcctttgcttgctcatacccactcattcttcatatccctgctcagacacccccttcctccaggaagccctccttgacactctaccaactaaatcacatgttttcagggctcctacgatcccctaatacctccccgtcctggcccaacccctctacctatgtccccctatcccagccctgacccctctgcctgggcctcccccatcccagccccaacccctctacctatgtccccccatcccagccctgacccctctgcctgagcctccccaaccccagccctgacccctctgcttggggcctccctcatcccagccccaacccctctacctttgtccccccatcccaccccgacacctctgcctgtgcccaccaccccagccctgacccttctgcctgggcctcccccatcccagccctgacccctctgcctgggcctcccccatcccagccctgatccctctgcctggacctcccccatcccagccctgacctgtctgtactgtcattggtgacaggtctgtcttctccaataaactgggagctccaggaggacagacctgagctaccctttccactgtacttccaacacccaacacagaactactcaatagatacatgttggtggaggacacacgggtgcccgcacacaatggcgcatataggacagcacacaccaccaaaccaagactcatgcccatggtcatgcctacacagccacaaatgaaacaggcatgaagggctgagtgcttgccatgttccaggcactgtgctaagcatgctacatgtattacctcatttaagactcccatcaacactgctgagtgatagccatcaccatacagacatatacacattctactaaatgagccaacagctataaatcaccttgtacagtgcctggtgcacaatgttcactcagccaactgacatttggtggagaaggcatttaataagcacacaaacaaacacataatgaaattcccagcagtgatacgtgccgtgaagaaaagataaagcagggtgaggggactgagagtgacaggatcagtgccagtttagatggggaggtcagggaaggctgccctgaggaggtgacatctgaggtgaatgaagtgaagaagggagccaggcaatcatcaccccacaatgccacacacaacagccccctacactcacaagcacacagcagtcccactcagagcactcagaactactgcacacacacatgcacacgcacacctgtaccagatgtgcacacacacactcaaaagggaatgacatcccccaagtccagcaacttggcattccaatccctttgcagcccttatccaaggattgcccatgtcacccaccccactggttctccacatgagggcccgctaccaacacccagctccctccctcccgtccccagacccttcggaacagggcaacagagaagagaagatgttggaagttccggtgcctgatgtggaaagagagggcaaagaggagctgtgggggttagcggggacccggcatgggagagagggagttgctagagtacagaggagaaggacaatggagacagctgaggaggaggggcaggcagggcccgcagagcaaacctaaatgtgctgcctgtcctctgagcagtggcacaggcaccagcccccttacctggagcccccatgctggagtgaaccatgctgcccgccccgccagggctgggggaacaactgtgtcatctccccaccctctctgggggccgagccctccctgccggaagtcactcagggaggaaaccacagggccggtccgcccccttcagaagggaaaataccctggcccacagacccgccccggcagcccggcccaccccaaatcatgtgtgtgtgctggggggtgggggctagtggggcagaggataagcaggctggaagagccgactcctacggctgcgatccaagaggtgcctgcaacagttgccccccgacttctgtcgcccccatggaggcaaacaagtctggaacagggaatgggggtctgggagagaaggtgggtccacagcagtaacaacaataaaacactagccagcagcttattggagagagggctttgccgatgcctgaccctgtgcctcactcttgacaggtgccatctccaatgtggtggtcactcttatttgccccattttacagatgaaaagactgaggatcagagaggtgagcagtagctttcccaaaggcccagagccaagaagcgttgaagcttaaaagcacgccgcggcagggaagatcaagcaagccctgcgcctatctgcaggtgagctgttgggtgccaccattgggaggaagtggtgcccgtgggcagtggtagtggggacggtgggtcggggacttggcctggggctacaataagtcgccggccaaatgcgggcgcccgaggcggctccagtggaggggagcaccaggtccccgggctgccggctggctcttcgcgctgcggcgctcccatttcagcgcttccctccgtgcccgccagagggcggcagcgcccagccaatgggccggagggcggggccggctgcggagaagggagcccctccctccgctcccctccccaacaccctcccaacacctccgctcgcacacctgcgagggtcacacaaaggcgcaggactcccggcgcaccgcagctcagacaaaggcgcgcccgagtccgctgccctcttcctcttggtgcccgaggtctgaggctgtggggctgcctggcgtctccagacaccccacatgcccgcctgggccccgcaggacatcctgcgccccgtggctggggggccccctaaaccacaggtgcatgcacagacgcctggactcaccctcacacacacaagtatttctacagatgaaccccagcacttcacacacacacacgtgtgcacacacacgtgcatgaacacatctatgtgcacaggccccaacaccagccctccctgctgacgatggtcactcccatatactgatacctcctctactccctcacatggacccatgggcacaagggcacttctacacatatgtgcccaagcatacttcctggccactcgcacccactcacacacaggcacactcagaaagggtatactacaggcacaactacaggagtgccctcccctgactgcacacgtgccctgtgcacccagacacacccaggcaagcaggtgggcacaacaggaaggactggcagttctcatatatgcacacgagaggtgaccgtttcccggcatctacactccacaacatcccgtatcgtaaaggccatttcacagaggagatccacagaccacacagcaactggccacaggatttctatacatgagggtcttcccgacagcagcctggtagcagtggacactggagccttgtctcaaagcgacatttacgcagtaagctttgttttcagttaggatttgttttggggggcttggaaatggggctataggacattatgggggggggcaaaacctcaccagccacccttatgctccaccctggacagactcaacatcatccacgtcaggaacacgcttttggatgtgaccccattccagccccctagagccagcagagaaggaccacccacttccagtgcggccaggtctgcagttcagtcctggagccggggaaggctgtatacgctccctgagagatgaaacaaccccacacctctcgcctcccatgctggctccattctcagtgcctcagacca

SEQ ID NO: 1560897 - DNA, 4001 bp, Homo sapiens
tgggaggagtgagcaatccatctgagggcctgtggcacctctatccgctgcacccccccatacctgccacctcgccaggccagacccaccttgtgcacgttgatggaggggaacaggttctggaacatggtggccatgagcttcacatgcataccatgggggccaaagctgttgagtaccaggaggggtgggtgggcaaactgctgctcgtgcatgcggtgccggcgcagtgaggagaccacatcacgcaccagcgagtactgtaggacaggagagaggagggggtgaccaccaaccacacatggctgcggacaaccccaagtccagctcccaccccacatggctttgtaccacctccacccctctcaccttcttgacctggaaggtcaaggtggggcctcctgggaggcgcatcagcttctgcaggagaagaaaagatcagtgactctggaggggtctagcagaggtgcccggagtaggcacctttgccccatctcttcttcagagcgtttactttgaagccagaaatcacagcagctcagaggcatatgtgttcatcatgagagataggggaagggggggtctgggggagatgaagggtgagggcgtctactcacaaagtagacattggtctctgttttgctcaggatcagaaagtgtgtgaccccgaggggcccagccactgccacgcagtccttcagcgagttcttcttacgaacctggaaatgacaaaaagaaaaaaagaaaacatagcttatcccttgttgtgacaactataagctgacggtgcagatcctgttatggtctgtcttgcatctgaccctttcaacaagcccagaggagcaaaaggatcttagcctttagagtcagtcggacgcagatttgagttctaactctgtctcttgctcacagcgcatcttcccattgacaaatgagcgaactcaggcccagagaggttaagtaacttgcatcagatactggggagaagtcagtttccaaccctgctttgctgcctccagattctagtctttttttttctaacacggtctcctccggtcgcccagactggagtgaagtggcacgatcccgattcactacagccttaatttcctgggctcaaggaatcctcccacctcagcctcccgagtagccgggactacaggcacgcaacaccatatccgactaatttttctattttttgtaaagacggggtttcaccatgctgctcaggctggtctcgaattcctgggctcaagtgatcctcccgcatcagcatccccaaatgctgggaatacaggcatgagccaccacgcccggctccagattccagtcttaactgtcaggcttaggcgactatctatctcccaagctgcgcgccctcactccagcccagcaaaagccctgaaaggcagaaatgatgctccccatgagggtctttttttccagctggggagacttaagtcctcccacagttttacagcgggagccattactgcagctacgaagactaggccgagggtgggtggaggcgggctgggggtggggtacaaacctgcagacggctggcagtgagcggctccatgacccgccgcacgtccaggctgagctgccggatgttgcgacccgtgcagcctcgcgtgaacacgaacgagtgcgggttcgcggcataggcctcgaggttgcggagctgcgcctgggcgcgggcgcgcttctggtgccgggactgcggcgacgagagacaaagggtcagcgccgcgacctcggccgggaccccacctgcgccacctgcctcccaagctgccgggccttaccctccctgactgtcccatgctgctgtgtcctccacgaggcctcctgcgtccgccgcttccggcgctgcgcagctcacttccggcgcctgagagccggcacggcgtgggacgacatcaggcgggcctgcgcactaggtggcctctgggagcggggaggggcaatcagatggagcggttgctatggagacacgggtgcctgtttctagggagaccggggcggggctacgcggctccgggctgcagagaaacgaatccgccggttcgaatcccgcttcggcccatttcctccagctgggctaaaaccactttctgcattccgaggctcctaaaatatcccaaagtaaggctgataatgtcccccgggcccacgaattaggagcgaccatgtatgcacaatgttgggcgctctggcgccaagtacttggggagaagccaccggagggaatgactgtggcaatcattcactttagtctcgcaactcctctgggccagctgtcctccccgggtacccctgtctgcagacaggctgagggatggaaactccacatcaccttctggaaactcagggcaaggcgggcgtttcgtgaataactcgccccctccttctttccgctcaaagcctcagtcttggcctcaggcctctggcttcttccccaaaaccttgcagtgggggaaagggacaccccctcactgggctgaacattactctctcctcccccatcggcctcctctccctccttgctctctctggcaccccaattcttcctcctctcccccagatgtgtctcccctccccctcgtcttccccctgtctctttctccctcttgtaactttgtctctgtcatcagttgtctctttcatcatttataactgaagatggaaactaaagaagtttcctttctctgtgtctggccccatccctgtttctttcttctcatctgcctccctgtggtctctccccatcttcccatctctctctgtctctccccatctccccgtctctccctttctctgccatctccctatgtctctcccatctccctatgcctctcccatctccatctgtctgactctctgtattcttcagcccctctctgtgacttatgaagttccctccctctctactgccaatggggaagccagagggggctgagggtggggggccgaggggcccagtgtgggggccccaacccaggcccagagcccagcctggcagcctctctcagatctgggacgaccatttcctttttcaaccctggagtccactcgagttactcgggagctcaggatggtgcagaccaggggaaggaggtgactctcccggcgtgtggctggtcgtcggtggggcctttggacaggtctcagaccctgggcctgggctctgtggggctctatgtgagtttctttgtacccctgggaaatgactgcatggttacttcccccagttccgtcctcgtgtgatttgacttgtgtgaaaatgtgaccgagtgtgtgggagacagacggtgacctctgtggtgcggtggataggtttccgggtgtcaactgtgtgtacctgttttgtatctgtgcactactgtgtgatcacaagaaccaggatgtggacaagcctgacacacagataaagacccactcagcccaccccatttccctttaagttgtgatgtgtgtgtgaccatatttggaacatacagttgttgcctgaaactgttatgtttccagctgtgtctttttaaaaattttttttaatcaatgagatatcctttatttatgaaagcatagttccaatgcagaagtcaagctttatggttatatattaggataggttcagatccaatatgacaatgtttagcactaactttaacatgttaaagctctgattcctgaatgtttttctcacttaatatattctctccaatgacaagctggtgtgcttggcttcttatgctgaaaaatatatgcctgaattctataacaagctattaacaaaatcatgaatagttaattaaataagtgccaacactacatggaacttactggccaccaactcagaaccataaaactacacacacacacacacacacacacacacaccacacacacaaacaaaacaaaaaaaacaccaaagaaagatagctatcactgtacatatgaatactgtccaggatatcagatcaattatcaaatcc

SEQ ID NO: 1560898 - DNA, 4001 bp, Homo sapiens; identical to SEQ ID NO: 1560897

SEQ ID NO: 1560899 - DNA, 4001 bp, Homo sapiens
acagaatgggcaggcccggcgtggtggctcagcactttgggaggccgaggcgggcagatcacgaggtcaggagatcgagaccatcctggctaacacggtgaaaccccaactctactaaaaatacaaaaattatctgggtgtggcggtgtcccagctcctcgggaggctgaggcaggagaatcgtttgaactcaggaggcagaggttgcagtgagccgagattgcaccactgcacaccagcctggcgacagggcgagactctgtctcaagaaagaaaaaaaaagggcagcgccagggcctggaggcagggcaggacggcggagagggcgggatgtaagaacctgccttctgctcccacacaggaggggctggagctgctgtgaagggagaggccttggaggaggctcctgcagttgccggccgggtggaaagtcagggttacgagatgcccagaagggagtgcagcccgaccacagctcttatcgggcggaggctcacacaggttagcctccgtttccgacctccctgccccagcaactccaactagagacgcaggcacccccataacgacaggcgccgggcttccctcggcctggaaagctctccctggggtccccaaaacagacaccttctcttcatttagcccccgggagccctcccgccctcacactgccctcatgccagcatctggaacctcagtgttgactgaactgtggtgtgctcaagcttccagcatagaggtgcactcggcctggccaccacccctggcacacagcagcaacagccaaccccatctcggctgtacctcccgctgctgtgtgacctccggcaggtgactcagcacctccctcacaggctgttgtaagggaaatgtttgttatttgcatgttgcttagttcctggcatacagaaagtgccacctaaatgtttacataaataacaccataggtgctcaggaaatggtaccacgggctggcagacacccacagggacttcttgctgtcacctggcccaccctaaaaaagggtctccttccggaggtaagaggacttggcctctgctgtgagatggcagagaagcaggaaacacgttggggaggagggcaccccccagagatagaattccagggccattgtctgtgcagccacagagcaaacactcggcctttgttcccgggaccctgcgggaggggggcctcgggatgcccattccgccagtgtggcccgcaaacccgccggacaggtttggttctcctggcctcccggccccccgccaccccgttcacccgaagcctgggacccagccttcatccccagtgtctcccccgcccgagccagcagggcggctgggcctccccgcacgtgcacgggttcgaatcccgccgacgcaccgggtgccaggaccgagggtcagccctctccgcgcgcagcgggagcgcccaccccaggggcggaggcgcggacgtcctgccggggtaacccgcggccgcccccacctcccgggcccgcgtgactcacctcccaggccaggcggggcgggatggaggcgcgcgcgcggcccctccgcacagacttcctgctgccggggcgggggatgctggccccggctccccgggcctctcgcgacccccatccccctgggcctgggacgcggggacccccgagcctgggagggcgcgcgcagtgcggggcgcggagggaggtctggtcctcacgcgaggtccccgcctccagggtcctcggagggacgagggcgcgcagcctccgcgttcccctgcaaacttgcgcgcagccgggggcgtgtccgtcccgggagggtccccccaacacccgggtccccaaggctcttaccgaccagtaagcacagcacgtcgagcagcacgaagacccacctccgctgcatggtccccgcgacccccgacgccggtcccagcgcgtcccgtcgcgtcccggcccggccgcggagtcacgtggcgcggagcccgccccgcgcggagaggaggggaggggcgggaaggggaggaggggaggggcggggagggcacgaggggagaggtgaggaggggaggggaggggaggagggagggttaggggcggggaggggaggagggagggggaggggaggaggggagggctaggggcggggaggggaggggggagggggagggaagggaagaagggggggaggggaggagggaggggggacggcagcggcgggcaggggagcagcggggggggcggggcgcggcggacccgggaccgcgcggactctgcccccgcctggccgcggcgcccaaaagagcgggtggggcgagcgtgcgggcgccacggggacctcgtccgcccggagtcccggccctgacccgggctgtgcgggtctccgagcggcgtgaggtcctcagaggctggaggttccccgcgggtcgggccggcggagccccgggcggggacgtggagaaggaggacgagcagcggcgggaccggccccgcgggacggttcccgactttcctcctcagggagtggcagccgcgccgtgtgcgcctggaaactccgacagcaggaggcaccttaaagtggaaggggcgacgtggcttcatttcaggagtttcttttctcctaatactcaaaatcctggcgcgtccttggacccctggcacgttagaagctcgagttcctcggcacccaccttgcgacggcgtagggtgtccaggcgcagccctgtgcccaggcaccgttcctatcagcgcacttgctgtcccatttcacagaagagcacgggggcgccaggagctgggaaccccatgaaatggcgccggggtctgtgcccccaccaggtcgtggggagccctgagctgagggtgcctggggattgagggcacctgagccagggaaacccaggcccaagggacccacactgggtcctttcggctgggaccatccgggaggcctcaggagtgtcagacccacgtttccggagtccagccttgacctctgccactcacggtcacttaaatgggaagtggcaggcctggggtcagaaacaaggctgctgggccccagatccgctgccaccctgaccctcctctaaaacccgttcagcaccaccatcagccccctgccccagcaacaccaaaacagggtgcgtctcagcaactggacttcaactgggagctcctcgaccctgcttcccggatggtcagacacctgcacgtggggcaggggggcatcatgagggaactccaagggcaaggggctcttgggagacagcaaaggcacccagagtggtgctgggtgggaagacggtgcaagctgacctgtggccctccaagggcagggttgaggtgctcccttgctgcactcacggtggggtgggggggctctagctcccgtcggaattaggattgtgagggttctggtgcctagcatcaatgctacataaatgtagggttcagcgtcactactgcgctttcccccacacttcaccctgtctgcaaatgagtgaccactgctgtcagtgtagtcttgacagccaacgcacattttctcctaagatggagagggtgcaacatctactggagtcaaggaaaggcggtgttcttcattgagcacctactgtgtgctggggagcaagggagaggtcacttggaggggcctgccaaagtgggagcggggggaagacagtgggggctgtgggatggggccaagccaagagggagagacccaggagaggggtggaggtagacctgggaggatagagggtggaggtgaggctgcaggctgttcccccttccatccttccccttgggtcaggatttgggttagcccttaaaatccctgggcaggataaggattaaaatctggtggggaaagcaagaattaggattagggtcaggattggggtcgtctcctacatatgctgactgcagcccaccacacttcaaggaacttcttgtcacggctttcatagctggatctgctgctgcccccagctgcctggtcctc
